United States Patent Application Publication US 2008/0050393 A1 - sequence listing, part 34

SEQ ID NO: 121496 - DNA, 1179 bp, Homo sapiens
atgaaactcatggaaacacttaaccagtgcataaacgctggtcatgaaatgacgaaggctatcgccattgcacagtttaatgatgacagcccggaagcgaggaaaataacccggcgctggagaataggtgaagcagcggatttagttggggtttcttctcaggctatcagagatgccgagaaagcagggcgactaccgcacccggatatggaaattcgaggacgggttgagcaacgtgttggttatacaattgaacaaattaatcatatgcgtgatgtgtttggtacgcgattgcgacgtgctgaagacgtatttccaccggtgatcggggttgctgcccataaaggtggcgtttacaaaacctcagtttctgttcatcttgctcaggatctggctctgaaggggctacgtgttttgctcgtggaaggtaacgacccccagggaacagcctcaatgtatcacggatgggtaccagatcttcatattcatgcagaagacactctcctgcctttctatcttggggaaaaggacgatgtcacttatgcaataaagcccacttgctggccggggcttgacattattccttcctgtctggctctgcaccgtattgaaactgagttaatgggcaaatttgatgaaggtaaactgcccaccgatccacacctgatgctccgactggccattgaaactgttgctcatgactatgatgtcatagttattgacagcgcgcctaacctgggtatcggcacgattaatgtcgtatgtgctgctgatgtgctgattgttcccacgcctgctgagttgtttgactacacctccgcactgcagtttttcgatatgcttcgtgatctgctcaagaacgttgatcttaaagggttcgagcctgatgtaaatgtgtcaaaatctgatgacacactcaaaatcaacggagtggaagatcacaaaacgatttttgacggagacggaaaaacatatcagaacgttcagcagtttatcgatgaaggcaattatacatccggcgacaaccatacgctgagagaccctcactacgttgaagacaaaggccataaatactttgtattcgaagccaacacgggaacagaaaacggataccaaggcgaagaatctttatttggtttattgggggaaggaataaacacctgtgagagagtgagataa

SEQ ID NO: 121497 - DNA, 1305 bp, Homo sapiens
atgaagcgtgcgcctgttattccaaacatacgctcaatactcaaccggtatgaagatacttcgttatcgacaccagctgccccgatggtggattcgttaattgcgcgcgtaggagtaatggctcgcggtaatgccattactttgcctgtatgtggtcgggatgtgaagtttactcttgaagtgctccggggtgatagtgttgagaagacctctcgggtatggtcaggtaatgaacgtgaccaggagctgcttactgaggacgcactggatgatctcatcccttcttttctactgactggtcaacagacaccggcgttcggtcgaagagtatctggtgtcatagaaattgccgatgggagtcgccgtcgtaaagctgctgcacttaccgaaagtgattatcgtgttctggttggcgagctggatgatgagcagatggctgcattatccagattgggtaacgattatcgcccaacaagtgcttatgaacgtggtcagcgttatgcaagccgattgcagaatgaatttgctggaaatatttctgcgctggctgatgcggaaaatatttcacgtaaaattattacccgctgtatcaacaccgccaaattgcctaaatcagttgttgctcttttttctacgccggtgaactatctgtccggtcagtttttcgatatgcttcgtgatctgctcaagaacgttgatcttaaagggttcgagcctgatgtacgtattttgcttaccaaatacagcaatagtaatggctctcagtccccgtggatggaggagcaaattcgggatgcctggggaagcatggttctaaaaaatgttgtacgtgaaacggatgaagttggtaaagttattgacagcgcgcctaacctgggtatcggcacgattaatgtcgtatgtgctgctgatgtgctgattgttcccacgcctgctgagttgtttgactacacctccgcactgcagtttttcgatatgcttcgtgatctgctcaagaacgttgatcttaaagggttcgagcctgatgtacgtattttgcttaccaaatacagcaatagtaatggctctcagtccccgtggatggaggagcaaattcgggatgcctggggaagcatggttctaaaaaatgttgtacgtgaaacggatgaagttggtaaaggtcagatccggatgagaactgtttttgaacaggccattgatcaacgctcttcaactggtgcctggagaaatgctctttctatttgggaacctgtctgcaatgaaattttcgatcgtctgattaaaccacgctgggagattagataa

SEQ ID NO: 121498 - DNA, 3356 bp, Homo sapiens
  misc_feature (1)...(3356): n = a,t,c or g
attaattgcgttgcgctcactgcccgctttccagtcgggaaacctgtcgtgccagctgcattaatgaatcggccaacgcgcggggagaggcggtttgcgtattgggcgccagggtggtttttcttttcaccagtgagacgggcaacagctgattgcccttcaccgcctggccctgagagagttgcagcaagcggtccacgctgggtttgccccagcaggcgaaaatcctgtttgatggtggttccggaatcggcaaaatccattaattgcgttgcgctcactgcccgctttccagtcgggaaacctgtcgtgccagctgcattaatgaatcggccaacgcgcggggagaggcggtttgcgtattgggcgccagggtggtttttcttttcaccagtgagacgggcaacagctgattgcccttcaccgcctggccctgagagagttgcagcaagcggtccacgctggtttgccccagcaggcgaaaatcctgtttgatggtggttccgaaatcggcaaaatcccttataaatcaaaagaatagcccgagatagggttgagtgttgttccagtttggaacaagagtccactgaccatacccgagaggtcttctcaacactatcaccccggagcacttcaagagtaaacttcacatcccgaccacatacaggcaaagtaatggcattaccgcgagccattactcctacgcgcgcaattaacgaatccaccatcggggcagctggtgtcgataacgaagtatcagttgaagagcgttgatcaatggcctgttcaaaaacagttctcatccggatctgacctttaccaacttcatccgtttcacgtacaacattttttagaaccatgcttccccaggcatcccgaatttgctcctccatccacggggactgagagccattactattgctgtatttggtaagcaaaatacgtacatcaggctcgaaccctttaagatcaacgttcttgagcagatcacgaagcatatcgaaaaactgcagtgcggaggtgtagtcaaacaactcagcaggcgtgggaacaatcagcacatcagcagcacatacgacattaatcgtgccgatacccaggttaggcgcgctgtcaataactatgacatcatagtcatgagcaacagtttcaatggccagtcggagcatcagnatgggcggaaaactgtcctcctggctgatgtgaaagatctgggccccttcccgggttcgttgaaggctgttacctgggggggaggaccttacaaaaaaaaaacgcttgaggtgctgacccgcggttcgactctagaggatccccttctgacttttacgactgcacttctggcaggaggagcgactcaagccttcgcgaaagaaaataaccaaaaagcatacaaagaaacgtacggcgtctctcatattacacgccatgatatgctgcagatccctaaacagcagcaaaacgaaaaataccaagtgcctcaattcgatcaatcaacgattaaaaatattgagtctgcaaaaggacttgatgtgtgggacagctggccgctgcaaaacgctgacggaacagtagctgaatacaacggctatcacgttgtgtttgctcttgcgggaagcccgaaagacgctgatgacacatcaatctacatgttttatcaaaaggtcggcgacaactcaatcgacagctggaaaaacgcgggccgtgtctttaaagacagcgataagttcgacgccaacgatccgatcctgaaagatcagacgcaagaatggtccggttctgcaacctttacatctgacggaaaaatccgtttattctacactgactattccggtaaacattacggcaaacaaagcctgacaacagcgcaggtaaatgtgtcaaaatctgatgacacactcaaaatcaacggagtggaagatcacaaaacgatttttgacggagacggaaaaacatatcagaacgttcagcagtttatcgatgaaggcaattatacatccggcgacaaccatacgctgagagaccctcactacgttgaagacaaaggccataaataccttggcgaggactacatcttgtggggtgaatggaggcatcaggctagctcccgtatcacagcccatgtattcagcgcgcctaacctgggtatcggcacgattaatgtcgtatgtgctgctgatgtgctgattgttcccacgcctgctgagttgtttgactacacctccgcactgcagtttttcgatatgcttcgtgatctgctcaagaacgttgatcttaaagggttcgagcctgatgtacgtattttgcttaccaaatacagcaatagtaatggctctcagtccccgtggatggaggagcaaattcgggatgcctggggaagcatggttctaaaaaatgttgtacgtgaaacggatgaagttggtaaaggtcagatccggatgagaactgtttttgaacaggccattgatcaacgctcttcaactgaaagcattatccctaatgatggtaagaaattgtcattttctgtgtcaggaaaaatgaggaaagggcactacttttcgtctgaagagagtcatgttagaacagacatcctggcggatacaaaaatgcaatctgcaaacggacttgatgtgtgggacagctggccgctgcaaaacgctgacggaacagtagctgaatacaacggctatcacgttgtgtttgctcttgcgggaagcccgaaagacgctgatgacacatcaatctacatgttttatcaaatggtcggcgacaactcaatcgacagctggaaaaacgcgggccgtgtctttaaagacagcgataagttcgacgcccacgatccgatcctgaaagatcagacgcaagaatggtccggttctgcaacctttacatctgacggaaaaatccgtttattctacactgactattccggtaaacattacggcaaacaaagcctgacaacagcgcaggtaaatgtgtcaaaatctgatgacacactcaaaatcaacggagtggaagatcacaaaacgatttttgacggagacggaaaaacatatcagaacgttcagcagtttatcgatgaaggcaattatacatccggcgacaaccatacgctgagagaccctcactacgttgaagacaaaggccataaataccttgtattcgaagccaacacgggaacagaaaacggataccaaagcgaagaatctttatttaacaaagcgtactacggcggcggcacgaacttcttccgtaaagaaagccagaagcttcagcagagcgctaaaaaacgcgatgctgaattaacgaacggcgccccttcgtatcatagagttaaattattgattacccattga

SEQ ID NO: 121499 - DNA, 3976 bp, Homo sapiens
tgtgacaatctaaaaacttgtcacacttcacatggatctgtcatggcggaaacagcggttatcaatgcacaagaaacgtaaaaatagcccgcgaatcgtccagtcaaacgacctcactgaggcggcatatagtctctcccgggatcaaaaacgtatgctgtatctgttcgttgaccagatcagaaaatctgatggcaccctacaggaacatgacggtatctgcgagatccatgttgctaaatatgctgaaatattcggattgacctctgcggaagccagtaaggatatacggcaggcattgaagagtttcgcggggaaggaagtggttttttatcgccctgaagaggatgccggcgatgaaaaaggctatgaatcttttccttggtttatcaaacgtgcgcacagtccatccagagggctttacagtgtacatatcaacccatatctcattcccttctttatcgggttacagaaccggtttacgcagtttcggcttagtgaaacaaaagaaatcaccaatccgtatgccatgcgtttatacgaatccctgtgtcagtatcgtaagccggatggctcatgcattgtctctctgaaaatcgactggatcatagaagcgtaccagctgcctcaaagttaccagcgtatgcctgacttccgccgccgcttcctgcaggtctgtgttaatgagatcaacagcagaactccaatgcgcctctcatacattgagaaaaagaaaggccgccagacgactcatatcgatctggctctgaaggggctacgtgttttgctcgtggaaggtaacgacccccagggaacagcctcaatgtatcacggatgggtaccagatcttcatattcatgcagaagacactctcctgcctttctatcttggggaaaaggacgatgtcacttatgcaataaagcccacttgctggccggggcttgacattattccttcctgtctggctctgcaccgtattgaaactgagttaatgggcaaatttgatgaaggtaaactgcccaccgatccacacctgatgctccgactggccattgaaactgttgctcatgactatgatgtcatagttattgacagcgcgcctaacctgggtatcggcacgattaatgtcgtatgtgctgctgatgtgctgattgttcccacgcctgctgagttgtttgactacacctccgcactgcagtttttcgatatgcttcgtgatctgctcaagaacgttgatcttaaagggttcgagcctgatgtacgtattttgcttaccaaatacagcaatagtaatggctctcagtccccgtggatggaggagcaaattcgggatgcctggggaagcatggttctaaaaaatgttgtacgtgaaacggatgaagttggtaaaggcatcccgaatttgctcctccatccacggggactgagagccattactattgctgtatttggtaagcaaaatacgtacatcaggctcgaaccctttaagatcaacgttcttgagcagatcacgaagcatatcgaaaaactgcagtgcggaggtgtagtcaaacaactcagcaggcgtgggaacaatcagcacatcagcagcacatacgacattaatcgtgccgatacccaggttaggcgcgctgtcaataactatgacatcatagtcatgagcaacagtttcaatggccagtcggagcatcaggctatcagagatgccgagaaagcagggcgactaccgcacccggatatggaaattcgaggacgggttgagcaacgtgttggttatacaattgaacaaattaatcatatgcgtgatgtgtttggtacgcgattgcgacgtgctgaagacgtatttccaccggtgatcggggttgctgcccataaaggtggcgtttacaaaacctcagtttctgttcatcttgctcaggatctggctctgaaggggctacgtgttttgctcgtggaaggtaacgacccccagggaacagcctcaatgtatcacggatgggtaccagatcttcatattcatgcagaagacactctcctgcctttctatcttggggaaaaggacgatgtcacttatgcaataaagcccacttgctggccggggcttgacattattccttcctgtctggctctgcaccgtattgaaactgagttaatgggcaaatttgatgaaggtaaactgcccaccgatccacacctgatgctccgactggccattgaaactgttgctcatgactatgatgtcatagttattgacagcgcgcctaacctgggtatcggcacgattaatgtcgtatgtgctgctgatgtgctgattgttcccacgcctgctgagttgtttgactacacctccgcactgcagtttttcgatatgcttcgtgatctgctcaagaacgttgatcttaaagggttcgagcctgatgtacgctccagagggaaatgcattgatgctggcagggttgggcaggatgaattagcccccagacccccagatgatgtgtgggagcactggcagattggatgggcccctcttcagacttcctggaaatgtgcacagtcaccggtgatgtggacagagcaaggtgatccccaggcccccattggcacatgggcactggcaggcgcagcaccaggtaatgaacgtgaccaggagctgcttactgaggacgcactggatgatctcatcccttcttttctactgactggtcaacagacaccggcgttcggtcgaagagtatctggtgtcatagaaattgccgatgggagtcgccgtcgtaaagctgctgcacttaccgaaagtgattatcgtgttctggttggcgagctggatgatgagcagatggctgcattatccagattgggtaacgattatcgcccaacaagtgcttatgaacgtggtcagcgttatgcaagccgattgcagaatgaatttgctggaaatatttctgcgctggctgatgcggaaaatatttcacgtaagattattacccgctgtatcaacaccgccaaattgcctaaatcagttgttgctcttttttctcaccccggtgaactatctgcccggtcaggtgatgcacttcaaaaagcctttacagataaagaggaattacttaagcagcaggcatctaaccttcatgagcagaaaaaagctggggtgatatttgaagctgaagaagttatcactcttttaacttctgtgcttaaaacgtcatctgcatcaagaactagtttaagctcacgacatcagtttgctcctggagcgacagtattgtataagggcgataaaatggtgcttaacctggacagaagacactctcctgctttctatctgggggaaaaggacgatgtcacttatgcaataaagcccacttgctggcgggggcttgacattactccttcctgtctggctgtgcaccgtattgaaactgagttaatgggcaaatttgatgaaggtaaagtgcccaccgatccacacctgatgctccgactggccattgaaactgttgctcatgactatgatgtcatagttattgacagcgcgcctaacctgggtatcggcacgattaatgtcgtatgtgctgctgatgtgctgattgttcccacgcctgctgagttgtttgactacacctccgcactgcagtttttcgatatgcttcgtgatctgctcaagaacgttgatcttaaagggttcgagcctgatgtacgtattttgcttaccaaatacagcaatagtaatggctctcagtccccgtggatggaggagcaaattcgggatgcctggggaagcatggttctaaaaaatgttgtacgtgaaacggatgaagttggtaaaggtcagatccggatgagaactgtttttgaacaggccattgatcaacgctcttcaactggtgcctggagaaatgctctttctatttgggaacctgtctgcaatgaaattttcgatcgtctgattaaaccacgctgggagattagataa

SEQ ID NO: 121500 - DNA, 1494 bp, Homo sapiens
tcagcatgctgaacaaagcatatttttcactatgtaatgccgataccatttattccatgagccaggaggagccattatggttcgcaaatattgcccggcagcgtaagattgtcgttcagggtaagcgcctgttgaatacgcgcagaagttacgcccgtcacaaggatcggagacgtacacggcatagggcagggcatggttggctttaataacctcggccgccgctttcatctggatgtccagttcgtaatgcccctggtgcaacgccagcgccacgggtttaccgtctgcgccgcgtaagccaccgagtgtactgagcagtaaaataccgtcccgatccagctcgtccggagaccaacccattccggcattcatggtcataccgaacagatccccgctcgggcggttgataagcatctctgcggttaatgggagttcgccgtccgggccatcggcgtgcgttctgacggtgtaaatatcgtggctctcgtcagcaaaaatattgcgaacagacatgagtttctcctcagactggtaaaatgcccggttgatgtccgttgtgaacgtatcggcggcggtacagacgaaattatgatttacgtagcaggtcggcagatcctgaaagacttccagccgtaacggtagattaatcccctgccgcacaccgtgcagatgacgtgctaccgcgtcatcgatatcgacgactcgtccctgtgaaagtaccagcaatgcaccttcgtgcaattcaccaatacgctcacgatcgccgctgccgataattcgcccacgggcatccattacgttgatattggtatcgatgatgcgcatggtacgtgccacgatatcctgcgccattttggtatcaagatgccagccagccataagtcctccgttatgcacggctttcttcaggccgatctgcgcagccggagtgcccgttttcacgttgttcactaccacgccctgatctttgcctttgttgctcatctcagcgccttcaatgccgttgaagatggagctggaatcaacctgattctggctgctctgagcctcgacataggccagccgatggcgcgtcgagagtttgtggaataagcgcgattcaatagggaaaacatgatcaatggtgcgattgtcccagttattcacaaacagggagttagcaaaacgcagcgccaacaggttcagcaccgtttctttaccaagatagtggtcgatacggtaaacctggcactcctcgaagtattcgccaacctgatcattgatttcctgcgaggtcgccagcgacgtccccagcggtttctccatgactacgcgtgccggtttagcattcagttttgcctcgccaagccctttgcaaattgcgccaaaagtgtacacgtccagcagcagacgcgtcggatcttccagcaactctttgatcgttaccaggaagcccacggattcgcgaccatcgatcagacggtgatcgtaggacagcgccaggtacatcat

SEQ ID NO: 121501 - DNA, 2141 bp, Homo sapiens
gtccgtcctcccttattgctaatgattgccggacttcacatccgtgggttgccagcgggcaacgttcgtagaaaaaacagccttgcggcaacgtgcggtttcccggcagatccgttttacgtaatgcccattcttcctccagcggtttatcaatggcggggagggaatccagcaataatcgggtgtatggatgtgcaggtgccgtcagcacctgctgcgcgtcgcccagttctacaatctgcccgagatacatcaccgccacccgatcgctcatatgacgtatcaccgagacattgtgtgaaatcagcacataggtcagcccgtgattttcctgtagcgttaccagtaaattgaggatctgcgcctgaacggagatatccagcgcagaggttggctcatcaagcacaatcacgtcaggctgcgaagagagtgctctggcaatggcgatacgttgccgctgcccgccggagaacgcatgaggcaggcggtgcgggttgccaccggtacaaacatcatccagtgccgcctgcgccagtgccggaatgtcttccttgcgtacaccaacatcacgcaaatgtggcgtggtcgcgctcggaccgtagcatttgcgcgaggtcacatgtgccaccagctcagcgggcgtggcatcctgcaactctgcggtagaagcgttaccggtcgccagacctgcggcttttgccatttccagaatcgttggatgatctttttcgtgaatatcgacgcccagcgcgccgttataggttttgacaccggttgaccaggcggttgctgatgcagccgagtcggtgacagtagccaggtttgccggtttttttattcagcgcatagtgagtgtattgcccggtaagcggtaaggcatctatacctttaaaaaagccgcccgcaccttcggcataattacgtgcggcagtaatttccgagtcccccatcccatcgccaatcagcaaaataatattttttgcaggtttatcgccgttaaacggcgaacaataaccgcgcagctcttcgccgttgtggctgttcactttttcttcataagtacggaagtagccgttcagtgccggacgaccaaattcgttgttaaacgccgcgccgcccagcgggccttcggtcatgatgtccagcgcggtgacaatgcgctcaggcttaccgaaatcttcttcccacggcatcgatacccagtcggcgttaaaaattttgtggcggcagtgctcggagttcgcctgggcaaacatatacagttcgatgtcgttcgggttacgaccaagctttgtgaaagcatcctgcagatagtcaatttcatcttccgccagagccaagccaagacgcaggttagcgtcgatcagcgcctgacggccctgccccagcaaatcaacgctggtaaccggagtcggttgatggtgggcaaacaactgctctgcatcatctaaagcaaaaaagaccgtttccatcatgcggtcgtgcagttcagcggtaacctgctgccattgttcattggtcagcgtaccggctttatgcggatgccattcgttataatgctcgaacgcctctgcaaggttctttgctgccgttaacccgtctggtttgggcatgatactgatgtagtcacgctttatcgttttcacgaagctctctgctattccgttactctccggactccgcaccgccgtgttcttcggttcaagtcccaacatccgggcgaactggcgtgtttcattagcccggtagcatgaaccattatccgtcagccactccacgctcctcatgagctgcgtctgtatgtgcgtgaactgcgtgaccgtagtcgtactgtcgatgagctgaaccgtactatcgatcagctgtgccgtgaaaacgacatcaacattgcctttaaccagcttgaagtgcatctgcacaacgagaagggcgatgaggtgacggaagtaaaacgcgaccgcttcaatctttttggcggcaaaacgcccatggaacaccgctttgccgccgcccgctggcagacgggggtgaccggatgcccgcaactggaagaggctctggtttcgtttgactgccgtatcagccaggtggtgagcgtcggcacccacgacattctgttttgcgccatcgaagcgattcat

SEQ ID NO: 121502 - DNA, 595 bp, Homo sapiens
ttgaaaaattccaaacctcaggtggtgatggctgccgcaggtatcttcctgataatgtgcggtgtctggttagggttcggtggtgtactcgatcccaccaaaagcagcggttatttgatcgtcgatatttataatgaaatcatctgcatgctgtccaaccgcattgccggattggggctgtcgattatggcggtgggcggttatgcccgctacatggagggcacaccggccagtcgcgcgatggtgagcttgttaagccgaccgttaaaactcattcgctcgccgtatattattctgtcggcaacttaggtcatcggccaaatcatgccggcagtttattaccagcgcctccggtctgggtatgttgctgatggtccccttatttccgacgctggtgagtctgggagtaagtcgtctctctgcggtggcagttatcgcaaccacgatgtccattgagtgggggattctggaaacgaactccatttttgctgcccaggtagcgggaatgaaaattgccacattcttctgccacgcccataatccggtcgcctccagggtcattctctcggtggcgatctccgggacgcgagctcga

SEQ ID NO: 121503 - DNA, 981 bp, Homo sapiens
atgggctatgtgatcctgaaaaactacaaacctcaggtggtgctggctgccgcaggtatcttcctgatgatgtgcggtgtctggttagggttcggtggtgtactcgatcccaccaaaagcagcggctacttgatcgtcgatatttataatgaaatcctgcgcatgctgtccaaccgcattgccggattggggctgtcgattatggcgttgggcgtttatgcccgctacatggagcgcataggggccagtcgcgcgatggtgagcttgttaagccgcccgttaaaactcattcgctcgccgtatattattctgtcggcaacttacgtcatcggccaaatcatggcgcagtttattaccagcgcctccggtctgggtatgttgctgatggtcaccttatttccgacgctgcagagcagccagaatcaggttgattccagctccatcttcaacggcattgaaggcgctgagatgagcaacaaaggcaaagatcagggcgtggtagtgaacaacgtgaaaacgggcactccggctgcgcagatcggcctgaagaaaggtgatgtgattattggcgcgaaccagcaggcagtgaaaaacatcgctgaactgcgtaaacaaactgtgaatgccgtcgggccaatgggcggtattacttctgccagtatgccgatgctggtggttgagaacgtgaccgacggcaaccgaaacgcatcagcggtgcgacaccgtcttatccgcggcgcaacactgctggcggccgcgacacccccctactcctgcttctactctttatcctacaagtcacagtttcagaacttaccgcttaccgggcaatacactcactatgcgctgaataaaaaaaccggcaaaccggactacgtcaccgactcggctgcatcagcaaccgcctggtcaaccggtgtcaaaacctataacggcgcgctgggcgtcgatatacgaacagtggggatacgtcggggctaa

SEQ ID NO: 121504 - DNA, 492 bp, Homo sapiens
  misc_feature (1)...(492): n = a,t,c or g
aaacaaccccatcaaaaagtgggcaaaggacatgaacagacacttctcaaaagaagacatttatgcagccaaaaaacacatgaaaaaatgctcaccatcactggccatcagagaaatgcaaatcaaaaccacaatgagataccatctcacaccagttagaatggcaatcattaaaaagtcaggaaataacagatactggagaggatgtggagaaataggaatgcttttacactgttggtgggagggtaaattagttcaaccattgtggaagacagtggtatgtacccaaaggattatnaaatcattctacttttaaagatacatacacacgtatgtttatttacagcactgtttcacaatagcaaaganttgggaacccaaccccaatggttcntcattgatagactgtttaggcaagacttattaaaggagggaaggngagaagggattcaantcggtgggtattaaaaagtggttaaagggggtgtcacc

SEQ ID NO: 121505 - DNA, 2465 bp, Homo sapiens
atgggagactttaacaccccactgtcaacattagacagatcaatgagacagaaagtcaaaaaggatacccaggaattgaactcagctctgcaccaagcagacctaatagacatctacagaactctccaccccaaatcaacagaatatacatttttttcagcaccacaccacacctattccaaaattgaccacatacttggaagtaaagctctcctcagcaaatgtaaaagaacagaaattataacaaactatctctcagacggcagtgcaatcaaactagaactcaggattaagaatctcactcaaaaccgctcaactacatggaaactgaacaacctgctcctgaatgactactgggtacctaacgaaatgaaggcagaaataaagatgttctttgaaaccaacgagaacaaagacacaacataccagaatctctgggacgcattcaaagcagtgtgtagagggaaatttatagcactaaatgcccacaagagaaagcaggaaagatccaaaattgacaccctaacatcacaattaaaagaactagaaaagcaagagcaaacacattcaaaagctagcagaaggcaagaaataactaaaatcagagcagaactgaaggaaatagagacacaaaaaacccttcaaaaaattaatgaatccaggagctggttttttgaaaggatcaacaaaatagatagaccgctagcaagactaataaagaaaaaaagagagaagaatcaaatagatacaataaaaaatgataaaggggatatcaccaccaatcccacagaaatacaaactaccatcagagaatactacaaacacctctacgcaaataaactagaaaatctagaagaaatggataaattccttgacacatacactctcccaagactaaaccaggaagaagttgaatctctgaatagaccaataacaggatctgaaattgtggcaataatcaatagcttaccaaccaaaaagagtccaggaccagatggattcacagccgaattctaccagaggtacaaggaggaactggtaccattccttctgaaactattccaatcaatagaaaaagagggaatcctcctgttggaagttctggccagggcaattaggcaggagaaggaaataaagggtattcaattaggaaaagaggaagtcaaattttccctgtttgcagacgacatgattgtatatctagaaaaccccattgtctcagcccaaaatctccttaagctgataagcaacttcagcaaagtctcaggatacaaaatcaatgtacaaaaatcacaagcattcttatacaccaacaacagacaaacagagagccaaatcatgagtgaactcccattcacaattgcttcaaagagaataaaatacctaggaatccaacttacaagggatgtgaaggacctcttcaaggagaactacaaaccactgctcaaggaaataaaagaggatacaaacaaatgcaagaacattccatgctcatgggtaggaagaatcaatatcgtgaaaatggccatactgcccaaggtaatttacagattcaatgccatccccatcaagctaccaatgcctttcttcacagaattggaaaaaactactttaaagttcatatggaaccaaaaaagagcccgcatcgccaagtcaatcctgagccaaaagaacaaagctggaggcatcacgctacctgacttcaaaccatactacaaggctacagtaaccaaaacagcatggtactggtaccaaaagagagatatagatcagtggaacagaacagagccctcagaaataacgccgcatatctacaactatctgatctttgacaaacctgagaaaaacaagcaatggggaaaggattccctatttaataaatggtgctgggaaaactggctggccatatgtagaaagctgaaactggatcccttccttacaccttatacaaaaatcaattcaagatggattaaagacttaaacgttagacctaaaaccataaaaaccctagaagaaaacctaggcaataccattcaggacataggcatgggcaaggacttcatgtctaaaacaccaaaagcaatggcaacaaaagacaaaattgacaaatgggatctaattaaacttaagagcttctgtacagcaaaagaaactaccatcagagtgaacaggcaacctacaaaatgggagaaaattttcacaacctactcatctgacaaagggctaatatccagaatctacaatgaactcaaacaaatttacaagaaaaaaacaaacaaccccatcaaaaagtgggcgaaggacatgaacagacacttctcaaaagaagacatttatgcagccaaaaaacacatgaaaaaatgctcatcatcactggccatcagagaaatgcaaatcaaaaccacaatgagataccatctcacaccagttagaatggcgatcattaaaaagtcaggaaacaacag

SEQ ID NO: 121506 - DNA, 1419 bp, Homo sapiens; identical to SEQ ID NO: 119507

SEQ ID NO: 121507 - DNA, 2272 bp, Homo sapiens; identical to SEQ ID NO: 119725

SEQ ID NO: 121508 - DNA, 3020 bp, Homo sapiens
atggagctgaaaaccaaggctcaagaactacgtgaagaatgcagaagcctcaggagccaatgcgatcaactggaagaaagggtatcagcgatggaagatgaaatgaatgaaatgaagcgagaagggaagtttagagaaaaaagaataaaaagaaacgaacaaagcctccaagaaatacgggactatgtgaaaagaccaaatctacgtctgattggtgtacctgaaagtgacagggagaatggaaccaagctggaaaacactctgcagaatattatccaggagaacttccccaatctagcaaggcaggccaacgttcagattcaggaaatacagagaacgccacaaagatactccttgagaagagcaactccaagacacacaattgtcagattcaccaaagttgaaatgaaggaaaaaatgttaagggcagccagagagaaaggtcgggttaccctcaaagggaagcccatcagactaaagcggatctctcggcagaaactctacaagccagaagagatgtgtagagggaaatttacagcactaaatgcccacgagagaaagcaggaaagatccaaaattgacaccctaacatcacaattaaaagaactagaaaagcaagagcaaacacattcaaaagctagcagaaggcaagaaataactaaaatcagagcagaactgaaggaaatagagacacaaaaaacccttcaaaaaattaatgaatccgggagctggttttttgaaaggatcaacaaaattgatagaccgctagcaagactaataaagaaaaaaagagagaagaataaaatagatgcaataaaaaatgataaaggggatatcaccactgatcccacagaaatacaaactaccatcagagaatactacaaacacctctacgcaaataaactagaaaatcgagaagaaatggataaattcctcaacacatacactctcccaagactaaaccaggaaaaagttgaatctctgaatagaccaataacaggagctgaaattgtggcaataatcaatagcttaccaaccaaaaagagtccaggaccagatggattcacagccgaattctaccagaggtacaaggaggaactggtgccattccttctgaaactattccaatcaacagaaaaagagggaatcctccctaactcatttgatgaagccagcatcatcctgataccaaagcccagcagagacacaaccaaaaaagagaattttagaccagtatccttgatgaacattgatgcaaaaagcctcaataaaacactggcaaaccgaatccagcagcacatcaaaaagcttatccaccatgatcaagtgggcttcatccctgggatgcaaggctggttcaatatacacaaatctataaatgtaatccagcatataaacagaaccaaagacaaaaaccacataattatctcaatagatgcagaaaaggcctttgataaaattcaacaacacttcatgctaaaaactctcaataaattaggtattgatgggacgtatctcaaaataataagagctatctatgacaaacccacagccaatatcatactgaatgggcaaaaactggaagcattccctttgaaaactggcacaagacagggatgccctgtctcaccactcctattcaacatagtgttggaacttctggccacggcaattaggcagaaggaaataaagcgtattcaattaggaaaagaggaagtcaaattgtccctgtttgcagacgacatgactgtatatctagaaaaccccactgtctcagcccaaaatctccttaacctgataagcaacttcagcaaagtctcaggatacaaaatcaatgtacaaaaatcacaagcattcttatacaccaataacagacaaacagagagccaaatcatgagtgaactcccattcacaattgcttcaaagagaataaaatacctaggaatccaccttacaagggacgtgaaggacctcttcaaggaaaactataaaccactgctcaatgaaataaaagaggatacaaagaaatggaagaacattccatgctcatgggtaggaagaatcaatatcgtgaaaatggccatactgcccaaggtaatttatagattcaatgccatccccatcaagctgccaatgactttcttcacagaattggaaaaaactactttaaagttcatatggaaccaaaaaagagcccgcatcgccaagtcaatcctaagccaaaagaacaaagctggaggcatcatgctacctgacttcaaactatactacaaggctacagtaaccaaaacagcatggtactggtaccaaaacagagatatagatcaatggaacagaacagagccctcagaaacaacgccatatatctacaactatctgatctttgacaaacctgagaaaaacaagcaatggggaaaggattccctattcaataaatggtgctgggaaaactggctagccatatgtagaaagctgaaactggatcccttccttacaccttatacaaaaatcaattcaagatggattaaagacttaaacgttagacctaaaaccataaaaaccctagaagaaaacctaggctttaccattcaggacataggcatgggcaaggacttcatgtgtaaaacaccaaaagcaatggcaacaaaagccaaaattgacaaatgggatctaatgaaactaaagagcttctgcacagcaaaagaaactaccatcagagtgaacaggcaacccacaaaatgggagaaaattttcacaacctactcatctgacaaagggctaatatccagaatctacaatgaactcaaacaaatttacaagaaaaaaacaaacaaccccatcaaaaagtgggcaaaggacatgaacagacacttctcaaaagaagacatttatgcagccaaaaaacacatgaaaaaatgctcatcatcactggccatcagagaaatgcaaatcaaaaccacaatgagatatcatctcacaccagttagaatggcaatcatgaaaaagtcaggaaacaacag

SEQ ID NO: 121509 - DNA, 3046 bp, Homo sapiens
atggtaaagggatcaattcaacaagaagagctaactatcttaaatatatatgcacctaatacaggagcactcagattcataaagcaagtccttagagacctacaaagagacttagactcccacacaataataatgggagattttcacaccccactgtcaacattagacagatcaacaagacagaaggttaacaaggatatccaggaattgaactcagctctgcaccaagaggacctaatagacatctacagaactctccaccccaaatcaacagaatatacatttttttcagcaccacaccacacctattccaaaattgaccacatagttggaagtaaagctctcctcagcaaatgtaaaagaacagaaattataacaaactgtctctcagaccacagtgcaatcaaactagaactcaggattaagaatctcactcaaaaccgctcaactacatggaaactgaacaacctgctcctgaatgactactgggtacataacgaaatgaaggcagaaataaagatgttctttgaaaccaacgagaacaaagacactacataccagaatctctgggacacattcaaagcagtgtgtagagggaaatttatagcactaaatgcccacaagagaaagcaggaaagatctaaaattgacaccctaacatcacaattaaaagaactagagaagcaagagcaaacacattcaaaagctagcagaaggcaagaaataactaaaatcagagcagaactgaaggaaatagagacacaaaaaacccttcaaaacattaatgaatccaggagctggttttttgaaaggatcaacaaaattgatagaccactagcaagactaataaagaaaaaaagagagaagaatcaaatagatgcaataaaaaatgataaaggggatatcaccaccgatcccacagaaatacaaactaccatcagagaatactacaaacacctctatgcaaataaactagaaaatctagaagaaatggataaattcctcaacacatacactctcccaacactaaaccaggaagaagttgaatctctgaatagaccaataacaggagctgaaattgtggcaataatcaatagcttaccaaccaaaaagagtccaggaccagatggattcacagccgaattctaccagaggtacaaggaggaactggtaccattccttctgaaaccattccaatcaatagaaaaagagggaatcctccctaactcattttatgaggccagcatcattctgataccaaagccgggcagagacacaacaaaaaaagagaattttagaccaatatccttgatgaacattgatgcaaaaatcctcaataaaatactggcaaaacgaatccagcagcacatcaaaaatcttatccaccatgatcaagtgggcttcatccctgggatgcaaggctggttcaatatacgcaaatcaataaatgtaatccagcatataaacagagccaaagacaaaaaccacatgattatctcaatagatgcagaaaaagcctttgacaaaattcaacagcccttcatgctaaaaactctcaataaattagacgacatgattgtatatctagaaaaccccatcgtctcagcccaaaatctccttaagctgataagcaacttcagcaaagtctcaggatacaaaatcaatatacaaaaatcacaagcattcttatacaccaacaacagacaaacagagagccaaatcatgagtgaactcccattcacaattgcttcaaagagaataaaatacctaggaatccaacttacaagggatgtgaaggacctcttcaagggagaaccacaaaccactgctcaacgaaataaaagaggatacaaacaaatggaagaacattccatgctcatgggtaggaagaatcaatatcgtgaaaatggccatactgcccaaggtaatttacagatcaatgccatccccatcaagctaccaatgactttcttcacagaattggaaaaaactactttaaagttcatatggaaccaaaaaagagcccgcatcgccaagtcaatcctaagccaaaagaacaaagctggaggcatcacactacctgacttcaaactatactacaaggctacagtaaccaaaacagcatggtactggtaccaaaacagagatatagatcaatggaacagaacagagccctcagaaagaacgccgcatatctacaactatctgatctttgacaaacgtgagaaaaacaagcaatggggaaaggattccctgtttaataaatggtgctgggaaaactggctagccatatgtagaaagctgaaactggatcccttccttacaccttatacaaaaatcaattcaagatggattaaagacttaaacgttagacctaaaaccataaaaaccctagaagaaaacctaggctttaccattcaggacataggcatgggcaaggacttcatatctaaaacaccaaaagcaatggcaacaaaagccaaaattgacaaatgggatctaattaaactaaagagcttctgcacagcaaaagaaactaccatcagagtgaacaggcaacctacaaaatgggagaaaattttcgcaacctactcatctgacaaagggctaatatccagaatctacaatgaactcaaacaaatttacaagaaaaaaacaaacaaccccatcaaaaagtgggcgaaggacatgaacagacacttctcaaaagaagacatttatgcagccaaaaaacacatgaaaaaatgctcaccatcactggccatcagagaaatgcaaatcaaaaccacaatgagataccatctcacaccagttagaatggcaatcattaaaaagtcaggaaacaaccggtgctggagaggctgtggagaaataggaacacttttacactgttggtgggactgtaaactagttcaaccattgtggaaggcagtgtggcgattcctcagggatctagaactggaaataccatttgacccagccatcccattactgggtatatacccaaaggactataaatcatgctgctataaagacacatgcacac

SEQ ID NO: 121510 - DNA, 1932 bp, Homo sapiens; identical to SEQ ID NO: 118488

SEQ ID NO: 121511 - DNA, 1965 bp, Homo sapiens
atgattatctcaacagatgcagaaaaggccgttaacaaaattcaacaacccttcatgctaaaaactctcaataaatttggtatcgatgggacatatctcaaaagaataagagctatctatgacaaacccacagccaatatcatactgaatgggcaaaaactggaagcattccctttgaaaactggcacaacacagggatgccctctctcaccactcctattcaacatagtgttggaagttctggccagggcaatcaggcaggagaaagaaagaaagggtattcaattaggaaaagaggaagtcaaattgtccctgtttgcagatgacatgattgtatatctagaaaaccccatcgtctcagcccaaaatctccttaagctgataagcaacttcagcaaactctcaggatacaaaatcaatgtgcaaaaatcacaagcattcttctacaccaataacagacaaacagagagccaaatcatgagtgaactcccattcacaattgcttcaaagagaataaaatacctaggaatccaacttacaagggatgtgaaggacctcttcaaggagaactacaaaccgctgctcaacgaaataaaaaaggacacaaacaaatggaagaacattccatgctcattgataggaagaatcaatattgtgaaaatggccataatgcccaagttcatatggaaccaaaaaagagcctgcattgccaagacaatcctaagccaaaagaacaaagctggaggcatcatgctacctgacttcaaactatactacaaggctacagtaaccaaaacagcatggtactggtaccaaaacagagatatagatcaatggaacagaatagagccctcagaaataataccacacatctacaacagtctgatctttgacaaacctgacaaaaacaagcaatgggtaaacgattccctatttaataaatggtgttgggaaaactggctagctatatgtagacagctgaaactggatcccttccttacaccttatacaaaaattaattcaagatggattaaagacttaaatgttagacttaaaaccataaaaaccctagaagaaaacctaggcaataccattcaggacataggcatgggcaaggacttcatgtctaaaacaacaaaagcaatggcaacaaaagccaaaattgacaaatgggatctaattaaactaaagagcttctgcacagtgaaagaaactaccatcagagtgaacaggcaacctacagaatgggagaacatttttgcaatctactcatctgacaaaggcctaatatccagagtctacaaagaactcaaacaaatttacaagaaaaaaaacaaccccatcaaaaagtgggcaaagcatatgaacagacacttctcaaaagaagacatttatgcagccaaaagacacatgaaaaaatgctcatcatcacaggccatcagagaaatgcaaatcaaaaccacaatgagataccatctcaaaccagttagaatggcaatcattaaaaagtcaggaaacaacaggtgctggagaggatgtggagaaataggaacactttcacactgctggtgggatgggaaactagttcaaccattgtggaagacagtgtggcgattcctcaaggatctagaactagaaataccatttgacccagtcatcccattactgggtatatacccacaggattataaatcatgctgctataaagacacatgcacacatatgtttattgtggcaccattcacaatagcaaagacttggaaccaacacaaatgtccatcaatgatagactggattaagaaaatgtggcacatatacaccatggaagactatgcagccataaaaaatgatgagttcatgtcctttgtagggacatggatgaagctggaaaccatcattctcagcaaactgtcacaaggacagaaatccaaacaccacatgttctcactcataggtgagaactga

SEQ ID NO: 121512 - DNA, 1947 bp, Homo sapiens; identical to SEQ ID NO: 119723

SEQ ID NO: 121513 - DNA, 1716 bp, Homo sapiens
atggataaattcttcgacacatacactctcccaagactaaaccaggaagaagttgcatctctgaatagaccaataacaggagctgaaattgtggcaataatcaatagtttaccaaccaaaaagagtccaggaccagatggattcacagccgaattctaccagaggtacaaggaggaactgaataaaatactaggaatccaacttacaagggatgtgaaggacctcttcaaggagaactacaaactgctgctcaatgaaataaaagaggatacaaacaaatggaagaacattccatgctcatgggtaggaagaatcaatatcgtgaaaatggccatactgcccaaggtaatttacagattcaatgccatccccatcaagctaccaatgcctttcttcacagaattggaaaaaactaccttaaagttcatatggaaccaaaaaagagcctgcatcaccaagtcaatcctaagccaaaagaacaaagctggaggcatcacactacctgacttcacactatactacaaggctacagtaaccaaaagagcatggtactggtaccaaaacagagatatagatcaatggaacagaacagagccctcagaaataacgccacatatctacaactatctgatctttgatgaacctgagaaaaacaagccgtggggaaaggattccctatttaataaatggttctgggagaactggttagccatatgtagaaagctgaaactggatcccttccttacaccttatacaaaaatcaattcaagatggattaaagacttaaacattagacctaaaaccataaaaaccatagaagaaaacctaggcattaccattcaggacataggcatgggcaaggacttcatgtttaaaacaccaaaagcaatggcaacaaaaaacaaaattgacaaatgggatctaattaaactaaagagcttctgcacagcaaaagaaactaccatcagagtgaacaggcaacctacgaaatgggagaaaattttcgcaacctactcatctgacaaagggctaatatccagaatctacaatgaactcaaacaaatttacaagaaaaaaacaaacaaccccatcaaaaagtgggcaaaggacatgaacagacacttctcaaaagaagacatttatgcagccaaaaaacacatgaaaaaatgttcatcatcactggccatcagagaaatgcaaatcaaaaccacaatgagataccatctcacaccagttagaatggcgatcattaaaaagtcaggaaacaacaggtgctggagaggatgtggagaaataggaacacttttacactgttggtgggactgtaaactagttcaaccattgtggaagacagtgtggcgattcctcagggatctagaactagaaataccatttgacccagccatccaattactgggtatatacccaaaggattataaatcatgctgctataaagagacatgcacacgtatgtttattgtgacattattcacaatagcaaagacttggaaccaacccaaatgtccaacaatgatagactggattaagaaaatgtggcacatatacaccatggaatactatgcagccataaaaaaggatgagttcatgtcctttgtagggacatggatgaaattggaaatcatcattctcaataaactatcgcaagaacaaaaaaccaaacacaaaaaaccaaacaccgcatattctcacccatag

SEQ ID NO: 121514 - DNA, 2882 bp, Homo sapiens
atggggaaaaaacagagcagaaaaaccggaaactctaaaaagcagagcgcctctcctcctccaaaggaatgcagctcctcaccagcaacggaacaaagctggacggagaatgactttgacgagttgagagaagaagacttcagacgatcaaactactccgagctacaggaggaaattcaaaccaaaggcaaagaagttgaaaactttgaaaaaaattcagacgaatgtataactggaataaccaatacagagaagtgcttaaaggagctgacggagctgaaagccaaggctcgagaactacatgaagaacgcagaagcctcaagagccgatgcgatcaactggaagaaagggtatcagtgatggaagacaaaatgaatgaaatgaagcgagaagggaagtttagagaaaaaagaataaaaagaaacaaacaaagcctccaagaaatatgggactatgtgaaaagaccaaatctacgtctgattagtgtacctgaaagtgacagggagaatggaaccaagttggaaaacactctgcaggatattatccaggagaacttccccaatctagcaaggcaggccaacattcagattcaggaaatacagagaacgccacaaagatactcctcgagaagagcaactccaaggcacataattgtcagattcagcaaagttgaaatgaaggaaaaaatgttaagggcagccagagagaaagaaatacaaactaacatcagagaatactacaaacaccgctacgcaaataaactagaaaatctagaagaaatggataaattcctcaacatatacacccttcgaagactaaaccaggaagaagttgaatctctgaacagaccaataagaggctctgaaattgtggcaataatcaatagtttaccaaccaaaaagagtccaggaccagatggattcacagccgaatactaccagaggtataaggaggaactggtaccattccttctgaaactattccaatcaatagaaaaagagggaatcctccctaactcattttatgaggccagcatcatcctgataccaaagccgggcagagacacaaccaaaaaagagaattttagaacaatatccttgatgaacattgatgcaaaaatcctcaataaaatactggcaaaccgaatccagcagcacatcaaaaagcttatccaccatgatcaagtgggcttcatccctgggatgcaaggctggttcaatatacgcaaatcaataaatgtaatccagcatataaacagaaccaaagacaaaaaccacgtgattatctcaatagatgcagaaaaggcctttgacaaaattcaacaactcttcttgctaaaaactctcaataaattaggtattgatgggacatatctcaaaataaaaagagctatctatgacaaacccacagccaatatcatactgaatgggcaaaaactggaagcattccctttgaaaactggcacaagacagggatgccctctctcaccactcctattcaacatagtgttggaagttctggccagggcaattaggcaggagaaggaaataaagggtattcaattaggaaaagaggaagtcaaattgtccctgtttgcagatgacatgattgtatatctagaaaaccccattgtctcagcccaaaatctccttaagctgataagcaacttcagcaaagtctcaggatacaaaatcaatgtacaaaaatcacaagcattcttatacaccaataacagacaaacagaaacccaaatcatgagtgaactcccattcacaattgcttcaaagagaataaaatacctaggaatccaacttacaagggacgtgaaggacctcttcaaggagaactacaaaccactgctcaatgaaataaaagaggatacaaagaaatggaagaatattccatgctcatgggtaggaagaatcaatatcatgaaaatggccatactgcacaaggtaatttatagattcaatgccatccccatcaagctaccaatgactttcttcacagaattggaaaaaactactttaaagttcacatggaaccaaaaaagagcccgcattgccaagtcaatcctaagccaaaagaacaaagctggaggcatcatgctacctgacttcaaactatactacaaggctacagtaaccaaaacagcatggtactggtaccaaaacagagatatagatcaatggaacagaacagagccctcagaaataacgccgcatatctacaactatctgatctttgacaaacctgagaaaaacaagcaatggggaaaggattccctattcaataaatggtgctgggaaaactggctagccatatggagaaagctgaaactggatcccttctttacaccttatacaaaaattaattcaagatggattaaagacttaaacgttagacctaaaaccataaaaaccctagaagaaaacctaggcattaccattcaggacataggtatgggcaaggacttcatgtctaaaacaccaaaagcaatagcaacaaaagccaaaattgacaaattggatctaattaaactaaagagcttctgcacagcaaaagaaactaccatcagagtgaacaggcaacctacagaatgggagaaaattttcgcaacctactcatctgacaaagggctaatatccagaatctacaatgaactcaaacaaatttacaagaaaaaaacaaacaaccccatcaaaaagtgggcaaaggacatgaacagacacttctcaaaagaagacatttatgcagccaaaaaacacatgaaaaaatgctcaccatcactggctatcagagaaatgcaaatcaaaaacacaatgagataccatctcacaccacttagaatggcaatcattaaaaagtcaggaaacaacag

SEQ ID NO: 121515 - DNA, 2648 bp, Homo sapiens
atggtgaagggatcaattcaacaagaggagctaactatcctaaatatttatgcacccaatacaggagcacccagattcataaagcaagtcctgagtgacctacaaagagacttagactcccacacattaataatgggagactttaacaccccactgtcaacattagacagatcaacgagacagaaagtcaacaaggatacccaggaattgaactcagctctgcaccaagcagacctaatagacatcaacagaactctccaccccaaatcaacagagtatacatttttttcagcaccacaccacacctattccaaaattgaccacatagttggaagtaaagctctcctcagcaaatgtaaaagaacagaaattataacaaactatctctcagaccacagtgcaatcaaactagaactcaggattaagaatctcactcaaagccgctcaactccatggaaactgaacaacctgctcctgaatgactactgggtacataacgaaatgaaggcagaaataaagatgttctttgaaaccaacaagaacaaagacaccacataccagaatctctgggacgcattcaaagcagtgtgtagagggaaatttatagcactaaatgcctacaagagaaagcaggaaagatccaaaattgacaccctaacatcacaattaaaagaactagaaaagcaagagcaaacacattcaaaagctagcagaaggcaagaaataacgaaaatcagagcagaactgaaggaaatagagacacaaaaaacccttcaaaaaatcaatgaatccaggagctggttttttgaaaggatcaacaaaattgatagaccgctagcaagactaataaagaaaaaaagagagaagaatcaaatagacacaataaaaaatgataaaggggatatcaccaccgatcccacagaaatacaaactaccatcagagaatactacaaacacctctacgcaaataaactagaaaatctagaagaaatggatacattcctcgacacatacactctcccaagactaaaccaggaagaagttgaatctctgaatagaccaataacaggctctgaaattgtggcaataatcaatagtttaccaaccaaaaagagtccaggaccagatggattcacagccgaattctaccagagagctatctatgacaaacccacagccaatatcatactgaatgggcaaaaactggaagcattccctttgaaaactggcacaagacagggatgccctctctcaccgctcctattcaacatagtgttggaagttctggccagggcaatcaggcaggagaaggaaataaagggtattcaattaggaaaagaggaagtcaaattgtccctgtttgcagatgacatgattgtttatctagaaaaccccatcgtctcagcccaaaatctccttaagctgataagcaacttcagcaaagtctcaggatacaaaatcaatgtacaaaaatcacaagcattcttatacaccaaaaacagacaaacagagagccaactcatgagtgaactcccattcacaattgcttcaaagagaataaaatacctaggaatccaacttacaagggatgtgaaggacctcttcaaggagaactacaaaccactgctcaacgaaataaaagaggacacaaacaaatggaagaacattccatgctcatgggtaggaagaatcaatatcgtgaaaatggccatactgcccaaggtaatttacagattcaatgccatccccttcaagctaccaatgactttcttcacagaattggaaaaaactactttaaagttcatatggaaccaaaaaagagcccgcatcgccaagtcaatcctaagccaaaagaacaaagctggaggcatcacactacctgacttcaaactatactacaaggctacagtaaccaaaacagcatggtactggtaccaaaacagagatatagatcaatggaacagaacagagccctcagaaataatgccgcatatctacaactatctgatctttgacaaacctgagaaaaacaagcaatggggaaaggattccctatttaataaatggtgctgggaaaactggctagccatatgtagaaggctgaaactggatcccttccttacaccttatacaaaaatcaattcaagatggattaaagatttaaacgttagacctaaaaccataaaaaccctagaagaaaacctaggcattaccattcaggacataggcgtgggcaaggacttcatgtccaaaacaccaaaagcaatggcaacaaaagccaaaattgacaaatgggatctaattaaactcaagagcttctgcacagcaaaagaaactaccatcagagtgaacaggcaacctacaacatgggagaaaattttcgcaacctactcatctgacaaaggtctaatatccagaatctacaatgaactcaaacaaatttacaagaaaaaaacaaacaaccccatcaaaaagtgggcgaaggacatgaacagacacttctcaaaagaagacatttatgcagccaaaaaacacatgaagaaatgctcatcatcactggccatcagagaaatgcaaatcaaaaccactatgagatatcatctcacaccagttagaatggcaatcattaaaaagtcaggaaacaacag

SEQ ID NO: 121516 - DNA, 1336 bp, Homo sapiens; identical to SEQ ID NO: 119196

SEQ ID NO: 121517 - DNA, 2458 bp, Homo sapiens
gagctggttttttgaaaagatcaacaaaatcgatagaccacaagcaagactaataaagaagaaaagagagaagaatcaaatagacacaataaaaaatgataaaggggatatcaccaccgatcccacagaaatacaaattaccatcagagaatactacaaacacctctatgcaaataaactagaaaatctagaagagatggataaattcctcgacacatacaccctcccaagactaaaccaggaagaagttgaatctgtgaatagaccaataacaggctctgaaattgaggcaataaccaatagcttaccaaccaaaaaaagtccaggaccagatggattcacagccgaattctaccagaggtacaaggaggagctggtaccattccttctgaaactattccaaccaatagaaaaagagggaatcctccctaactcattttatgaggccagcatcatcctgataccaaaacctggcagagacacaaccaaaaaagggaattttagaccaatatccttgatgaacattgatgcaaaaatcctcaataaaatactggcaaaccaaatccagcagcacatcaaaaagcttatccaccatgatcaagtgggcttcatccctgggatgcaaggctgtgttggaagttctggccagggcaataggcaggagaaggaaataaagggtattcaattaggaaaagaggaagtcaaattgtccctgtttgcagatgacatgattgtatatctagaaaaccccactgtctcagcccaaaatctccttaagctgataagcaacttcagcaaagtctcaggatacaaaatcaatgtacaaaaatcacaagcattcttatacaccaacaacagacaaacggagagccaaatcatgagtgaactcccattcacaattgcttcaaagagaataaaatacctaggaatccaacttacaagggatgtgaaggacctcttcaaggagaactacaaaccactgctcaatgaaataaaagaggatacaaacaagtggaagaacattccatgctcatggataggaagaatcaatatcgtgaaaatggccatactgcccaaggtaatttatacattcaatgccatccccatcaagctaccaatgactttcttcacagaattggaaaaaactactttaaagttcatatggaaacaaaaaagatcccacatcgccaagtcaatcctaagccaaaagaacaaagctggagacatcacactacctgacttcaaactacactacaaggctacagtaaccaaaacagcatggtactggtaccaaaacagagatatagatcaatggaacacaacagagccctcagaaataatgctgcatatctacaaccatctgatctttgacaaacctgacaaaaacaagcaatggggaaatgattccctatttaataaatggtgctgggaaaactggctagccatatgtagaaagctgaaactggatcccttccttacatcttatacaaaaatcaattcaagatggattaaagacttaaatgttagacctaaaaccataaaaaccctagaagaaaacctaggcaataccattcaggacataggcatgggcaaggacttcatgtctaaaacaccaaaagcagtggcaacaaaagccaaaattgacaaatgggatgtaattaaactaaagagcttctgcacagcaaaggaaactaccatcagagtgaacaggcaacctacagaatgggagaaaattttcgcaacctactcatcggacaaagggctaatatccagaatctacaatgaactcaaacaaatttacaagaaaaaaacaaacaaccccatcaaaaagtgggcaaaggatatgaacagacacttctcaaaagaagacatttatgcagccaaaagacacatgaaaaaatgctcatcatcactggccatcagagaaatgcaaatcaaaaccacaatgagataccatctcacaccaattagaatggtgatcattaaaaagtcaggaaacaacagagcacctgggggaaggggtggctgtgggtgcagctttggcagacttaaacgttcctgcgtgccagctctgaaaagagtagcagatctcccagcacaacgctcgagctctgctaagggagagactgcctcctcaagtgggtccctgaaccccgtgccccctgactgggagaaacctcccagcaggggtcgacagacacctcatactggagaactccggctagcatctgacgggtgcctctctgggatgaagcttccagaggaaggaataggcagcagtctttgctgttctgcagcctctgctggtgatacccaggcaaatggggtccggagtggactgccagcaaactccagcagacctgcagcagaggggcctgttagaaggaaaactaacagacagaaaggaatagtatcaacttcaacaaaaaggacgtccacaccaaaaccccatccaaag

SEQ ID NO: 121518 - DNA, 2101 bp, Homo sapiens
actaaaccaggaagaagttgaatctctgaatagaccaataacaggagctgaaattgtggcaataatcaatagcttaccaaccaaaaagagtccaggaccagatggattcacagccaaattctactggaggtacaaggaggaactggtaccattccttctgaaactattccaatcaatagaaaaagagggaatcctccctaactcatgttatgaggccagcatcatcctgataccaaagcctggcagagacacaacaaaaaaagagaattttagaccaatatccttgatgaacattgatgcaaaaatcctcaataaaatactggcaaaccgaatccagcagcacatcaaaaagcttatccaccatgatcaagtgggcttcatccctgggatgcaaggctggttcaatatatgcaaatcaataaatgtaatccagcatataaacagaaccaaagacaaaaaccacatgattatctcaatagatgcagaaaaggcctttgacaaaattcaacaacccttcatgctaaaaactctcaataaattagcccaaaatctccttaagctgataagcaacttcagcaaagtctcaggatacaaaatcaatgtacaaaaatcacaagcattcttatacaccaataacagacaaacagagagccaaatcatgagtgaactcccattcacaactgctttaaagagaataaaatacctaggaatccaacttacaagggatgtgaaggacctcttcaaggagaactacaaaccactgctcaaggaaataaaagaggatacaaacaaatggaagaacattccatgctcatgggtaggaagaatcaatatcttgaaaatggccacactgcccaaggtaatttatagattcaatgccatccccatcaagctactaatgactttcttcacagaattggaaaaaactactttaaagttcatatggaaccaaaaaagagcccgcatagccaagtcaatcctaaaccaaaagaacaaagctggaggcatcacactacctgacttcaaactatactacaaggctacagtaaccaaaacagcatggtactggcaccaaaacagagatagagaccaatggaacagaacagagccctcagaaacaatgctgcatatctacaactatctgatctttgacaaacctgacaaaaacaagcaatggggaacggattccctatttaataaatggtgctgggaaaactggctagccatatggagaaagctgaaactggatcccttccttacaccttatacaaaaattaattcaagatggattaaagacttacacattagagctaaaaccataaaaaccctagaagaaaacctaggcaataccattcagtacataggcatgggcaaggacttcatgtctgaaacaccaaaagcaatggcaacaaaagccaaaattgacgaatgggatctaattaaactaaagagcttctgcacagcgaaagaaactaccatcagagtgaacaggcaacccacaaaatgggagaaaattttcgcaacctactcatctgacaaagggctaatatccagaatctacaatgaactcaaacaaatttacaagaaaaaaacaaacaaccccatcaaaaaatgggcaaaggacatgaacagacacttctcaaaagaagacatttatgcagccaaaaaacacatgaaaaaatgctcatcatcactggccatcagagaaatgcaaatcaaaaccacaatgagataccatctcacaccagtcagaatggcgatcattaaaaagtcaggaaacaacaggtgctggagaggatgtggagaaataggaacacttttacactgttggtgggactgtaaactagttcaaccattgtggaagtcagtgtggcgattcctcagggatctagaactagaaataccatttgacccagccatcccattactgggtatatacccaaaggactataaatcatgctgctacaaagacacatgcacacgactgaagtgtggaattcgcatggtcaacatgaaaagtaaggaacctgccgtgggatctagattcttctctagaattagtagttggagaaattcaacagtgactggacatccatggcag

SEQ ID NO: 121519 - DNA, 792 bp, Homo sapiens
ttattagacagtctacatactttattgaaagtcacatgaatgagccccaggatctcgtttgttttattatttggatatagcatatgtctttcacacaggcaatctttctagccctctactaatgtccttggcatcaagtgcttcatttcccccaggaaaatgaaggctttttctttatcgaaaacttatctttaaggtatcttgtccttcgcgaaggacatgaacagacacttctcaaaagaagacatttatgcagccaaaaaacacatgaagaaatgctcatcatcactggccatcagagaaatgcaaatcaaaaccactatgagatatcatctcacaccagttagaatggcaatcattaaaaagtcaggaaacaacaggtgctggagaggatgcggagaaataggaacacttttacactgttggttggactgtaaactagttcaaccattgtggaagtcagtgtggcgattcctcagggatctagaactagaaataccatttgacccagccatcccattactgggtatatacccaaatgagtataaatcatgctgctataaagacacatgcacacgtatgtttattgcggcactattcacaatagccaagacttgtgaaccacccaaatgttccaacatgatagactggattaagaaatgtggcacaatacaccagggatactatgcggcctaaaaatgatgaggtccaatccttggtagggcatgggtgaattgggaaaccaccttctcagtaactatcgcggtacaaaaaccaacacggctttctcac

SEQ ID NO: 121520 - DNA, 611 bp, Homo sapiens
gtatatctcctaatgctatcccgtcccctcccccaaccccacaacaggcccgagtgtgtgaggtccccttcctgtgtccaggtgttctcattggtcaattcccacctatgagtgagctccagattcgagctaggtccgaaccgagccggtaccggggatctctagagtctgtagatggtcaggctgacatcatccaccgcatgttgaccatcgtaggatttgcacggtcgattttcggatcctgcactttcagagtgaacagcttcgcacgaacatccgcagcggataaatacctgggttctcacggacttccgcactcaccagcggcgtggctgctttattggcgttggcatagaacacatggtcggaaatatgcgctactacatccgggcgcacagcatggcgaatacatcaaagaacgccatcgccccttcttttggaatcgagaacgagacattcacgccattgtcgttgatggagtcaaagcctacatccggccccagcagtttgaactgacgcaggttgttattacgcagcgcgccaatgtggtactgctgtacccagccgcgacgtgcatattcgtgcctgcaggtcctcccctgtctgcctag

SEQ ID NO: 121521 - DNA, 1989 bp, Homo sapiens; identical to SEQ ID NO: 119731

SEQ ID NO: 121522 - DNA, 4648 bp, Homo sapiens
atggggaaaaaacagaacagaaaaactggaaactctaaaacgcagagtgcctctcctcctccaaaggaacgcagttcctcaccagcaacggaaaaaagctggatggagaatgactttgacgagctgagagaagaaggtttcagacgatcaaattactctgagctacgggaggacattcaaaccaaaggcaaagaagttgaaaactttgaaaaaaatttagaagaatgtataactagaataaccaatacagagaagtgcttaaaggagctgatggagctgaaaaccaaggctcgagaactacgtgaagaatgcagaagcctcaggagccgatgtgatcaactggaagaaagggtatcagcaatggaagatgaaatgaatgaaatgaagcgagaagggaagtttagagaaaaaagaataaaaagaaatgagcaaagcctccaagaaatatgggactatgtgaaaagaccaaatctacgtctgactggtgtacctgaaagtgacggggagaatggaaccaagttggaaaacactctgcaggatattatccaggagaacttccccaatctagcaaggcaggtcaatgttcagattcaggaaatacagagaacgccacaaagatactcctcgagaagagcaactccaagacacataattgtcagattcaccaaagttgaagtgaaggaaaaaatgttaagggcagccagagagaaaggtcgggttaccctcaaagggaagcccatcagactaacagcggatctctcggcagaaaccctacaagccagaagagagtgggggccaatattcaacattcttaaagaaaagaattttcaacccagaatttcatatccagccaaactaagcttcataagtgaaggagaaataaaacactttacagacaagcaaatgctgagagattttgtcaccaccaggcctgccctaaaagagctcctgaaggaagtgctaaacatggaaaggaacaaccagtaccagccgctgcaaaatcatgccaaaatacagatcaacgagacagaaagtcaacaaggatacccaggaattgaactcagctctgcaccaagcggacctaatagacatctacagaactctccacaccaaatcaacagaatatacatttttttcagcaccacaccacacctattccaaaattgaccacatacttggaagtaaagctctcctcagcaaatgtaaaagaatagaaattataacaaactatctctcagaccacagtgcaatcaaactagaactcaggattaagaatctcactcaaagccgctcaactacatggaaactgaacaacctgctcctgaatgactactgggtacataacgaaatgaagacagaaataaagatgttctttgaaaccaacgagaacaaagacaccacataccagaatctctgggacgcattcaaagcagtgtgtagagggaaatttatagcactaaatgcctacaagagaaaggaggaaagatccaaaattgacaccctaacatcacaattaaaagaactagaaaagcaagagcaaagacattcaaaacctagcagaaggcaagaaataactaaaatgagagcagaactgaaggaaatagagacacaaaaaacccttcaaaaaatcaatgaatccagtagctggttttttgaaaggatcaacaaaattgatagaccgctagccagactaataaagaaaaaaagagagaagaatcaaatagacacaataaaaaatgataaaggggatatcaccaccgatcccacagaaatacaaactaccatcagagaatactacaaacacctctacacaaataaactagaaaatctagaagaaatggatacattcctcgacacatacactctcccaagactaaaccaggaagaagttgaatctctgaatagaccaataacaggctctgaaattgtggcaataaccaatagcttaccaaccaaaaagagtccaggaccagaaggattcacagccgaattctaccagaggtacaaggaggaattggtaccattccttctgaaactattccaatcaatagaaaaagagggaatcctccctaactcattttatgaagccagcatcattctgataccaaagccgggcagagacacaaccaaaaaaagagaattttagaccaatatccttgatgaacattgatgcaaaaatcctcaataaaatactggcaaaccgaatccagcagcacatcaaaaagcttatccaccatgatcaagtgggcttcatccctgggatgcaaggctggttcaatatacgcaaatcaataaatgtaatccagcatataaacagagccaaagacaaaaaccacatgattatctcaatagatgcagaaaaagcctttgacaaaaattcaacaacgcttcatgctaaaaacttttaataaatttgctattgatgggacgtatctcaaaataataagagctatctatgacaaacccacagccaatatcatcctgaatgggcaaaaactggaagcattccctttgaaaactggcacaagacagggatgccctctctcaccactcctactcaacatagtgttggaagttctggcctgggcaattaggcaggacaaggaaataaagtgtattcaattaggaaaagacgaagtcaaattgtccctgtttgcagatgacatgattgcatatctagaaaaccccattgtctcagcccaaaatctccttaagctgataagcaacttcagcaaagtttcaggatacaaaatcaatgttcaaaaatcacaagcattcttatacaccaataacagacaaacagagagccaaatcatgagtgaactcccattcacaattgcttcaaagagaataaaatacctaggtatccaacttacaagggacgtgaaggacctcttcaagggagaaccacaaaccactgctcaacgaaataaaagaggatacaaacaaatggaagaacattttcattccatgcttatgggtaggaagaatcagttatcatgaaaatggccatattgcccaaggtaatttacagattcaatgccatccccatcaagctaccaatgactttcttcacagaactggaaaaaactactttaaagttcatatggaaccaaaaaagagcccgcatcaccaaggcaatcctaagccaaaagcacaaagctggaggcatcacactacctgactgcaaactatactacaaggctacagtaaccaaaacagcatggtactggtaccaaaacagagatatagatcaatggaacagaacagagccctcagaaataacgccacatatctacaactatctgatctttgacaaaccctgggaaaaaccaagcaatgggggaaaggattcccttatttaataaatggtgctgggaaaaactggcttagccatatgtagaaagctgaaacttggatcccttccttacaccttatacaaaaaatcaaattcaagatggattaaaaaaaaagatttaaacgttagacctaaaaccataaaaaaccctagaagaaaacctaggcaataccattcaggacataggcatgggcaaggacttcatgtctaataaaacaccaaaagccaatggcaaccaaaagacaaaattgacaaatgggatctaatttaaactaaagagcttcctgcacagcaaaagaaactaccatcagagtgaacaggccaacctacaaaatggaagaaaattttcgcaatctacatcatctgacaaagggctaatatccagaatctacaatgaactcaagcaaatttacaagaaaaaaccaaacaaccccatcaaaaaagtgggtggaggacatgaacagacacttctcaaaaagaagacatttatgcagccaaaaaaacacatgaaaaaatgctcaaccatcactggccatcagagtaatgcaaatcaaaaccacaatgagataccatctcacaccagttagaatggtgatcattaaaaagtcaggaaacaacaggtgctggagaggatgtggagaaataggaacacttttacactgttggtgggactgtaaactagttcaaccattgtggaagtcagtgtggcgatgcctcagggatctagaactagaaataccatttgacccagccatcccattactgggtatatacccaaaggattataaatcatgctgctataaagacacatgcacacgtatgtttattgcagcactattcacacaatagcaaagacttggagccaacccaaatgtccaacaatgatagactggattaagaaaatgtggcacatatacaccatggattactatgcagccataaaaaatgatgagttcatgtcctttgtagggacatggatgaagctggaaaccatcattctcagcaaactatcgcaagaacaaaaaaaccaaacaccgcgtattctcactcataggtgggaattgaacaatgagaacacatggacacagggaaggggaacatcaccacactggggcctgttgtggggtggggggagggggaagggatagcattaggagatatacctaatgctaaatgacgagtaaatgggtgcagcacaccaacatggcacatgtatccatatgtaccacacttgcccgctgtgcacatgtaccctaacccttatagcataataatataataagttcataa

SEQ ID NO: 121523 - DNA, 1674 bp, Homo sapiens
atggggcagttacaacgtaacgcccgtgatttgcaggaatcagtgatgtcgattcgcatgatgccgatggaatatgtttttagtcgctatccccggctggtgcgtgatctggcgggaaaactcggcaagcaggtagaactgacgctggtgggcagttctactgaactcgacaaaagcctgatagaacgcattatcgacccgctgacccacctggtacgcaatagcctcgatcacggtattgaactgccagaaaaacggctcgccgcaggtaaaaacagcgtcggaaatttaattctgtctgccgaacatcagggcggcaacatttgcattgaagtgaccgacgatggggcggggctaaaccgtgagcgaattctggcaaaagcggcctcgcaaggtttgactgtcagcgaaaacatgagcgacgacgaagtcgcgatgctgatatttgcacctggcttctccacggcagagcaggtcaccgacgtctccgggcgcggcgtcggcatggacgtcgttaaacgtaatatccagaagatgggcggtcatgtcgaaatccagtcgaagcaggttactggcactacgatccgcattttactgccgctgacgctggccatcctcgacggcatgtccagcctcttaactcacggtatcggtcaattcgctgacgttgcgtgcgcaggcccgctgctggcagctgaactggacgcgctgggtaaagcactgaaagaacctgctcgcccgatggtggctatcgttggtggttctaaagtatctaccaaactgaccgttctggactccctgtctaaaatcgctgaccagctgattgttggtggtggtatcgctaacacctttatcgcggcacaaggccacgatgtgggtaaatccctgtacgaagctgacctggttgacgaagctaaacgtctgctgaccacctgcaacatcccggttccgtctgatgttcgcgtagcaaccgagttctctgaaactgcaccggctaccctgaaatctgttaacgatgtgaaagctgacgagcagatcctggatatcggtgatgcttccgctcaggaactggctgaaatcctgaagaatgcgaaaaccattctgtggaacggtccggttggcgtgttcgaattcccgaacttccgcaaaggtactgaaatcgtggctaacgctatcgcagacagcgaagcgttctccatcgctggcggcggcgacactctggcagcaatcgacctgttccgcattgctgacaaaaactcctacatctccactggcggcggcgcattcctcgaattcgtggaaaggttaaccacgctgacgcagttgctgcacgatcagggctacgtcactcaggccatcggaaaatggcatatgcgggaaaccacagagccgcagccgcagaacgttggctttgatgatttccgtggctttaactcggtgtctgatatgtacaccgcatggcgcgacgttcacgtcaatccggaagtggccctgagtccggaccgtcctgcatacatcaaccaatcaccgctcagcaaagatgacgttcatgcgctgcgcggcggcgaccaacaggccattgccgaccattacgccgaaatatatggcagatctggatcaacgctgcacggagtatggcgctcagctcctcgacaagatggcgaagagcgctaa

SEQ ID NO: 121524 - DNA, 3363 bp, Homo sapiens
atggcaggcaccacggcagcggcactgggttttgcacccagcgtagcactcgcggaaacccggcagtataaactgctgcgcacccgcgaaacccgtaatacctgcacctattgttccgtaggctgtgggctgttgatgtacagcctcggtgacggagcaaaaaacgccaaagcatctatcttccatatcgaaggcgatccggatcacccggtcaaccgcggtgcactttgtccgaaaggcgctggcctggtggatttcatccactccgaaagccgtctgaagtttccggaataccgtgcgccaggttctgataaatggcagcaaatcagttgggaagaggcgtttgatcgcatcgccaaactgatgaaagaagaccgcgatgctaactacattgcgcaaaacgccgaaggcgtgactgttaaccgctggctctccaccgggatgctgtgtgcttccgcgtcgagtaacgaaaccggctatttaacgcaaaaattctcccgcgcgctggcaagtcttgctccaacatttggtcgcggtgcgatgaccaaccactgggtcgacatcaagaacgccaacctcgtcgtggtgatgggcggtaacgccgctgaagctcacccggtcgggttccgctgggcgatggaagccaaaattcacaacggcgcgaagctgattgtgatcgatcctcgctttacgcgtacggcggcggtagctgactactatgcccctattcgttccggtatcgagctgatccatgcacgagcacgtcacacggcggtcgatatatgtatcgcgcaatatttcgcacgggataatcgatcacgaaaaccaccacatcggtggagcaatttgcgggccaaacatgacgttttccagcgctgtcagatgcgggaagaggtaaaactgctggaacaccatacctgcttcctggcgaatcaggcgctcgtcaactttcggatcgttaaccttcaggccatcgacaatcagatcgccggaggtgatttcttccagtttgttgatgcagcgcagcagggtcgatttaccggaaccggacggcccgataatcaccacgacttcgccctgggcaatgttcaaatcgatattgtgcagcacctgggttgggccaaaacgacgcagaataaagctcagcaccagggtaataatcagatagaacaccgccacggcgctccagatctcaagggcgcggaagttaccggcaataatttcttgcccctgacgggtcagttccgccacgccgatcacaataaacagcgaggtgtctttaatgctgatgatccactgtgtgaaggccgtattgcttgcaccgtgcagagtattactgaagattacgacattggcttccgcctgaaagaaaaaggtatgacggaaatttttgtccgttttccggtggtggacgaagccaaagaacgcgagcagcgtaaatttttacagcacgcgcggacatcaaacatgatctgcgtgcgcgaatatttccccgataccttttcgactgcggttcgacaaaaatcccgctggatcatcggcattgttttccaaggctttaaaacccataaatggacctccagcctgacgctgaactactttctctggcgcgaccgcaaaggggcaatcagtaactttgtcagcttcctcgcgatgctggtgatgatccagcttttgctgttgctggcgtatgaaagtttgtggcccgatgcctggcatttcctttctattttcagcggcagcgcatggttaatgaccctgctgtggctaaactttggtttgatggttaaccgcatcgtgcagcgggtgattttcgttactggctactacggcctgacgcaggggctgctttccgtcctgcgtcttttctggggcaacctgattaacttcatggccaactggcgcgcgctaaaacaggtacttcaacacggcgatccacgtcgcgtggcgtgggataaaacaacgcatgacttccccagcgtgactggcgatacccgctcgttgcgcccgttaggtcaaattctgctggaaaatcaggtcatcactgaagaacaactcgatacagcactgcgtaatcgcgtcgaaggtctacgccttggcgtgagagagatagtttttaaatgcttcggtttgcggctcggtaaagcagctcgcgtcgccttgttctacgatatgaccattttccatatacaccactcggctggcggttttacgcgccacttcaacttcgtgggtgacgatcacctgggtaatattcgtttctgccagctcacgaatgatgctgacgatttgtgccgtaatttccggggtcagtgcggcggtcggttcatcgaacagcagtacctgcgggttcatcatcaacgcacgggcaatagcaacacgctgctgcttgacaccagaaagatgcagcgggttgtattgctgaaacaccatgccaacgttacgacgcaaatcgcgaatcgctttgtcagagggtgttttggtgaaatcgaaatggttgcttgcaatgttgagcgtaccggagcgcggcatctcaagcagattgagtacacgcagcagcgagcttttacccgcgccgctggggccaacgcagcagataccccgtcaactgccaccgcacgcaaaggctttgccggatacgatcacccaaaccagtatctggttaaaccggcgaccactattgccgacaatatgatgccagtaatgcagcatccggcgcaggataaagaaacccagcagaagctggcagaacttgagaaaaaaaccggtaagaaaccgaatgtggttgttttcttgctggacgatgtgggctggatggacgtcggttttaacggtggcggcgtggcggtgggtaaccctacaccagatatcgacgccgttgccagccaggggctgattttaacttcggcgtattctcaaccaagctcttccccaacccgcgccaccattctcaccggacaatactccatccaccacggcattctgatgccgccaatgtacgggcaaccgggcgggctgcaagggttaaccacgctgccgcagttgctgcacgatcagggctacgtcactcaggccatcggaaaatggcatatgggggaaaacaaagagtcgcagccgcagaacgttggctttgatgatttccgtggctttaactcggtgtctgatatgtacaccgaatggcgcgacgttcacgtcaatccggaagtggccctgagtccggaccgttctgaatacatcaagcaattaccggtcagcaaagatgacgttcatgcggtgcgcggcggcgaacaacatgccattgccgacattacgccgaaatatatgggaaaactggatcaacgcttgatggactatggcgtttag

SEQ ID NO: 121525 - DNA, 543 bp, Homo sapiens
gaacagtttattcgcgcaaatcgtacacattattgaagagggcggttggacggtattccgtaatatgccgctgatttttgctgtcggtttacccattggccttgataagcaagcgcaggggcgtgcttgtctggcggtgatggtgagtttcctgacctggaactatttcatcaacgcgatgggaatgacctggggaagctacttcggcgtcgatttcactcaggacgcggtggcaggtagcggtctgacaatgatggccgggattaaaaccctcgataccagcattatcggcgcaattatcatttccggcattgtgacggcgctgcataaccgtctgttcgataaaaaactgccggtttttctcggcattttccaggggacgtcttatgtggtgattatcgccttcctggtgatgatcccctgtgcctggctgacgttgctcggctggccaaaagtacaaatggggattgaatctctgcaagcgttcctgcgttcggcgggtgcacttggggtctggaataacaccttcctcgaacgtattct

SEQ ID NO: 121526 - DNA, 2241 bp, Homo sapiens
tcaccccatattctgcacgctggaatacgccagcagacgcttaatgtcccgctgtaccagaatgaaaaatgccgccacggcaaccgacaacatgccgaagatgagcaacaaccggttggggaaatcgctgccgatggcttggcaaataatgatgtaatagcgaatcagcaccaacagcgcgcagttcagcaatacggcggagagcagggcgctgaccggactcggcgcttcactgtgagcatccggcagccaggcgtgcatgggaaatagcccggttttggtaccaaagccaattagcaaaaacacaaaggccaacagcattaatgttgggtcaagcaaggacgattgcttaagaacctcgctccagaatatcgccatttctgcctgcggcataacgctggcggcgttggcgtataccagcacggtaccgaacagaccaaaagcgacaccaacagtacaaataatgatgtacttccatgcagcttccagcgatgaacgctgaccgtaaatgcctaccagaaacgccgagcttaaggtggtggcttcgatcgccgcccacatcacaatcaggttattgctggtaacaaccagcagcatggtgaacaaaaacagatggaagaaaccgtagtaatcgcacagcgtaacgggtgaaagctcgccgtgtgccacttcatgacgcatgtagccaatcgagtaaatacccggtgagaaagccatcacaccagaaatggcgagaaacaaccggccaagaccatcaatttgaagccacagtcccgcagcgaatatttctctggcatcagcggcagttttgaccacccagagtgcagaatcagcagcagtgtgatccctaaggtccagcgtgccgtgggtacgccatatttttcttgccagtaacaccatcacaatgacggcgaagatggcgtcggtagcgatacctatttccaccagttccggtgctcgccaggcaagaagcgccagcaccagatgggagccgttttccatcaggcagtaaccaaaaatttgccgcaggatattgcgctggctgacaatgcacagcaggccaagcagaaaatgacctaacgctaccgccagcgccggtttcagcccggtagccatcggtagcttcacgggctgaacgacaaatgcgcaaagcaggacaattaacgccgcgagcagtgccatcattgccggaccgaataacgctttttccgggatgttctggggaatatttcgtgcagcgtaagtcatgattaacggtaccagcagcactttggtgataaaggcgctggcggaccagatcagcagttgctctgcggcgaacaggcacgagagagtggcgaaaatagacaccagcaccagtgactggcaggcgtaaaatccgcatgacaggcgatagcttttgacgtgcaaccaggtcgcggcgattacgctggaaatcagcgacatcacaatcagtacaatcaacaccaggcgcattgatcctggcagcggtgcggcattggcgacggcctcgctcggtttgccaggcacaacgcgaccaaaccagcgaataaaccaggcgaaactggcgaccgattcaatcatcagaagaatcatggcgggcagcaggatccagtactccaccagctgattgaggtcatgctcgttggccgcggtggtgaccaggctgtgggtcaggccactcttggcatcgacaccaatgtgggccttcatgccaaagtgccactgattgcctttcttggtctgatgcatctccggatcgcgttgctgctctttgttcttggtcgagctgggtgcctcaatgatggtggcatcgaccaaggtgccttgagtcatcatgacgcctgcttcggccagccagcgattgatggtcttgaacaattggcgggccagttgatgctgctccagcaggtggcggaaattcatgatggtggtgcggtccggcaaggcgctatccagggataaccgggcaaacagacgcatggaggcgatttcgtacagagcatcttccatcgcgccatcgctcaggttgtaccaatgctgcatgcagtgaatgcgtagcatggtttccagcggataaggtcgccggccattaccagccttggggtaaaacggctcgatgacttccaccatgttttgccatggcagaatctgctccatgcgggacaagaaaatctcttttctggtctgacggcgcttactgctgaattcactgtcggcgaaggtaagttgatgactcat

SEQ ID NO: 121527 - DNA, 4443 bp, Homo sapiens
atgaatcgcttcgatggcgcaaaacagaatgtcgtgggtgccgacgctcaccacctggctgatacggcagtcaaacgaaaccagagcctcttccagttgcgggcatccggtcacccccgtctgccagcgggcggcggcaaagcggtgttccatgggcgttttgccgccaaaaagattgaagcggtcgcgttttacttccgtcacctcatcgcccttctcgttgtgcagatgcacttcaagctggttaaaggcaatgttgatgtcgttttcacggcacagctgatcgatagtacggttcagctcatcgacagtacgactacggtcacgcagttcacgcacatacagacgcagctcatgaggagcgtggagtggctgacggataatggttcatgctaccgggctaatgaaacacgccagttcgcccggatgttgggacttgaaccgaagaacacggcggtgcggagtccggagagtaacggaatagcagagagcttcgtgaaaacgataaagcgtgactacatcagtatcatgcccaaaccagacgggttaacggcagcaaagaaccttgcagaggcgttcgagcattataacgaatggcatccgcataaagccggtacgctgaccaatgaacaatggcagcaggttaccgctgaactgcacgaccgcatgatggaaacggtcttttttgctttagatgatgcagagcagttgtttgcccaccatcaaccgactccggttaccagcgttgatttgctggggcagggccgtcaggcgctgatcgacgctaacctgcgtcttggcttggctctggcggaagatgaaattgactatctgcaggatgctttcacaaagcttggtcgtaacccgaacgacatcgaactgtatatgtttgcccaggcgaactccgagcactgccgccacaaaatttttaacgccgactgggtatcgatgccgtgggaagaagatttcggtaagcctgagcgcattgtcaccgcgctggacatcatgaccgaaggcccgctgggcggcgcggcgtttaacaacgaatttggtcgtccggcactgaacggctacttccgtacttatgaagaaaaagtgaacagccacaacggcgaagagctgcgcggttattgttcgccgtttaacggcgataaacctgcaaaaaatattattttgctgattggcgatgggatgggggactcggaaattactgccgcacgtaattatgccgaaggtgcgggcggcttttttaaaggtatagatgccttaccgcttaccgggcaatacactcactatgcgctgaataaaaaaaccggcaaaccggactacgtcaccgactcggctgcatcagcaaccgcctggtcaaccggtgtcaaaacctataacggcgcgctgggcgtcgatattcacgaaaaagatcacccaacgattctggaaatggcaaaagccgcaggtctggcgaccggtaacgcttctaccgcagagttgcaggatgccacgcccgctgagctggtggcacatgtgacctcgcgcaaatgctacggtccgagcgcgaccacgccacatttgcgtgatgttggtgtacgcaaggaagacattccggcactggcgcaggcggcactggatgatgtttgtaccggtggcaacccgcaccgcctgcctcatgcgttctccggcgggcagcggcaacgtatcgccattgccagagcactctcttcgcagcctgacgtgattgtgcttgatgagccaacctctgcgctggatatctccgttcaggcgcagatcctcaatttactggtaacgctacaggaaaatcacgggctgacctatgtgctgatttcacacaatgtctcggtgatacgtcatatgagcgatcgggtggcggtgatgtatctcgggcagattgtagaactgggcgacgcgcagcaggtgctgacggcacctgcacatccatacacccgattattgctggattccctccccgccattgataaaccgctggaggaagaatgggcattacgtaaaacggatctgccgggaaaccgcacgttgccgcaaggctgttttttctacgaacgttgcccgctggcaacccacggatgtgaagtccggcaatcattagcaataagggaggacggacgcattcacgcgcctgacgcgtcatccggcaatgctttacgatttcaactggtaatccagcgtaatttccgctttcagtacctgagagaccgggcatcctgcttttgctttctggattatgccgtcaaaggtagaggcatcaatacccggcagagacaatctcttaatacagacaaagagcatctgcgaaaaattgcacgcgggatgttctggctgatgctgcttattatttctgcaaaaatggcgcattcactctggcgctatatctccttttctgcggaatatacggcggtttctcaaccggtgaataaaccgagccgtgtggatgcaaaaacgttcgataaaaatgacgtgcaattaatcagccagcaaaactggtttggcaaatatcagcctgtcgccgcgcaggtaaaacaacccgaacctgtgcctgtggcagaaacgcgtcttaatgtggtgctgcgtgggatcgcctttggtgccagacccggcgcggttattgaagaaggcggtaaacagcaggtctatttgcagggtgaaacgcttggctctcacaacgcggtgattgaggaaatcaaccgcgaccatgtgatgctgcgttatcagggaaaaatagagcgtctgagtctggcagaagaggaacgttccactgttgctgtgaccaacaaaaaagccgtcagtgacgaagcaaagcaagctgttgctgagcctgctgtcagtgtgccagttgagatcccgctgcctacccacgcagaccgctgcgagcggactctttgcgcgatacgccataatagtattcgttctggttttcgctgttccactgcacaccaatacctggaaaacgtcatggaagcgccgagtcaggtattgggcctgagcaagcaggaagcgcgcgagcgggcggtgaagtatctggcaaaagtcgggatagacgaacgtgcgcaggggaaatatccggtgcatctttccggcggtcagcaacagcgtgtttctatcgcgcgggcgctggcgatggaaccggaagttttactgtttgatgaacctacctcggcgctcgatcctgaactgtccgcgccggacccgaaaatttgtatctcctacggtgcctgcggtaacagtggcgggatcttccacgatctctactgcgtgtggggcggtacggataaaattgtccctgtggatgtttatatcctggctgcccgccaacgcctgccgccacgctgtacggctttgcaatggcgctcggcctgctggagcagaaaattcacgcccgtgggccgggtgaactggatgaacaaccggcggagatcctgcatggtgatatggtgcagccgctgcgcaggcgcgtatccgatgagtgaaaaggtggtgttcagtcaactgagccgtaaatttattgatgagaacgatgccacgcccgccgaggcgcagcaggtggtctattacagcctggcgattggtcaccaccttggggttatcgattgcctggaagcggcgctcacctgcccgtgggatgaatatctggcatggattgccactctggaggcaggcagtgaagcccgccgcaaaatggaaggcgtgccgaaatatggtcaggaagaggcgcagaaaaataactggtctgtttccattgctgttgccgatgacgccggtcatctgctggcgttaagtcgcatggacgattgcgcgccgattccggcttatatctcccaggagaaagcgcgtaccgccgcgctggggcgtcgtgaaactaagggctatgaagagatggtgaacaacggacgtaccgcgtcgcgaaagcggcagcagcggtgttggcgaaataagcgaaaacgaggagatggtacctccgggcataaactgtatggccccaccggaattggcattctttatgtgaaagaagccttgttgcaggagatgccgccgtgggaagggggcggttctatgatcgccaccgtcagcctgagtgaaggcactacctggaccaaagcaccatggcggtttgaagccggtacacccaataccgggggcatcattggtcttggcgcggcgctggagtatgtttcggcgctggggcttaataacatagccgagtatgaacagaatctgatgcattatgcgctatcacagctggaatctgtaccggatctcactctctatggcccacaaaacaggcttggcgttattgcttttaatctcggtaaacaccacgcctatgatgttggcagttttctcgataattacggcattgctgtgcgtaccggacatcactgcgcaatgccattgatggttgccgcagcctga

SEQ ID NO: 121528 - DNA, 538 bp, Homo sapiens
tcacaccaggaaggcgataatcaccacataagacgtcccctggaaaatgccgagaaaaaccggcagttttttatcgaacagacggttatgcagcgccgtcacaatcctgaaaggctgaccattgagctctccgatgccgacggcaatattgtactgagttatcaggaacatcagccgcaagcgttgccgttacctggagtatgtttcggcgctggggcttaataacatagccgagtatgaacagaatctgatgcattatgcgcatgacaatccacacctgactctgacagccctgaatgctattttgtggacttctgtcttcgtcgcgtaattctggcagactccgcagttgctgcacgatcagggctacgtcactcaggccatcggaaaatggcatatgggggaaaacaaagagtcgcagccgcagaacgttggctttgatgatttccgacggcggcccggatcgttgcaaccaggtcgcggcgattacgctggaaatcagcgacatcacaatcagtacaatcaacaccaggcgcat

SEQ ID NO: 121529 - DNA, 1986 bp, Homo sapiens
atgttgtttatcgtcacatccttcaactacggcgaccgcgctacgctctctatcgccggttcggaaatggccaaagatatcggccttgatcccgtgggaatgggctatgtgttctctgcttctcatgggcatcagcggatcgcctggctgggagggcaaagttcctcattaacccgtgcagaacggttcatcccctttgggcgccctacctggtgcccctttaatcttcggcccttcggtcccggccatcagccggccgggctcatgttcgccggagtggccgaccttggatacttcgggctattcggccccgcgctgctgtttaccgcgtatgcaggttcggaagccgtttttgcgcacgtattcggtgacgcacttggcgacgctgggcttcttatgagcctgctgtcaccctttgacgtggtgatatggatgacggatggctggccgctgtatgaatcccgcctgaagggaaagctgcacgtaatcagcaagcgatatacgcagcgaattgagcggcataacctgaatctgaggcagcacctggcacggctgggacggaagtcgctgtcgttctcaaaatcggtggagcagcatgacaaattggagtcattaccgggccaaatcgataaatcgctcgatgaagcctcactcagcctgcgcgccggttccctgcgtaccattacgcacatcctgctgccgctgctgcgcccggcgatcctctcggcgctgatttacagctttgtgcgcgccattaccaccgtcagcgccattgtgttcctcgtcacgccggatacccgcgtagcgacggcttacatcctcaaccgcgtggaagatggcgaatacggtgtagcgattgcctacggttccattctgatcgtggtgatgctggcgattattttcatctttgactggctgatcggtgaatcacttctgtccagattcgagaagactgtcgacgatcacagtcagagcagactgccagcagaaggaagcattctgagtcaagatatctctggagttaagcttttttctctattgaccccagcacggggctatgttcctattcgggccccttgccctttcttatgcgcgtcgtaccggttcttttgcgtagcccggcagcaaggtcttgatgcggcgctgattgatgcgccgttagcagtcgatgcacttacgcctcttagcgagttgctctctcatgtcggacaggcaccctgttcggtgcccgtggtcgacgaggaccaacagtatgtcggcatcatttcgaaaggaatgctgctgcgcgctttagatcgtgaggggggcgtgcgcgttccggttgattatatcctcaacggtttccaccccttgctgctgggtatgcccgcaccgctggcgattatcgttttcgctctcatcgcctgcagatttccggggtcgaatggtcggataaggcgttcacgccgcatccgacatttgcacaagatgcctgatgcgacgctgtccgcgtcttatcaggcctacgtgcggcatcagacaaatgtcactgctttggttcttcgctccagtcatcgctttcggaaagatcgccactgctggggattcgtttttcttcagcagcccattctccgagcaacaggccagttcgaaatccagacgttccggtacctgtccgttttcagtgtccagcggcataaaacgaatggcaaaacggctcttatgtccggaaatgttgcggataaagctgtgaatcgagcgacaggaccgactgcctgtgtgtggctattttcccttcggaattcctccatggttaccacacgtttctgtggactctgtgaatgggcagatcagcaaggagctcgccccgcccgtataagcgagaacggcaaacgcggctactcctacctttacgacgtgcatatgggagcacaatccggggaaacaaggggccgccaaggggagtatgcgtcaaaaccgccttcccgggagtatgctggggactaa

SEQ ID NO: 121530 - DNA, 982 bp, Homo sapiens
cctttcaaggcatacgtgcggcatcagacaaatgtcactgctttggttcttcgctccagtcatcgctttcggaaagatcgccactgctggggattcgtttttcttcagcagcccattctccgaggtcgatcagctgacaacgtttggagcaaaatggccgaaacgggctgatttcaccccacaccaccgttttcccgcaggttgggcaatttaccgtaatagtttctgacatttttactccttagcaacaggccagttcgaaatccagacgttccggtacctgtccgttttcagtgtccagcggcataaaacgaatggcaaaacggctcttatgtccggaaatttgcggataaagctgtgaatcgagcgacagattcaggcgcagcaagtcggcatcgccaccgttatcctgataaaaaccattcaggctggtttgtttacggaagggggccgactggcgaattaaatccagcaccatggtaagtgcctgggtgagcgggttcaggctggcaatccaggtttctacctggctgtcgcgctgcgcctggggtagatgcagccaaatgtgcaatgtaggtaaatcaaagctgcaacagccgcctgggatgctcagtcgctgacgcaccagagcaatcaaacgatcttcacgcagaaattgcccgatacgcggcgcggaaattaatacgctccccgccgcttttaactgctgaattaatgcttcaatacggctctggtccacgccaggcacgccaatccaggtctggagtttacgttgctgccggtcaagttcccgaaaggccgctgttttgctgatattcagccaatgcccgatgaatttggctggccgcgccgtaacgcctttattcagccgcaggtcgatgcggtgatgctggaaggggtgtcgcgttttccgaatgtgcgctgcttgttttcccgcgagctggaggccttcagtcagcaagatgacgaagtgaccttgcac

SEQ ID NO: 121531 - DNA, 1566 bp, Homo sapiens
atgatccagagttatcgactgaacgaagccgattattcgtgtgaacgctttgccgacttgccatgcgaccctaaaagcaacaacgaccttgttgtactcaataaaaccggagtggatcggcgttattcacaacgcctactttttaagcgggcgcggatatcatcggaaccaacagctttaacttcacgaccatgtggatgcgggttgtcgactctagaggatccccaacgctgcatcgccgaaatgcgtaccggtgaaggaaaaaccctgaccgcaacgctgtctgtttacctgaacgcactaaccggtaaaggcgtgcacgtagttaccgtcaacgactacctggcgcaacgtgacgccgaaaacaaccgtccgctgtttgaattccttggcctgactgtcggtatcaacctgccgggcatgccagcaccggcaaagcgcgaagcttacgcagctgacatcacttacggtacgaacaacgaatacggatttgactacctgcgcgacaacatggagttcagccctgaagaacgtgtacagcgtaaactgcactatgcgctggtggacgaagtggactccatcctgatcgatgaagcgcgtacaccgctgatcatttccggccccgcagaagacagcttggaaatgtataaacgcgtgaataaaaatattccccacctgatccgtcaggaaaaaaaagactccgaaaccttccaaggggaaagccactttttgggggacgaaaaatcttgtcaggtgaaactgacccaactttgtcttgtgctgattgaagaacttcttgtgaaaaagggcattatggatgaaggggagtctcttgtctcttcggacaacattatgctgatgcaccacgcacttaccatggtgctggatttaattcgccagtcggaccccttccgtaaacaaaccagcctgaatggtttttatcaggataacggtggcgatgccgacttgctgcgcctgaatctgtcgctcgattcacagctttatccgcaaatttccggacataagagccgttatgccattcgttttatgccgctggacactgaaaacggacagcattgtgttcgaatgtccgatgctgcgaaaacgccttatctgacctacagacgttttagctttgcaattacccgttcattgggctgcggaaaatcattggcatttaagaccgatcagcgacattcactcaacggggttggcttcttttacccacggattcccttcccaaggagtccccaagatcaagccaagcagcccttggcactggggctgactctggacacttgcagcagcttccataacaagcagttaggccacaaaagccatgcagtgtgccaagcatggctgcaggaaggcactggaacccgcaggacgcccgtggctgctgactcccatgctgcaatcccactggtgccatgtatccttgacatatatcggagtacacgagcctgtcttccttcatatccaacctggctgtcagaggacccagttgtctccaagctccctagttgtgaagatggggcaaccatcctggcattctcagaagcttaa

SEQ ID NO: 121532 - DNA, 1086 bp, Homo sapiens
atgatgggaggggtggccgctgcgcgggcgccggcggggccgcgtgggcgtctgtgcgcggggggtcgggcgcgggggctcggcgcgttgggtctgcgggcgcggcggcgctggcgtcggcgtcaggatcagcgcggcgccgtcattggcaaacaacgcatcaacagcggcaccgagcaagactttccaggtgaacagcgctctaggctatattggaactggattcgcgcccatccccccatccggtaccccagcggcctacgtcccgcaccgccactgtcagtgagggccgccctgctgctaactgacttacagccatcgtatagcgccgattttcatgcggcaacacccgacgccagctggcacacaccaggcagcggcacgtcacgagggcaaccaccacggatacccccagccccaacaacgcacaagcaatacggcccacaaccgagcaacgacaaaacgagactccaccgaggccacgcccagcaccaccccccacccaccgcccaccaagcaccccacgcaccccaaccagccaagcaccggacacaggccaccgacgcacccgggaagacccgaacacggggcaacgccaccccgggactgaacagcaaaaaacacacacagacgcacgacgaccgcttccgctccacaacgaaccatagcaccaaccagacccacacccacaccagccatagacgcacacccacaccaaaccaaaaaaaaaaacgagaggcaaactccgccgtgctctgcgggccaagtacaaaaaaacccgcaacagcacgacagcaacgagcaccacctaccacacacaccacaccgacaaccaagcacacacccacacaaaccaccacgtcggtcaagctgcgtgttgccgaaccccgtcagccgacgtggcctatcggaattcgctggtcaccgcctttgccgatgggcaaccgtatgcgacgggtggacgccttgaaattagttttgctggggtactgcatgccaagaattgtcctatgctactttacttatatatgcgatgtgctgttctatatgtccgacgggcccgtgcataccacaattaacggctaa

SEQ ID NO: 121533 - DNA, 887 bp, Homo sapiens
gacgatatcgcactgaccaggattccctgcggctccagaaagaagaaaccgacaagcagcaataacaggacaatccagcccgccctgaaggttgccagatccttgatcgcactggcaggcgtcttcagcagcgaaacttaatacgttgccggaataactctgcgaaagaagagatacagcataatcagcgtggccgcaatcgctgccgcatccacggcagatcataacggaggcgtactgcgcaaagctcagaccgaatgaactccgccgagtacgatattcagcagcgttagaaacgatgagcggcaggctggccgtatctgtaataaatcctgcagccatgacaaaggccagtgtcgtgccctggctgaacccagtgcgatcagtatcgcaatcacaatcggcgtcaggatcagcgcggcgccgtcattggcaaacaacgcatcaacagcggcaccgagcaagactttccaggtgaacagcgctctagcggcgtctattccattccgcctgatattagcggcgtcattggtgaagtagatttgagcggcgcgttaacacttgaactcgccggtatcattttctcctttatgctgatcaacctatttgattcatcaggaacattaattggtgtaactgataaagcgggcttaatagatggtaacggtaaattccccaatatgaataaggcgctgtatgttgatagcgtcagttcggtggcgggtgcgtttatcggcacctcgtctgttactgcctatattgaaagtacttctggtgtggcagtcggtggccgcacggggctgactgcggttgtggttggcgttatgttcctgttggttatgttcttctcaccgctggtcattatcttggaaccaaaggaaggataa

SEQ ID NO: 121534 - DNA, 3662 bp, Homo sapiens
atgcaagatgagaaactgcgggacgagacagagcagcctgtgagcaaagtaattgagcggaaccgtctgagaacggcatttcaagtgatgcggaagcaagcgggtgcagcggcgcttgacccaacgcagggtggaggatctgcacatcaccctgggcgccgggaggtggattcgtgtgggcagcccctcaaaccagatccactggtcggctacatccagctgcttcatgtgccccatgggggttctattgcggtagggcttaatgaagatgactcgggggccctcgactggaaccgcttgcatgcctgcaggtcgactctagaggatccccggccttttcatggggccgagcgccgctgggtaggcggaagtagccgcacgagtggcggggctatgtcgtgctctgctcgtcctgttgctcctggggcccggcggctggtgccttgcagaacccccacgcgacacctgcgggaggaacttgtcatcaccccgctgccttccggggacgtagccgccacattccagttccgcacgcgctgggattcggagcttcagcgggaaggagtgtcccattacaggctctttcccaaagccctggggcagctgatctccaagtattctctacgggagctgcacctgtcattcacacaaggcttttggaggacccgatactgggggccacccttcctgcaggccccatcaggggtggacaaccatttggaggagctgagcctgccggtgcctacatcagacaggaccacatctaggacctcctcctcctcctcctccgactcctccaccaacctgcatagcccaaatccaagtgatgatggagcagatacgcccttggcacagtcggatgaagaggaggaaagggctcaccaggcgggggaaacggggcccacggtctgcggttacatgggactggacagcgcgtccggcagcgccactgagacgcagaagctgaatttcgagcagcagccggactccagggtcgactccaaaggatcccctgacagcccggaagcgaggaaaataacccggcgctggagaataggtgaagcagcggatttagttggggtttcttctcaggctatcagagatgccgagaaagcagggcgactaccgcacccggatatggaaattcgaggacgggttgagcaacgtgttggttatacaattgaacaaattaatcatatgcgtgatgtgtttggtacgcgattgcgacgtgctgaagacgtatttccaccggtgatcggggttgctgcccataaaggtggcgtttacaaaacctcagtttctgttcatcttgctcaggatctggctctgaaggggctacgtgttttgctcgtggaaggtaacgacccccagggaacagcctcaatgtatcacggatgggtaccagatcttcatattcatgcagaagacactctcctgcctttctatcttggggaaaaggacgatgtcacttatgcaataaagcccacttgctggccggggcttgacattattccttcctgtctggctctgcaccgtattgaaactgagttaatgggcaaatttgatgaaggccggctctccatgatgtccttcatcctcaacgccctcacctgcgccatgagaggccttctttgctggcccgtgttgctgctccttcttcagccctgggaaacccagctccagttgacaggggtggacaaccatttggaggagctgagcctgccggtgcctacatcagacaggaccacatctaggacctcctcctcctcctcctccgactcctccaccaacctgcatagcccaaatccaagtgatgatggagcagatacgcccttggcacagtcggatgaagaggaggaaagggatggggaaactgaggctccaagagaggaggctaaggtcgactctagaggatccccgatcggagttgctgcccataaaggtggcgtttacaaaacctcagtttctgttcatcttgctcaggatctggctctgaaggggctacgtgttttgctcgtggaaggtaacgacccccagggaacagcctcaatgtatcacggatgggtaccagatcttcatattcatgcagaagacactctcctgcctttctatcttggggaaaaggacgatgtcacttatgcaataaagcccacttgctggccggggcttgacattattccttcctgtctggctctgcaccgtattgaaactgagttaatgggcaaatttgatgaaggtaaactgcccaccgatccacacctgatgctccgactggccattgaaactgttgctcatgactatgatgtcatagttattgacagcgcgcctaacctgggtatcggcacgattaatgtcgtatgtgctgctgatgtgctgattgttcccacgcctgctgagttgtttgactacacctccgcactgcagtttttcgatatgcttcgtgatctgctcaagaacgttgatcttaaagggttcgagcctgatggaaggaccagtgtgctgaggggggacatggttgccagcaccagcaatgaatgcctgcaggtcgactctagaggatccccttatttcattatggtgaaagttggaacctcttacgtgccgatcaacgtctcattttcgccaaaagttggcccagggcttcccggtatcaacagggacaccaggatttatttattctgcgaagtgatcttccgtcacaggtggtgcagacacagaacatttccagttgtagaaattcctgttagggctgagcttgcatgcctgcaggtcgactctagaggatccccacgtaaaaatagcccgcgaatcgtccagtcaaacgacctcactgaggcggcatatagtctctcccgggatcaaaaacgtatgctgtatctgttcgttgaccagatcagaaaatctgatggcaccctacaggaacatgacggtatctgcgagatccatgttgctaaatatgctgaaatattcggattgacctctgcggaaccaaaccggtttacgcagtttcggcttagtgaaacaaaagaaatcaccaatccgtatgccatgcgtttatacgaatccctgtgtcagtatcgtaagccggatggctcaggcatcgtctctctgaaaatcgactggatcatagagcgttaccagctgcctcaaagttaccagcgcacttctccttgctgctgccacatgaagaaggacgtgtttgcttccccttccaccatgatttcttccagcagagtaagcaataataccagcaaaacaacaatcatcaagaatcaatgccaaaaggacgactctagaagatccctgctggtcaagaactcaagacctgccaaatgcgggagtaaaaggagctgtaacactttcctggccggctcgctgaggtgcaggtcatccccagagcacaccaccattctgaggggaggcgtgcgcaggtgcctgcagcaacagtgtgaacagactgtgcggatcctgcatgccaaggtggcccagaaatcatacggaaatgagaagcgactaataatcagaccgacgatacgagtgggaccatggtcccagactaataatcagaccgacgatacgagtgggaccgtggtccagtctgattatcagaccgacgatacgagtgggaccgtggtcagaactaataatcagaccgacgatac

SEQ ID NO: 121535 - DNA, 405 bp, Homo sapiens
atgaaactcatggaaacacttaaccagtgcataaacgctggtcatgaaatgacgaaggctatcgccattgcacagtttaatgatgacagcccggaagcgaggaaaataacccggcgctggagaataggtgaagcagcggatttagttggggtttcttctcaggctatcagagatgccgagaaagcagggcgactaccgcacccggatatggaaattcgaggacgggttgagcaacgtgttggttatacaattgaacaaattaatcatatgcgtgatgtgtttgaccgacgatacgagtgggaccatggtcccagactaataatcagaccgacgatacgagtgggaccgtggtcccagtctgattatcagaccgacgatacgagtgggaccgtggtcccagactaa

SEQ ID NO: 121536 - DNA, 276 bp, Homo sapiens
gtatcgtcggtctgattattagttctgaccacggtcccactcgtatcgtcggtctgataatcagactggaccacggtcccactcgtatcgtcggtctgattattagtctgggaccatggtcccactcgtatcgtcggtctgattattagtcgcttctcatttccgtatgatttctgggccaccttggcatgcaggatccgcacagtctgttcacactgttgctgcaggcacctgcgcacgcctcccctcagaatggtggtgtgctctggggatgac

SEQ ID NO: 121537 - DNA, 756 bp, Homo sapiens
atgagcacggaaggtggtggccgtcgctgccaggcacaagtgtcccgccgcatctccttcagcgcgagccaccgattgtacaggtactgggaggaggagatgaaccctgctcctgtggaggctatgagaacgttccagcagtttatcgatgaaggcaattatacatccggcgacacccatacgctgagagaccctcactacgttgaagacaaagcccataaataccttgtattcgaagccaacacgggaacagaaaacggataccaaggcgaagaatctttatttaacaaagcgtactacggcggcggcacgaacttcttccgtaaagaaagccagaagcttcagcagagcgctaaaaaacgcgatgctgagttagcgaacggcgccctcggtatcatagagttaaataatgattacacattgaaaaaagtaatgaagccgctgatcacttcaaacacggtaactgatgaaatcgagcgcgcgaatgttttcaaaatgaacggcaaatggtacttgttcactgattcacgcggttcaaaaatgacgatcgatggtattaactcaaacgatatttacatgcttggttatgtatcaaactctttaaccggcccttacaagccgctgaacaaaacagggcttgtgctgcaaatgggtcttgatccaaacactaatattcagaccgacgatacgagtggcaccgtggtccagactaataatcagaccgccgatacgagtgggaccatggtcccagactaa

SEQ ID NO: 121538 - DNA, 709 bp, Homo sapiens
agaatccccgaatggagtgagctcttccagcacagctgacaagtcccagaagcagtccctgacccccagctttcagagcccagccaccagcttggggctggatgaaggggtctccgccagctcagctggagccggagccggggagactctgaagcaggaatgtgactccctgggcccccagatggcgagcagcaccacctccaagccgtcatcatcatcctcaggacccaggaccctcccatggccgggacagcccatcagaggctgccggggcccacaggcagccctgccaccagtggtgatcctatccaaagcggcctacagtctcctgggctcccagaagagtggcaagctgccatcctcctcctccctgctgccccacgccgacgtggcctgggtgagctccctgcggccactcctgaacaaggacatgagcagtgaggagcagtccctctactacaggcagtggaccttggcccggcagcaccacgctgactatagcaaccagctggacccggcctctggcacccgaaacttccacccccgacggctcctgctgacagggcccccacagactaataatcagaccgacgataccgagtgggaccgtggtcccagactaataatcagaccgacgatacgagtgggaccgtggttccagactaataatcagaccgacgatacgagtgggaccgtggtcccagactaa

SEQ ID NO: 121539 - DNA, 1488 bp, Homo sapiens
atgcgtatctggatgaacccgaatgagctgaacaaattccagctaacgccggttgatgtcattaccgccatcaaagcgcagaacgcccaggttgcagcgggtcagctcggtggtacgccgccggtgaaaggccaacagcttaacgcctctattattgctcagacgcgtctgacctctactgaagagttcggcaaaatcctgctgaaagtgagcgccgtgagtgagcgagttcatcatgtgcggcggcaaagcggtcggacagtgctccgagaacgggtgcgcatagaaattgcatcaacgcatatagcgctacagcacgccatagtgactggcgatgctgtcggaatggacgatatcccgcaagaggcccggcagtaccggcataaccaagcctatgcctacagcatccagggtgacggtgccgaggatgacgatgagcgcattcacagcggtgagtggcaggcgtttatcaattcgctgaccacgaatctgacggcatttttccgtgaggcacatcatttccctctgctcgcggatcacgcacgtcgccgttctggcgagtatcgcgtatggagcgcggcggcttcgaccggcgaagagccgtacagcattgcgatgacgctggctgacacattgggcaccgcgcccggacgctggaaagtgtttgccagtgatatcgacaccgaagtgctggaaaaagccagaagcggtatctatcgccatgaagagttgaaaaacctgacgccgcagcaactgcaacggtatttcatgcgagggacggggccgcatgaagggctggtacgcgtgcgtcaggagctggcgaactatgttgattttgccccgctgaatctactggcgaaacagtacaccgtgccggggccgtttgatgcgatcttctgtcgtaacgtcatgatctacttcgatcaaactacccagcaggagattttgcgccgctttgttccgctccttaaacccgacggattgctgtttgcgggtcactctgaaaactttagccaccttgagcgccgcttcacgctgcgtggtcagacggtgtatgcgctaagaaaatgttgtcgaaaagcgtgtaagaggtgcgcaatgcgtaagcagtggctcgggatctgcatcgcggcaggaatgctcgcggcatgtacaagcgatgatggtcagcaacagacggtaagtgtaccgcagcctgcggtatgtaacggccctatagttgaaattagcggggcggacccgcgtttcgaaccactgaacgcgacggcaaatcaggattaccagcgcgacggtaaaagctacaaaatcgtgcaggatccgtctcgatttagccaggcgggactggcggcaatctatgatgccgaacccggcagtaacctgacggcctctggcgaagcatgtcgatccgacacagctgacggcagcccatccaacgcttccgatcccccagctacgccagaatcactaacctggctaacgggcgaatga

SEQ ID NO: 121540 - DNA, 1641 bp, Homo sapiens
ttatctaatctcccagcgtggtttaatcagacgatcgaaaatttcattgcagacaggttcccaaatagaaagagcatttctccaggcaccagttgaagagcgttgatcaatggcctgttcaaaaacagttctcatccggatctgacctttaccaacttcatccgtttcacgtacaacattttttagaaccatgcttccccaggcatcccgaatttgctcctccatccacggggactgagagccattactattgctgtatttggtaagcaaaatacgtacatcaggctcgaaccctttaagatcaacgttcttgagcagatcacgaagcatatcgaaaaactgcagtgcggaggtgtagtcaaacaactcagcaggcgtgggaacaatcagcacatcagcagcacatacgacattaatcgtgccgatacccaggttaggcgcgctgtcaataagtacatcaggctcgaaccctttaagatcaacgttcttgagcagatcacgaagcatatcgaaaaactgcagtgcggaggtgtagtcaaacaactcagcaggcgtgggaacaatcagcacatcagcagcacatacgacattaatcgtgccgatacccaggttaggcgcgctgtcaataactatgacatcatagtcatgagcaacagtttcaatggccagtcggagcatcaggtgtggatcggtgggcagtttaccttcatcaaatttgcccattaactcagtttcaatacggtgcagagccagacaggaaggaataatgtcaagccccggccagcaagtgggctttattgcataagtgacatcgtccttttccccaagatagaaaggcaggagagtgtcttctgcatgaatatgaagatctggtacccatccgtgatacattgaggctgttccctgggggtcgttaccttccacgagcaaaacacgtagccccttcagagccagatccgacgatacgagtgggaccgtggtcccagtctgattatcagaccgacgatacgagtgggaccgtggtcccagactaataatcagaccgacgatacgagtgggaccgtggtcccagactttaccaacttcatccgtttcacgtacaacattttttagaaccatgcttccccaggcatcccgaatttgctcctccatccacggggactgagagccattactattgctgtatttggtaagcaaaatacgtacatcaggctcgaaccctttaagatcaacgttcttgagcagatcacgaagcatatcgaaaaactgcagtgcggaggtgtagtcaaacaactcagcaggcgtgggaacaatcagcacatcagcagcacatacgacattaatcgtgccgatacccaggttaggcgcgctgtcaataactatgacatcatagtcatgagcaacagtttcaatggccagtcggagcatcaggtgtggatcggtgggcagtttaccttcatcaaatttgcccattaactcagtttcaatacggtgcagagccagacaggaaggaataatgtcaagccccggccagcaagtgggctttattgcataagtgacatcgtccttttccccaagatagaaaggcaggagagtgtcttctgcatgaatatgaagatctggtacccatccgtgatacat

SEQ ID NO: 121541 - DNA, 494 bp, Homo sapiens
  misc_feature (1)...(494): n = a,t,c or g
ctgcacgaccatcgggataccgacccgtcccgcccctcccagccctcagaccccggggtcctggagcttcctctgtttcaagtggagcacgaaggagagtggacctgccacgctcggcacccactgggctcccagcacgtctctctcagcctctccgtgcactgtgagtgggggaaaggggacacctgggtcccaggaaggggaccctgctgagtcctgtcctccctcccctcagactccccgaagctgctgggcccctcctgctcctgggaggctgagggtctgcattgcagttgctcctcccaggccagcccggccccctctctgcgctggtggcttggggaggagctgctggaggggaacagcagccaggactcctttgaggtcacccccagctcagccgggccctgggccaacagctccctgagcctccatggagggctcagctccggcctcangctccgctgtgaggcctggaacgtccatggngccca

SEQ ID NO: 121542 - DNA, 888 bp, Homo sapiens
atggaaattcgaggacgggttgagcaacgtgttggttatacaattgaacaaattaatcatatgcgtgatgtgtttggtacgcgattgcgacgtgctgaagacgtatttccaccggtgatcggggttgctgcccataaaggtggcgtttacaaaacctcagtttctgttcatcttgctcaggatctggctctgaaggggctacgtgttttgctcgtggaagcccagggaacagagttcccagagcccactcgcctgttcagcggcctgcttaaccctgaggacacagtcttgcctgggcactgcagggcagaccgacgatacgagtgggaccatggtgcagtactaataatcagaccgacgatacgagtgggaccgtggtccagtctgattatcagaccgacgatacgagtgggaccgtggtcagaaactaataatcagaccgacgatacgagtgggaccgtggtccagactaataatcagaccgacgatacgagtgggaccgtggtccagtctgattatcagaccgacgatacgagtgggaacgtgatgccaaaggaagagtttcccccaagtccagagtgctggaggcagcatccgagcaagccaaactcagtcccgtactgctacttcaagaaacctgagatctacacgcactggcacgacctgtatgatcagcgagaggaaagggaggctgagaagatgttgaggaaaatgagagatgactgtaggtacatcaacgaggttaatcaaacccgcattcaaatggttcatcttccaatgaggaagctggctataaaaactgagatgcggtccagggccttagagccttatcaggaactccctgaagtggccaagattagaggtcaggacatgtgggaaaggaagtag

SEQ ID NO: 121543 - DNA, 1290 bp, Homo sapiens
atggaagatgctctgtacgaaatcgcctccatgcgtctgtttgcccggttatccctggatagcgccttgccggaccgcaccaccatcatgaatttccgccacctgctggagcagcatcaactggcccgccaattgttcaagaccatcaatcgctggctggccgaagcaggcgtcatgatgactcaaggcaccttggtcgatgccaccatcattgaggcacccagctcgaccaagaacaaagagcagcaacgcgatccggagatgcatcagaccaagaaaggcaatcagtggcactttggcatgaaggcccacattggtgtcgatgccaagagtggcctgacccacagcctggtcaccaccgcggccaacgagcatgacctcaatcagctgggtaatctgctgcatggagaggagcaatttgtctcagccgatgccggctaccaaggggcgccacagcgcgaggagctggccgaggtggatgtggactggctgatcgccgagcgccccggcaaggtaagaaccttgaaacagcatccacgcaagaacaaaacggccatcaacatcgaatacatgaaagccagcatccgggccagggtggagcacccatttcgcatcatcaagcgacagttcggcttcgtgaaagccagatacaaggggttgctgaaaaacgataaccaactggcgatgttattcacgctggccaacctgtttcgggcggaccaaatgatactttgtccagtctttgtccaccacataccacggttcttcggtaccttctttggtgccaccgatacccagacctttacgctgaccgagagtgtgatacatcagcccctggtgctcaccaatttcatcgccatcgacggtaatgattttgcccggttgcgccgggagataacggcccaggaactcgcggaatttacgttcgccaatgaagcaaatgccgaccaagatcttcagcaatcttacgcactgcggtttttccagttcgccgaccgggaacaggctttgcgcaatctgctcatggctgagcgtataaaggaagtagctctggtctttattgctgtccagaccacgcagcaggcggctcttgccatcgacatcggcccgacgtacgtaatgaccggtagcgatataatcggcacctacaaagaggggttctacacggattgggttaaaatgatacctggtcacacgtttttatctgaaggaagaatatttcaaggtgatataccctacaagcccttgacgcggaggaatgaatgtgatgggagtgatgtatctgaatag

SEQ ID NO: 121544 - DNA, 1452 bp, Homo sapiens
atggtggtcgaaaacggctgctataccctgaaagacacttttgatgacaccaccattctgggctggatgatccagacggaagatactgaatacagcttaccgcagccggaaattgcaggcgagctgctgaaaatcagcggagcgcgcctggaaaacaaaggccagtttgacggtaaatggctggatgaaaaagatccgctgcaaaacgcctatgtgcaggccaacggtcaggtgatcaatcaggatccttatcattactacaccattaccgagagtgccgagcaggagctaattaaagccaccaacgagctgcacctgatgtatcttcacgcaaccgacaaggtgctgaaagatgacaacctgctggcgctgttcgacatcccgaaaatcctctggccacgtttgcgtctctcctggcagcgtcgccgtcaccatatgatcactggtcgtatggatttctgcatggatgagcgtggcctgaaggtttacgagtacaacgccgactccgcctcctgtcataccgaagcgggcttgatcctcgaacgttgggcggagcagggctataaaggcaacggcttcaatccggcggaagggctgattaacgaattggctgcgggtttttaccgtgcaacgcatagtgccggtgaatggttcgcgatcgacccagtgcaactgctgggcaatcaacccgacagacatcagccgcgggtgttcatggccctgagcgacaaccagaatgttgttttcgacgtcttggtccacaacataccccggttcttcggaaccttctttggtcccaccgatacccagacctgtacgctgaccgagagtgtgatacatcagcacatggtgctcaccaatttcatcgccatcgacggtaatgattttgcccggttgcgccgggagataacggcccaggaactcgcggaatttacgttcgccaatgaagcaaatgccggtagagtctttattcttcgcggtgaccagaccaagatcttcagcaatcttacgcacctgcggtttttccagttcgccgaccgggaacaggctttgcgcaatctgctcatggctgagcgtataaaggaagtagctctggtctttattgctgtccagaccacgcagcaggcggctcttgccatcgacatcggcccgacgtacgtaatgaccggtagcgatataatcggcacctaaatcttcggcggcaaattcgaggaaggctttaaatttgatctctttgttgcacagaatatccggattcggcgtgcgaccggctttatattcggcaaggaacagttcgaagacgttgtcccagtactcggcagcaaagttaacggtgtgcagttcaatgaccgagcttgtcgcagacagcctgggcatcagccagatccgctgccgctgcccaatattcggggatcctctagaatcgacataagcatggaccttcgcctgcat

SEQ ID NO: 121545 - DNA, 1442 bp, Homo sapiens
  misc_feature (1)...(1442): n = a,t,c or g
atggcgaatatcccgtggtatcgccatctcaccggtgcacaatggcgcgcattttccgctgcctggttgggatatctgcttgacggttttgatttcgttttaatcgccctggtactcaccgaagtacaaggtgaattcgggctgacgacggtgcaggcggcaagtctgatctctgcagcctttatctctcgctggttcggcggcctgatgctcggcgctatgggtgaccgctacgggcgtcgtctggcaatggtcaccagcatcgttctcttctcggccgggacgctggcctgcggctttgcgccaggctacatcaccatgtttatcgctcgtctggtcatcggcatggggatggcgggtgaatacggttccagcgccacctatgtcattgaaagctggccaaaacatctgcgtaacaaagccagtggttttttgatttcaggcttctctgtgggggccgtcgttgccgctcaggtctatagcctggtggttccggtctggggctggcgtgcgctgttctttatcggcattttgccaatcatctttgctctctggctgcgtaaaaacatcccggaagcggaagactggaaagagaaacacgcaggtaaagcaccagtacgcacaatggtggatattctctaccgtggtgaacatcgcatagccaatcagcttggcccaatggggggaaaaccccttttttttttaaaaatcccaaaaaatggcctagtgggggaagtctgggaccacggtccccactcgtatcgtcggtctgattattagtctgggaccacgtgtcccactcgtatcgtcggtttgataatcagactgggaccacggtcccactcgtatcgtcggtacagggtaagctgcctgcgggagtcagcgccgagctggggccagatgccacgggtgttggctggatctatgaatatgcactggtggatcgcagcggtaagcacgatctggccgatttacgctcattacaggactggtttctcaaatatgagctgaaaaccatccctgacgttgcgnaagtggcgtcggtgggcggtgtggtgaaagagtatcaggtggttatcgatccccagcgcctggcgcagtatggcatcagtctcgccgaagtaaaaagcgcgctggatgcttcaaaccaggaagcgggcggttcgtcgatcgaactggcggaagcggaatatatggtgcgcgccagcggctatctgcaaacgctcgacgactttaatcacatcgttttaaaagccagtgaaaatggcgtgcccgtttatctgcgcgatgttgcgaaggtccagattggcccggagatgcgccggggcattgccgaactaaacggcgaaggcgaagtggcgggcggggtggtgatcctgcgatccggcaaaaacgcccgagaagtgatcgccgccgtgaaggacaaactggaacaatattaa

SEQ ID NO: 121546 - DNA, 960 bp, Homo sapiens
tttcgtgttgaatctcccgctcccttgaggctggggttgcgtctgttgacgcggccgactacaatcccgagccctgccagccgggaacacggaggggaaggaggaggagcttaaaagaggctactgaaccccagttggccatggctgaggaatttgtgaccctcaaggatgtcggcatggacttcaccttgggagactgggagcagctcgggctggaacagggggacacgttctgggacacagcgttggacaattgccaggacctcttcctgctggaccccccaagacccaacctgacctcccacccagatggcagtgaagatctggagcctctggcaggaggaagcccagaagcaacaagccctgatgtgactgagaccaagaactctcctctgatggaggatttcttcgaagaaggattctcccaggagattatagagatgttatccaaggatggcttctggaactccaatttcggagaagcctgtatagaggacacctggttagatagtttgctaggcgatccagaaagtcttctgaggtctgatattgccaccaacggggaaagtcccacggaatgcaagagtcatgaattaaagagaggactcagtcctgtgtccaccgtttccacgggagaagattccatggtgcataatgtttctgaaaagaccctcacaccagctaagtctaaggaatataggggtgagtttttctcctactccgaccacagccagcaggattctgttcaggaaggggagaaaccatatcaatgtagtgaatgtgggaaaagcttcagtgggagttaccgtcttacccagcactggatcactcatactagggagaaacccactgtccatcaagagtgtgagcaaggttttgaccggaatgcttccctttctgtgtatccgaaaactcacacgggctacaaattctatgtgtgtaatgaatatgggacaactt

SEQ ID NO: 121547 - DNA, 1809 bp, Homo sapiens
atgctaacgagtggctcgggatctgcatcgcggcaggaatgctcgcggcatgtacaagcgatgatggtcagcaacagacgtgaacaggagacatttgcacttgctctttcagatgtgactgagaccaagaactctcctctgatggaggatttcttcgaagaaggattctcccaggagattatagagatgttatccaaggatggcttctggaactccaatttcggagaagcctgtatagaggacacctggttagatagtttgctaggcgatccagaaagtcttctgaggtctgatattgccaccaacggggaaagtcccacggaatgcaagagtcatgaattaaagagaggactcagtcctgtgtccaccgtttccacgggagaagattccatgaaatctgtgatggttttacacggcttcgtgttaaatagaatttccccagatgctgactgccctccaataaagatgcctccaggatgcagcaagtgcctaaccagatttaggtgccgattatatcgctaccggtcattacgtacgtcgggccgatgtcgatggcaagagccgcccctgctgcgtgggtctgggacagccattaaagacaagagctacttcctttatacgctcagccatgagcagattgcgcaaagcctgttcccggtcggcgaactggaaaaaccgcagtgcgtaagattgctgaagatcttggtctggtcaccgcgaagaaaaaagactctaccggcatttgcttcattggcgaacgtaaattccgcgagttcctgggccgttatctcccggcgcaaccgggcaaaatcattaccgtcgatggcgatgaaattgactaataatcagaccgacgatacgagtgggaccgtggtcatgactaataatcagaccgacgatacgagtgggaccatggtcacgactaataatcagaccgacgatacgagtgggaccgtggtcatgtctgattatcataccgacgatacgagtgggaccgtggtcaggactaatactcagaccgacgatacgagtgggaccgtggtcagcactaataatcaggccgacgatacgagtgggaccgtggtcagccattgtaagagacatatatctttggttttctctgaagatatgccgctctgtggatgtctctctaatcgtgcaactacaccaggagatatgcacgacactagtcagctgaagcatgattcgtctacagacatcattgtaacgaatcccaggtatgtcgcagaactaatcgttgctgcgacgagtatgacgttggttctggttgcaatgaaaacgtctacgtcgctcatgcatgcagatggaaatggtggcaatcgtgagaaatatcaggatcatagtactacagggatgatgtgggccagcccggccccctctctgcgctggtggcttggggaggagctgctggaggggaacagcagtcagggctccttcgaggtcacccccagctcagccgggccctgggccaacagctccctgagcctccatggagggctcagctccggcctcaggctccgctgtaaggcctggaacgtccacggggcccagagtggctctgtcttccagctgctaccagtcgacaacaactcatcagaaaagcgagggatgaataacaccgagccaagacacgcaccttctgacctggagatggtcgcagaaataatggcgaaagctgacagcacagaactagacgtaggggagacaccagacatagagcacggacaatgcatgccgctacagacggtgcacagagcacaatcatgggcgtaccaggcgcgcgaatga

SEQ ID NO: 121548 - DNA, 2601 bp, Homo sapiens
  misc_feature (1)...(2601): n = a,t,c or g
atggacgatatcccgcaagaggcccggcagtaccggcataaccaagcctatgcctacagcatccagggtgacggtgccgaggatgacgatgagcgcattgttagatttcatacacgggtcaccgtcgacagcgacacacttgcatcggatgcagcccggttaacgtgccggcacgctcggagtaaccagtgcggatgttcgactccaaacatcaaagccaacgagaggttcaggttactcctccttgaccccaaacatccagtgagtggagactggcctgttcacagagtaaaatatgtcgtctctaattcggcaaagacggtgatgactgtatatatgcaggccaattccgtaagtaaagtttcatgtaaaactaattaccggatattccaaccaccccctgtgcaggccagccgcatgcacaagggacaggatttattccccactggaagcaactggaaaactggaaaaaaatatacaaaacagcagttctcaagacattgtgtgccggcaacaaaggacagtgatgctggagagatgagaaataagcaagtctgggaccacggtcccactcgtatcgtcggtctgattattagtctgggaccacggtcccactcgtatcgtcggtctgataatcagactgggaccacggtcccactcgtatcgtcggtctgaccgggcagatagttcaccggggtgagaaaaaagagcaacaactgatttaggcaatttggcggtgttgatacagcgggtaataatcttacgtgaaatattttccgcatcagccagcgcagaaatatttccagcaaattcattctgcaatcggcttgcataacgctgaccacgttcataagcacttgttgggcgataatcgttacccaatctggataatgcagccatctgctcatcatccagctcgccaaccagaacacgataatcactttcggtaagtgcagcagctttacgacggcgactcccatcggcaatttctatgacaccagatactcttcgaccgaacgccggtgtctgcaggaagcggcggcggaagtcaggcatacgctggtaactttgaggcagctggtaacgctctatgatccagtcgattttcagagagacgatgcctgagccatccggcttacgatactgacacagggattcgtataaacgcatggcatacggattggtgatgtttttctnctggttacccaggccgtgccggcacgttaaccgggctgcatccgatgcaagtgtgtcgctgtcgacggtgaccctatatcgaggagggggtttctnntgaatcgccagcggcatcagcaccttgtcgccttgcgtataatatttgcccatggtgaaaacgggggcgaagaagttgtccatattggccacgtttaaatcaaaactggtgaaactcacccagggattggctgagacgaaaaacatattctcaataaacccgtctttcattgccatacggaactccggatgagcattcatcaggcgggcaagaatgtgaataaaggccggataaaacttgtgcttatttttctttacggtctttaaaaaggccgtaatatccagctgaacggtctggttataggtacattgagcaactgactgaaatgcctcaaaatgttgtgaaatattttccgcatcagccagcgcagaaatatttccagcaaattcattctgcaatcggcttgcataacgctgaccacgttcataagcacttgttgggcgataatcgttacccaatctggataatgcagccatctgctcatcatccagctcgccaaccagaacacgataatcactttcggtaagtacagcagtggcttccgcagaggtcaatccgaatatttcagcatatttagcaacatggatctcgcagataccgtcatgttcctgtagggtgccatcagattttctgatctggtcaacgaacagatacagcatacgtttttgatcccgggagagactatatgccgcctcagtgaggtcgtttgactggacgattcgcgggctatttttacgtttcttgtgattgataaccgctgtttccgccatgacagatccatgtgaagtgtgacaagtttttagattgtcacactgcaggaagcggcggcggaagtcaggcatacgctggtaactttgaggcagctggtaacgctctatgatccagtcgattttcagagagacgatgcctgagccatccggcttacgatactgacacagggattcgtataaacgcatggcatacggattggtgatttcttttgtttcactaagccgaaactgcgtaaaccggttctgtaacccgataaagaagggaatgagatatgggttgatatgtacactgtaaagccctctggatggactgtgcgcacgtttgataaaccaaggaaaagattcatagcctttttcatcgccggcatcctcttcagggcgataaaaaaccacttccttccccgcgaaactcttcaatgcctgccgtatatccttactggcttccgcagaggtcaatccgaatatttcagcatatttagcaacatggatctcgcagataccgtcatgttcctgtagggtgccatcagattttctgat

SEQ ID NO: 121549 - DNA, 2118 bp, Homo sapiens
atgctgcagatccctaaacagcagcaaaacgaaaaataccaagtgcctcaattcgatcaatcaacgattaaaaatattgagtctgcaaaaggacttgatgtgtgggacagctggccgctgcaaaacgctgacggaacagtagctgaatacaacggctatcacgttgtgtttgctcttgcgggaagcccgaaagacgctgatgacacatcaatctacatgttttatcaaaaggtcggcgacaactcaatcgacagctggaaaaacgcgggccgtgtctttaaagacagcgataagttcgacgccaacgatccgatcctgaaagatcagacgcaagaatggtccggttctgcaacctttacatctgacggaaaaatccgtttattctacactgactattccggtaaacattacggcaaacaaagcctgacaacagcgcaggtaaatgtgtcaaaatctgatgacacactcaaaatcaacggagtggaagatcacaaaacgatttttgacggagaacggaaaacatatcagaacgttcagcagtttatcgatgaaggcaattatacatccggcgacaaccatacgctgagagaccctcactaccaaaatacgtacatcaggctcgaaccctttaagatcaacgttcttgagcagatcacgaagcatatcgaaaaactgcagtgcggaggtgtagtcaaacaactcagcaggcgtgggaacaatcagcacatcagcagcacatacgacattaatcgtgccgatacccaggttaggcgcgctgtcaataactatgacatcatagtcatgagcaacagtttcaatggccagtcggagcatcaggtgtggatcgatagaaaggcaggagagtgtcttctgcatgaatatgaagatctggtacccatccgtgatacattgaggctgttccctgggggtcgttaccttccacgagcaaaacacgtagccccttcagagccagatcctgagcaagatgaacagaaactgagctgctgcacttaccgaaagcgatatcgtgttctggttggcgagctgggtgatgagcagatggctgcattatccagattgggtaacgattatcgcccaacaagtgcttatgaacgtggtcagcgttatgcaagcctattgcagaatgaatttgctggaaatatttctgcgctggctgatgcggaaaatatttcacgtaagattattacccgctgtatcaacaccgccaaattgcctaaatcagttgttgctcttttttctcaccccggtgaactatctgcccggtcaggtgatgcacttcaaaaagcctttacagataaagaggaattacttaagcagcaggcatctaaccttcatgagcagaaaaaagctggggtgatatttgaagctgaagaagttatcactcttttaacttctgtgcttaaaacgtcatctgcatcaagaactagtttaagctcacgacatcagtttgctcctggagcgacagtattgtataagggcgataaaatggtgcttaacctggacagactaataatcagaccgacgatacgagtgggaccgtggtcccagactaataatcagaccgacgatacgagtgggaccatggtcccagtactaataatcagaccgacgatacgagtgggaccgtggtcccaagtctgattatcagaccgacgatacgagtgggaccgtggtcccagactaataatcagaccgacgatacgagtgggaccgtggtcccagactaataatcagaccgacgatacgagtgggaccgtgggcccaggctgattattacaccggccatttccagtggaacaggggggcccagaaatgatatttctggccagttatgctttctggcctgtaacaaaggacattaagtaaagacagataaacgtagactaaaacgtggtcgcatcagggtgctggcttttcaagttccttaagaatggcctcaattttctctatacactcagttggaacacgagacctgtccaggttaagcaccattttatcgcccttatacaatactgtcgctccaggagcaaactgatgtcgtgagcttaaactagttcttgatgcagatgacgttttaagcacagaagttaaaagagt

SEQ ID NO: 121550 - DNA, 5048 bp, Homo sapiens
  misc_feature (1)...(5048): n = a,t,c or g
atgagttcgccaaaaggacttgatgtgtggaacagctggccgctgcaaaacgctgccggaccagtagctgaatacaagggctatcacgttgtgtttgctcttgcggaaagcccgaaagacgctgatgacacatcatcctacatgttttatcaaaaggtcggcgacaactcaatcgacagctggaaaaacgcgggccgtgtctttaaagacagcgataagttcgacgccaacgatccgatcctgaaagatcagacgcaagaatggtccggttctgcaacctttacatctgacggaaaaatccgtttattctacactgactattccggtaaacattacggcaaacaaagcctgacaacagcgcaggtaaatgtgtcaaaatctgatgacacactcaaaatcaacggagtggaagatcacaaaacgatttttgacggagacggaaaaacatatcagaacgttcagcagtttatcgatgaaggcaattatacatccggcgacaaccatacgctgagagaccctcactacgttgaagacaaaggccataaataccttgtattcgaagccaacacgggaacagaaaacggataccaaggcgaagaatctttatttaacaaagcgtactacggcggcggcacgaacttcttccgtaaagaaagccagaagcttcagcagagcgctaaaaaacgcgatgctgagttagcgaacggcgccctcggtatcatagagttaaataatgattacacattgaaaaaagtaatgaagccgctgatcacttcaaacacggtaactgatgaaatcgagcgcgcgaatgttttcaaaatgaacggcaaatggtacttgttcactgattcacgcggttcaaaaatgacgatcgatgatttgtggaagtttgaacttgagaatgatgatttagagtatctagtggaagaaaattctaaacagaaaaccattcaagatgtgatctggctgtttttaactgcctacactcatatacgaggagcgactcaagccttcgcgaaagaaaataaccaaaaagcatacaaagaaacgtacggcgtctctcatattacacgccatgatatgctgcagatccctaaacagcagcaaaacgaaaaataccaagtgcctcaattcgatcaatcaacgattaaaaatattgagtctgcaaaaggacttgatgtgtgggacagctggccgctgcaaaacgctgacggaacagtagctgaatacaacggctatcacgttgtgtttgctcttgcgggaagcccgaaagacgctgatgacacatcaatctacatgttttatcaaaaggtcggcgacaactcaatcgacagctggaaaaacgcgggccgtgtctttaaagacagcgataagttcgacgccaacgatccgatcctgaaagatcagacgcaagaatggtccggttctgcaacctttacatctgacggaaaaatccgtttattctacactgactattccggtaaacattacggcaaacaaagcctgacaacagcgcaggtaaatgtgtcaaaatctgatgacacactcaaaatcaacggagtggaagatcacaaaacgatttttgacggagacggaaaaacatatcagaacgttcagcagtttatcgatgaaggcaattatacacccggcgacaaccatacgctgagagaccctcactacgtgaagacaaaggccatgaggggatctnctacagtagacctggatgcatgcacgaaaggcgttctgacttttacgactgcacttctggcaggaggagcgaatcaagccttcgcgaaagaaaataccaaaaaagcatacaaagaaacgtacggcgtctctcatattacacgccatgatatgctgcagatcctnaaacagcagcaaaacgaaaaataccaagtgcctcaattcgatcaatcaacgattaaaaatattgagtctgcaaaaggacttgatgtgtgggacagctggccgctgcaaaacgctgacggaacagtagctgaatacaacggctatcacgttgtgtttgctcttgcgggaagcccgaaagacgctgatgacacatcaatctacatgttttatcaaaaggtcggcgacaactcaatcgacagctggaaaaacgcgggccgtgtctttaaagacagcgataagttcgacgccaacgatccgatcctgaaagatcagacgcaagaatggtccggttctgcaacctttacatctgacggaaaaatccgtttattctacactgactattccggtaaacattacggcaaacaaagcctgacaacagcgcaggtaaatgtgtcaaaatctgatgacacactcaaaatcaacggagtggaagatcacaaaacgatttttgacggagacggaaaaacatatcagaacgttcagcagtttatcgatgaaggcaattatacatccggcgacaaccatacgctgagagaccctcactacgttaagacaaaggccatgatctgggaccacggtcccactcgtatcgtcggtctgattattagtctgggaccacggtcccactcgtatcgtcggtctgataatcagactgggaccacggtcccactcgtatcgtcgtatcgtagccgggatggctcaggcatcgtctctctgaaaatcgactggatcatagagcgttaccagctgcttcaaagttaccagcgtatgcctgactcccgccgccgcttcctgcaggtctgtgttaatgagatcaacagcagaactccaatgcgcctctcatacattgagaaaaagaaaggccgccagacgactcatatcgtatattcgatcagcgatagcacgcaattctggctgtctgctggtgtgagcaaagtgactcaggactgtagtctcaagagagccacaggtgtggccatcaggaaaaaagcatatagaagtcaaaggatggccacagacacagccagaatccaagggaatctggactcagaccacctgcacccaggtgaaataaacagctttattgctcacacaaagcctgtttggtgctctcttcacatggacatgcatgagatttggtgccgtgactcggatcaggagacctcccttgggagatcaatcccctgtcctgctgctctttgctccgtgagaaagatccacgtacaacctcaggtcctcagaccaaccagcccaagaaacatctcaccaatttcaaatctgcctgacctcgtatctctgtgccctgacccctttccagcttttctggagggcctctctttgctgtcacctggactgaccctgacacccaacagtcccagcagcttacctgggctgtgctgccgcaaggtttcaggggacagccctcattacttcagccaagctctttctcatgatctactttctttccacccctctgcttctcaccttattcaatatattgatgaccttcttctttgtagcccctcctttgaatcttctcaacaagacacacttctgcttcttcagcagttattctctaaaggatttcaggtgtcctcctccaaagaccgacgatacgagtgggaccgtggccgaactaataatcagaccgacgatacgagtgggaccatggtcagaactaataatcagaccgacgatacgagtgggaccgtggtcccagtctgattatcagaccgacgatacgagtgggaccgtggtcccagactaataatcagaccgacgatacgagtgggaccgtggtcccagaccctttccaccggtgatcggggttgttttccataaaggtggcgtttacaaaacctcagtttctgttcatcttgctcaggatctggctctgaaggggctacgtgttttgctcgtggaaggtaacgacccccagggaacagcctcaatgtatcacggatgggtaccagatcttcatattcatgcagaagacactctcctgcctttctatcgatccacacctgatgctccgactggccattgaaactgttgctcatgactatgatgtcatagttattgacagcgcgcctaacctgggtatcggcacgattaatgtcgtatgtgctgctgatgtgctgattgttcccacgcctgctgagttgtttgactacacctccgcactgcagtttttcgatatgcttcgtgatctgctcaagaacgttgatcttaaagggttcgagcctgatgtacgtattttgcttaccaaatacagcaatagtaatggctctcaatccccgtggatggaagagcaaatatcggatgccctccgcatcagccagcgcagaaatatttccagcaaattcattctgcaatccgcttgcataacgctgaccacgttcataagcacttgttgggcgataatcgttacccaatctggataatgcagccatctgctcatcatccagctcgccaaccagaacacgataatcactttcggtaagtgcagcagctttacgacggcgactcccatcggcaatttctatgacaccagatactcttcgaccgaacgccggtgtctgttgaccagtcagtagaaaagaagggatgagatcatccagtgcgtcctcagtaagcagctcctggtcacgttcattacctgaccatacccgagaggtcttctcaacactatcaccccggagcacttcaagagtaaacttcacatcccgaccacatacaggcaaagtaatggcattaccgcgagccattactcctacgcgcgcaattaacgaatccaccatcggggcagctggtgtcgataacgaagtatcgacgatgcgagtgggaccgagggcccagtactgattatcagaccgaccatacgagtgggaccgtggtcccagactaataatcataccgtctatacgagtgggaccgtgtgtcccagactggttacccaggccgtgccggcacgttaaccgggctgcatccgatgcaagtgtgtcgctgtcgacggtgacccgtgtatgaaatctaacaatgcgctcatcgtcatcctcggcaccgtcaccctggatgctgtaggcataggcttggttatgccggtactgccgggcctcttgcgggatatcgtccat

SEQ ID NO: 121551 - DNA, 669 bp, Homo sapiens
atgccgcctcgccgttataaccttgacacccgacgtgacgagttgctggaacgcattaatctcgatatccccggcccggtggcccaggcgctgcgggaagatttaggcggaacagtcgatgccaacaatgatattacggcaaaacttttaccggaaaattctcgctctcatgccacggtgatcacccgcgagaatggcgtcttttgcggcaaacgatgggttgaagaggtgtttattcaactggcaggcgacgatgtcaccataatatggcatgtggatgacggcgatgtcatcaatgccaatcaatccttgttcgaacttgaaggcccatcccgcgtgctgttaacgggcgaacgcactgcgcttaattttgtgcaaaccctttcaggagttgccagtaagatgtgctggtgccgtaagcataacggtcactggacggtagaactctacagtgacagcattccgcgtctgcaaatcaaccagcactacgcctcgatgtgcaataacgcgcgcaacgatggtgacagccagtttatccgcagcaatctgcaggatgccaaatggttgatcaagagtctggaaagccgtaacgatacgctactgcgcgtgagtcgctgtatcgttgaacagcagcaagccttctttgagcaaggctgtcgaaatgcatga

SEQ ID NO: 121552 - DNA, 744 bp, Homo sapiens
  misc_feature (1)...(744): n = a,t,c or g
atggagccgcaaacaaaaaagttgccggtcttacctgttgggcgaatccagaaaaaagccttcgccgcaatggatcgcgacctgctggagcttgtcgatgaattcgcctggattctggaagataccgccgactttatcgccggacgcgccgtgcccgcgatgaccccgccaggccaccagggcggcgttggttttaccaaaacacccgccggacgtttctaccatgactactatggtgaaaatctgttccgcaccgacatgggcatcgaacgaacttccctcggttctttgcttgaccatactggcgcatttggcgaaagcgaaaaatatgccgcacgcgtatttggtgccgatcgctcctggtcggtagtcgtcggtacttccggctctaaccgcaccatcatgcaggcttgcatgaccgataacgatgtcgtggtcgttgaccgtaactgccataaatccatcgaacaaggtttgatgctgacaggcgcgaaaccggtctatatggtgccaagccgcaaccgctacggcattatcgggccaatctatccgcaggaaatgcaacctgaaaccttgcagaagaaaatcagtgaaagacgcctccaaaccgagaacaggactgaagaatcgcgcggagaacgggccaaccaaacgggccgacattggccgcccaaaaaggccgtctggcaaggtctcggcgagggaacgccagaaacggttataccgacatcgaacccggcntgg

SEQ ID NO: 121553 - DNA, 727 bp, Homo sapiens
atgaaagtattaattgttgaaagcgagtttctccatcaagacacctgggtcggtaacgccgttgagcgtctggcagatgctttaagccagcaaaatgttaccgtgattaaatccacctcctttgatgatggttttgccattctctcttcaaacgaagccattgactgcctgatgttcagctatcaaatggaacatccggacgaacatcaaaacgtcagacaattgatcggtaagcttcatgagcgccaactaaacgtgccggtcttcctgttgggcgatcgggaaaaagccctcgccgcaatggatcgcgacctgctggagcttgtcgatgaattcgcctggattctggaagataccgccgacttttatcgccggaccgcgccggttgcccgcgaatgaacccgctacccgccaggcagctgttggccgccactgttcaagcgccgctgatgaaatatagtgaacatccatgaatatttcctgggcagcgccaggccaccagggcggcgttggttttaccaaaacacccgccggacgtttctaccatgactactatggtgaaaatctgttccgcaccgacatgggcatcgaacgaacttccactgcggtttctttgcttgaccattctggcgcatttggccaaagcgaaaaatatgccgcacgcgtatttggtgccgatcgctcctggtcggtagtcgtcggtacttccggctctaaccgcaccatc

SEQ ID NO: 121554 - DNA, 747 bp, Homo sapiens
atgcagatgcagactcacactccaccatctacaattagccgatttgctgactcgcaccgagagctgcagctgagtcaatccagcatccacatcacaacagagcagagtaccatcaaacggattcatacccaccaagcacattccagtggtgcatcaccactagccagaagcaacagcaaccattgtagcagccaacacaggacccaaccaacaccgggccacaaggacaacccggtaccacacacggggccgacgataacgcctaggccggatatacaacccaataaaggcatacagaagccaacccatggcacagacagcacaatacagagaccacaccgccagccatccaagtaccagaaggaggggaaaacgaacaacgcaaacctccaaaaaacacgcatgaacggatctcacaccaacacaaccaagacaacacgcaccaagacggcgcaaggtccacaaaccccaaagaaacgccaaaacgacaaaccaaaacagacaacacatgcttgccaatcctctatagggtttctagctattgtgctcgcccaacacgttaacattgtgctggatgtctggctggtgatggggctgcatatgaacgtgcagggcgcggcgctggcaaatgagatgcaacgtcaagtagccggatccacagaaaggtatggtgaaccaccctatgcctgccagctcttatctcaggtggacatggactgcaggtccacatgcgacccatcggcctga

SEQ ID NO: 121555 - DNA, 250 bp, Homo sapiens
atgcctgatctctacttctacagagatcctgaagagattgaaaaagaagagcaggctgctgctgaaaaggctgtgaccaaggaggaatttcagggtgagtggactgctctagctcctgagttcactgctactcagcctgagattgcagactggtttgaaggaaaaacaagagtagcaggtattagcgcaggccgaaataagctaatagaccttgcttgtcatggagagcacccaacactctttgaattag

SEQ ID NO: 121556 - DNA, 850 bp, Homo sapiens
atgaaggaggaagatgtccttaatttccttgcagcaggaaaccaattaggtggcaccaaccttgacttacagatggaacagtacatgtataaaaggaaaagtgatggcatctacatcccaaatctgaagaggacctgggagaagcttctgctggcagctcgtggcattgttgccattgaaaaccccgctgatgtcagtgtcataccctccagaaatactggccagagggccgtgctgaagtttgctgctgccactggagccactccaatcgctggccgcttcactcctggaaccttcactaaccagatccaggcagccttccgggagccacggcttcttgtgtttactgaccccagggctgatcagcagcctctcacagaggcatcttatgttaacctacctaccttgctctattctcctctgcgccatgtggacattgccatcccaagcaacaacaagggagctcactcagtgggtctgatgtggtggatgctggctcgggaagttctgcgcatgcgtggcaccatttcctgtgaacacccgtgggaggtcatgcctgatctctacttctacagagatcatgaagacattgaaaaagaagagcaggctgctgctgaaaaggctgtgacaaggaggaatttcaggctagttaaaactgcaaagttgggcacctcctggaactacctctttgacttccaccctcacagggtcctggtcgtgggagccttcgccaacttctgcacagagcccacgggctgctcctgcctcttccccaaactcccgccacacctgctcatgctgccttgttggttccatctcctcttcttccaggactacatcatgtcaggtg

SEQ ID NO: 121557 - DNA, 1275 bp, Homo sapiens
gggaatctggctgcaggaaaaaccatccaagcgcaagacagagatgctgtgggcatcctcagttccagaactggggaatccatggaaaacctgcagaaaaacttgctgcccaagcagaggaggcgaacgagggaaactttcacaatgtccggagcccttgatgtcctgcaaattaaggaggaggatgtccttaagttccttgcagcaggaacccacttaggtggcaccaatcttgacttccagatggaacagtacatctataaaaggaaaagtgatggcatctatatcataaatctcaagaggacctgggaggagcttcgtccgccagcctcgtgcaaatggtgcccattgaaaaccctgctgatggtcagtgttatatcctccagggaatactggccaggtttgtggaacagtgagggctgttgttgaggtttcttgctgccactggagccactccaattggcggcccgcttcactcctggaacctttcactaacccagatccaggccagccttcccgggagcccacgggctttcttgtgggttacctgacccccaggggctgaaccaccagccctctcacggagtgcatctttatgttaacccttcttaccattggcgctggttaacccggatttccccttcggcgctatgtgatcattgccatcccatgcaacaacaagggagctcacctcagtgggtttgatgtggtggaatgctggctcgggaagtttctgcgcatgcgtggcaccatttcccgtgaacacccatggggaggtcatgcctgatctgtacttctacagagatcctgaagagattgaaaaagaagagcaggctgctgctgagaaggcagtgaccaaggaggaatttcagggtgaatggactgctcccgctcctgagttccactggctactcagcctgaggttgcagactggtctgaaggtgtacagggtgcccctctggtgccctattcagcaatttccctactgaagactggagcgctcagcctgccacggaaagactggtcttgagcttccacttgctcaggccactgaatgggtaggagcaaccactgactggtcttaagactgttcttgcataggctcttaagcagcatggaaaaatggttgatggaaaactaaacatcagtttctaaaagttgtcttcatttagtttgctttttactccagatcagaatacctgggattgcatatcaaagcataataataaatacatgtctcgacatgagttgtacttctaaaaaaaaaaaaaaagc

SEQ ID NO: 121558 - DNA, 1056 bp, Homo sapiens
atggagaacaactacagcaactacattactggtaggaatgcagcatgctacagccactttggaaaacagtttgacagttcttatgaagttaaacatacatttaccataccaagcacactcttcagtattcacccaggagaaaggaaaacatgtccaccaaaggcctataggcaaagccattcaacaaagacagttatggacttcgtgaatagcagtgataatgtcatctttgtacacaacacaattcatctcatctctcaagtgatggacaatatggtcatggcttgtgggggtatactgccattgctttcagctgctacatcggctacacatgaactggaaaatattgaacctactcaaggcctttcaatagaagcctctgtgacatttttgcagaggctaattagccttgtggatgtgcttatatttgcaagttctcttggctttactgaaattgaagctgaaaaaagtatgtcatctggaggaattttgcggcagtgtctccgactagagatactaaaagtaattgcgaccctacttcgaaattctccccagtgcccagagagcatggaggttcgcagagcctttctttctgacatgattaaactttttaataacagtagagaaaacaggaggagcttgctacaatgctctgtgtggcaagaatggatgctttctctctgctattttaatcctaagaattcagatgagcaaaagataacagaaatggtatacgccatattcagaatcctgctttaccatgcagtcaaatatgagtggggtggctggcgtgtatgggtagacactttatcaatcactcattcaaaggtttttccagagaaacagaaccaagaggatgtgcagatagagagagagacagagattgatttcaagaagtttattcatgcaattatggaggcttgggggtgtggctatagagaatgctgggtagggccttttggctttgcttctgtagctttatacacttacgtcagcaggttttatattgggctgtgcagttcaacctacaagccattggatggcagttatgagtaa

SEQ ID NO: 121559 - DNA, 770 bp, Homo sapiens
gggtcgacgatttcgagctacacatgagctggaaaatattgaacctactcaaggcctttcaatagaagcctctgtgacatttttgcagaggctaattagccttgtggatgtgcttatatttgcaagttctcttggctttactgaaattgaagccgaaaaaagtatgtcatctggaggaattttgcggcagtgtctccgactagtttgcgcagacgcagtaaggaattgcttggagtgtcaacagcattcacaactgaaaactatgggagataaagccttgaaaccaatgcatagccttattcctttagggaaatctgcagcgaatagcccagtggacattgtgactggcggtatatctccagtaagagatcttgacaggcttctacaggacatggatattaatcggcttagggcagctgttttcagagacatagaggatagcaaacaagctcaatttttagccttggcagtagtatactttatctctgttcttatgggctccaagtacagagacattttggaaccccaaaatgaaaggcatagccagtcatgtacagaaactggcagtgaaaatgagaatgtatcactctctggttcaactgatgctctatacttatctgtccacggaattcacccgtacagtcaacatatataacaccattcggagagttggaacagtgcttctcatcatgcacacgctgaagtactactactgggcagtgaatcctcaggatcgaagtggtatcaccccaaaaggattaggtatataa

SEQ ID NO: 121560 - DNA, 2616 bp, Homo sapiens; identical to SEQ ID NO: 118718

SEQ ID NO: 121561 - DNA, 2763 bp, Homo sapiens
atgggagactttaacaccccgctgtcaacattagacagatcaatgagacagaaagttaacaaggatatccaggaattgaactcagctctgcaccaagcagacctaatagacatctacagaaatctccaccccgaatcaacagaatatacattcttttcagcaccacaccacacctattccaaaattgaccacatacttggaagtaaagcacccctcagcaaatatagaagatcagaaattaaaataaactgtctctcagaccacagtgcaatcaaactagaactcaggattaagaaactcactcaaaaccgctcaactacatggaaactgaacaacctgctcctgaatgactactgggtacataacgaaatgaaggcagaaataaagatgttctttgaaaccaatgagaacaaagacacaacataccagaatctctgggacacattgaaagcagtgtgtagagggaaatttatagcactaaatgcccacaagagaaagcaggaaagatctaaaattgacactctaacatcacaattaaaagaactagagaagcaagagcaaacacattcaaaagctagcagaaggcaagaaatatctaagatcagaggagaactgaaggaaatagagacacaaaaaacccttcaaaaaatcaatgaatccagaggctggttttttgaaaagatcaacaaaattgatagactgctagcaagactaataaagaagaaaagagagaagaatcaaatacatgcaataaaaaatgataaaggggacatgtccaccaatcacacagaaatacaaactaccatcagagaatactataaacacctctatgcaaataaactggaaaatctaaaagaaatagataaattcctggagacatacagcctcccaagactaaaccaggaagaagttgaatctctgaatagaccaataacaggctctgaaatagaggcaataattaatagcttaccaaacaaaagaagtccaggaccagatggattcacagccaaattctaccagaggtacaaggaggaactgctaataagcaacttcagcaaagtctcaggatacaaaatcaatgtgcaaaaatcacaagcattcttatataccaacaacagacaaacagagagccaaatcatgagtgaactcccattcacaattgcttcaaagagaatgaaatacctaggaatccaacctacaagggacatgaaggacctcttcaaggagaactacaaaccactgctcaatgaaataaaagaggatacaaacaaatggaagaacattccatgctcatgggtaggaagaatcaatattgtgaaaatggccatactgcccaagaattggaaaaaaactactttaaagttcatatggaaccaaaaaagagcccgcattgccaagtcaatcctcagccaaaagaacaaagctggaggcatcatgctacctgacttcaaactatactacaaggctacaataacgaaaacagcatggtactggtatcaaaacagagatatagatcaatggaacagaacagagccctcagaaataatgccacatatctacaaccatctgatctttgacaaacctgataaaaacaagaaatggggaaaggattccctatttaataaatggtgctgggaaaactggctagccatatgtagaaagctgaaactggatcccttccttacaccttatacaaaaattaattcaagatggattaaagacttaaatgttagacctaaaaccataaaaaccctagaagaaaacccaggcaataccattcaggacataggcatgggcgaggacttcatgtctaaaacaccagaagcaatggcaacaaaagccaaaattgacaaatgggatctaattaaactaaagagcttctgcacagcaaaagaaactaccatcagactgaacaggccacctacagaatgggagaaaatttttgcaatctactcatctgacaaagggctaatatccagaatctacaatgaactccaacaaatttacgagaaaaaaacaaacaaccccatcaaaaagtgggcaaaggatatgaacagacacctctcaaaagaagacatttatgcagccaaaagacacatgaaaaaatgcgcatcatcactggccatcagagaaatacaaatcaaaaccacaatgagataccacctcacaccagttagaatggcaatcattaaaaagtcaggaaacaacaggtgctggagaggatgtggagaaataggaacacttttacactgttggtgggactgtaaactagttcaaccattgtggaagtcagtgtggcgattcctcagggatctagaactagaaataccatttgacccagccatcccattactgggtatatacccaaaggattataaatcatgctgctatgaagacacatgcacacatatgtttattgtggcactattcacaatagcaaagacttggaaccaacccaaatgtccaacgatgatagactggattaagaaaatgtggcacatatacaccatggaatactatgcagacataaaaaaggatgagttcatgtcctttgtacggacacggatgaagctggaaaccatcattctcagcaaaatatcacaaggagaaaaaaaccaaacaccgcatgttctcactcataggtgggaattgaacaataagaacacatggacacaggaaggggaacatcgcacagcggggcctgttgtggggtggggcgaggggggagggatagctttaggagatatacctaatgttaagtga

SEQ ID NO: 121562 - DNA, 2748 bp, Homo sapiens
tcaattcccacctatgagtgagaatatgcggtgtttggttttttgttcttgtgatagtttactgagaatgatgatttccaatttcatccatgtccctacaaaggacatgaactcatcattttttatggctgcatagtattccatggtgtatatgtgccacattttcttaatccagtctatcattgttggacatttgggttggttccaagtctttgctattgtgaataatgccgcaataaacatacgtgtgcatgtgtctttatagcagcatgatttatagtcatttgggtatatacccagtaatgggatggctgggtcaaatggtatttctagttctagatccctgaggaatcgccacactgacttccacaatggttgaactagtttacagtcccaccaacaatgtaaaagtgttcgtatttctccacatcctctccagcacctgttgtttcctgactttttaatgattgccattctaactggtgtgagatggtatctcattgtggttttgatttgcatttctctgatggccagtgatgatgagcattttttcatgtgttttttggctgcataaatgtcttcttttgagaagtgtctgttcatgtccttcgcccactttttgatggggttgtttgtttttttcttgtaaatttggttgagttcattgtagattctggatattagccctttgtcagatgagtaggttgcgaaaattttctcccatgttgtaggttgcctgttcactctgatggtagtttcttttgctgtgcagaagctctttagtttaattagatcccatttgtcaattttgtcttttgttgccattgcttttggtgttttggacatgaagtccttgcccatgcctatgtcctgaatggtaatgcctaggttttcttctagggtttttatggttttaggtctaacgtttaaatctttaatccatcttgaattgatttttgtataaggtgtaaggaagggatccagtttcagctttctacatatggctagccagttttcccagcaccatttattaaatagggaatcctttccccatttcttgtttttctcaggtttgtcaaagatcagacagttgtaggtatgcggtgttatttctgagggctctgttctgttccattgatctatatctctgttttggtaccaataccatgctgttttggttactgtagccttgtagtaaagtttgaagtcaggtagtgtgatgcctccagctttgttcttttggcttaggattgacttggcaatgcgggctcttttttggttccatatgaagtttaaagtagttttttccaattctaatttattgagagtttttagcatgaagggttgttgaattttgtcaaaggctttttctgcatctattgagataatcatgtggtttttgtctttggttctgtttatgtgctggattacatttattgatttgcgtatattgaaccagccttgcatcccagggatgaagcccacttgatcatggtggataagctttttgatgtgctgctggattcggtttgccagtattttattgaggatttttgcatcagtgttcatcaaggatattggtctaaaattctctttttttgttgtgtctctgcccggctttggtatcagaatgatgctggcctcataaaatgagttagggaggattccctctttttctattgattggaatagtttcagaaggaatggtaccagttcctccttgtacctctggtagaattcggctgtgaatccatctggtcctggactctttttggttggtaagctattgattattgccacaatttcagctcctgttattggtctattaagagattcaacttcttcctggtttagtcttgggagagtgtatgtgtcgaggaatttatccatttcttctagattttctagtttatttgcgtagaggtgtttgtagtattctctgatggtagtttgtatttctgtgggatcggtggtgatatcccctttatcattttttattgtgtctatttgattcttctctctttttttctttattagtcttgctagtggtctatcaattttgttgatcctttcaaaaaaccagctcctggattcattgattttttgaagggttttttgtgtctctatttccttcagttctgctctgattttagttatttcttgccttctgctagcttttgaatgtgtttgctcttgcttttctagttcttttaattgtgatgttagggtgtcaattttggatctttcctgctttctcttgtgggcatttagtgctataaatttccctctacacactgctttgaatgcatcccagagattctggtatgttgtgtctttgttctcgttggtttcaaagaacatctttatttctgacttcatttcgttatgtacccagtagtcattcaggagcaggttgttcagtttccatgtagttgagtggctttgagtgagattcttaatcctgagttctagtttgattgcactgtggtctgagagatagtttgttataatttctgttcttttacatttgctgaggagagctttacttccaactatgtggtcaattttggaataggtgtggtgtggtgctgaaaaaaatgtatattctgttgatttggggtggagagttctgtagatgtctattaggtccgcttggtgcagagctgagttcaattcctgggtatccttgttgactttctgtctcgttgatctgtctaatgttgacagtggggtgttaaagtctcccat

SEQ ID NO: 121563 - DNA, 1965 bp, Homo sapiens; identical to SEQ ID NO: 120414

SEQ ID NO: 121564 - DNA, 1716 bp, Homo sapiens
ctatgggtgagaatatgcggtgtttggttttttgtgtttggttttttgttcttgcgatagtttattgagaatgatgatttccaatttcatccatgtccctacaaaggacatgaactcatccttttttatggctgcatagtattccatggtgtatatgtgccacattttcttaatccagtctatcattgttggacatttgggttggttccaagtctttgctattgtgaataatgtcacaataaacatacgtgtgcatgtctctttatagcagcatgatttataatcctttgggtatatacccagtaattggatggctgggtcaaatggtatttctagttctagatccctgaggaatcgccacactgtcttccacaatggttgaactagtttacagtcccaccaacagtgtaaaagtgttcctatttctccacatcctctccagcacctgttgtttcctgactttttaatgatcgccattctaactggtgtgagatggtatctcattgtggttttgatttgcatttctctgatggccagtgatgatgaacattttttcatgtgttttttggctgcataaatgtcttcttttgagaagtgtctgttcatgtcctttgcccactttttgatggggttgtttgtttttttcttgtaaatttgtttgagttcattgtagattctggatattagccctttgtcagatgagtaggttgcgaaaattttctcccatttcgtaggttgcctgttcactctgatggtagtttcttttgctgtgcagaagctctttagtttaattagatcccatttgtcaattttgttttttgttgccattgcttttggtgttttaaacatgaagtccttgcccatgcctatgtcctgaatggtaatgcctaggttttcttctatggtttttatggttttaggtctaatgtttaagtctttaatccatcttgaattgatttttgtataaggtgtaaggaagggatccagtttcagctttctacatatggctaaccagttctcccagaaccatttattaaatagggaatcctttccccacggcttgtttttctcaggttcatcaaagatcagatagttgtagatatgtggcgttatttctgagggctctgttctgttccattgatctatatctctgttttggtaccagtaccatgctcttttggttactgtagccttgtagtatagtgtgaagtcaggtagtgtgatgcctccagctttgttcttttggcttaggattgacttggtgatgcaggctcttttttggttccatatgaactttaaggtagttttttccaattctgtgaagaaaggcattggtagcttgatggggatggcattgaatctgtaaattaccttgggcagtatggccattttcacgatattgattcttcctacccatgagcatggaatgttcttccatttgtttgtatcctcttttatttcattgagcagcagtttgtagttctccttgaagaggtccttcacatcccttgtaagttggattcctagtattttattcagttcctccttgtacctctggtagaattcggctgtgaatccatctggtcctggactctttttggttggtaaactattgattattgccacaatttcagctcctgttattggtctattcagagatgcaacttcttcctggtttagtcttgggagagtgtatgtgtcgaagaatttatccat

SEQ ID NO: 121565 - DNA, 3300 bp, Homo sapiens; identical to SEQ ID NO: 118076

SEQ ID NO: 121566 - DNA, 2313 bp, Homo sapiens
tcaattcccatctatgagtgagaacatgtggtgtttggttttttgtccttgcgatagtttgctgagaatgatggtttccagctttatccatgtccctgcaaaggacatgaactcatccttttttatggctgcatagtattccatggtgtatatgtgccacattttcttaatccagtctatcattgatggacatttgggttggttccaagtctttgctattgtgaatagtgctgcagtaaacatacgtgtgcatgtgtctttatagcagcatgatctataatcctttgggtgtatacccagtaatgggctggctgggtcaaatggtgtttctagttctagatccctgaggaatcgccacactgacttccacaatggttgaactagtttacagtcccaccaacagtgtaaaagtcttcctatttctccacatcccctccagcaccagtcgtttcctaactttttaatgatcgccattctaactgatgtgagatggtgtctcattgtggttttgatatgcatttctctaatggccagtgatgatgagcattttttcatgtgtcttttggctgcataaatgtcttcttttgagaagtgtctgttcatatcctttgcccactttttgatggggttgtttgtttttttcttgtaaatttgtttgagttcattgtagattctggatattcgccctttgtcagatgagtagattgcaaaaattttctcccattctataggttgcctgttcactctgatggtggtttcttttgctgtgcagaagctctttagattaattagatcccatttgtcaattttggcttttgttgccattgcttttggtgttttagacataaagtccttgcccatggctatgtcctgaatggtattgcctaggttttcttctagggtttttatggttttaggtctaacatttaagtctttaatccatcttgaattaatttttgtataaggtataaggaagggatccagtttcagctttctacatatggctagccagttttcccagcaccatttattaaatagggaatcatttccccatttcttgtttttgtcaggtttgtcaaagatcagatggttgtagatatgtggcattatttctgagggctctgttctgttccattggtctatatctctgttttggtaccagtaccatgctgttttgattactgtagccttgtagtatagtttgaagtcaggtagcgtgatgcctccagctttgttcttttggcttaggattgacttggcaatgcgggctcctttttggttccatatgaactttaaagtagttttttccaattcttgggcattgaatctataaattaggattgacttggcaatgcgggctcctttttggttccatatgaactttaaagtagttttttccaattctgtgaagaaagtcattggtagcttgatggggatggcattgaatctataaattaccttgggcagtatggccattttcatgatattgattcttcctacccatgagcgtggagtgttcttccatttgtttgtatcctcttttatgtcattgagcagtggtttgtagttctccttgaagaggtccttcacgtcccttgtaagttgtattcctaggtattttattctctctgaagcaattgtgaatgggagttcactcatgatttggctctctgtttgtctgttattggtgtataagaatgcttgtgatttttgcacattgattttgtatcctgagactttgctgaaattgtctatcagcttaaggagattttgggctgagacaatggggttttctagatgtacaatcatgtcatctgcaaacagggacaatttgatttcctcttttcgtaattgaataccctttatttccttctcctgcctgattgccctggccagaacttccaacactatgttgaatagaagtggtgagagagggcatccctgtcttgtgccagttttcaaagggaatgcttccagtttttgcccattcagtacaatattggctgtggatttgtcatagatagctcttattattttgagatacgtcccatcaatacctaatttattgagagtttttagcatgaagcgttgttgaattttgtcaaaggccttttctgcatctattgagataatcatgtggtttttgtcattggttctgtttatatgctggactatgtttattgattttcgtatgttgaaccagccttgcatcccagggatgaagcccacttgatcatggtggataagctttttgatgtgctgctggattcggtttgccagtattttattgaggatttttgcatcgatgttcat

SEQ ID NO: 121567 - DNA, 2985 bp, Homo sapiens
atggttgacatccacaagccatatcacccctttacttggttgggagtctctgtgagtccatgtggtccagtgctcaggtacagcaacttcttcttagccagcagcactgtgcaagtggagctcttggtctgtggtggcagcagcagtggcagcagtgagcagggatttgtgaccatgagaacagaactaaaccaggaagaagttgaatctctgaatagaccaataacaggctctgaaattgtggcaataatcaatagtttaccaaccaaaaagagtccaggaccagatggattaacagccgaattctaccagaggtacaaggaggaactggtaccattccttctgaaactattccaatcaatagaaaaagagggaatcctccctaactcattttatgaggccagcatcattctgataccaaagccgggcagagacacaaccaaaaaagagaattttagaccaatatccttgatgaacattgatgcaaaaatcctcaataaaatactggcaaaccgaatccagcagcacatcaaaaagcttatccatcatgatcaagtgggcttcatccctgggatgcaaggctggttcaatatacgcaaatcaataaatgtaatccagcatataaacagagccaaagacaaaaaccacatgattatctcaatagatgcagaaaaagcctttgacaaaattcaacaacccttcatgctaaaaactctcaataaattaggtattgatggcacgtatttcaaaataataagagctatctatgacaaacccacagccaatatcatactgaatgggcaaaaactggaagcattccctttgaaaactggcacaagacagggatgccctctctcaccgctcctattcaacatagtgttggaagttctggccagggcaatcaggcaggagaaggaaataaagggtattcaattaggaaaagaggaagtcaaattgtccctgtttgcagacgacatgattgtttatctagaaaaccccatcatctcagcccaaaatctccttaagctgataagcaacttcagcaaagtctcaggatacaaaatcaatgtacaaaaatcacaagcattcttatacaccaacaacagacaaacagagagccaaatcatgagtgaactcccattcacaattgcttcaaagagaataaaatacctaggaatccaacttacaagggatgtgaaggacctcttcaaggagaactacaaaccactgctcaaggaaataaaagaggacacaaacaaatggaagaacattccatgctcatgggtaggaagaatcaatatcgtgaaaatggccatactgcccaaggtaatttacagattcaatgccatccccatcaagctaccaatgactttcttcacagaattggaaaaaactactttaaagttcatatggaaccaaaaaagagctcgcatcgccaagtcaatcctaagccaaaagaacaaagctggaggcatcacactacctgacttcaaactatactacaaggctacagtaaccaaaacagcatggtactggtaccaaaacagagatatagatcaatggaacagaacagagcccccagaaataatgccgcatatctacaactatctgatctttgacaaacttgagaaaaacaagcaatggggaaaggattccctatttaataaatggtgctgggaaagctggctagccatatgtagaaagctgaaactggatcccttccttacaccttatacaaaaatcaattcaagatggattaaagatttaaacgttagacctaaaaccattaaaaccctagaagaaaacctaggcattaccattcaggacataggcatgggcaaggacttcatgtccaaaacaccaaaagcaatggcaacaaaagccaaaattgacaaatgggatctaattaaactaaagagcttctgcacagcaaaagaaactaccatcagagtgaacaggcaacctacaacatgggagaaaatattcgcaacctactcatctgacaaagggctaatatccagaatctacaatgaactcaaacaaatttacaagaaaaaaacaaacaaccccatcaaaaagtgggcgaaggacatgaacagacacttctcaaaagaagacatttatgcagccaaaaaacacatgaaaaaatgctcatcatcactggccatcagagaaatgcaaatcaaaaccactatgagatatcatctcacaccagttagaatggcaatcattaaaaagtcaggaaacaacaggtgctggagaggatgtggagaaataggaacacttttacactgttggtgggactgtaaactagttcaaccattgtggaagtcagtgtggcgattcctcagggatctagaactagaaataccatttgacccagccatcccattactgggtatatacccaaatgactataaatcatgctgctataaagacacatgcacacgtatgtttattgcggcattattcacaatagcaaagacttggaaccaacccaaatgtccaacaatgatagactggattaagaaaatgtggcacatatacaccatggaatactatgcagccataaaaaatgatgagttcatgtcctttgtagggacatggatgaaattggaaaccatcattctcagtaaactatcgcaagaacaaaaaaccaaacaccgcatattctcactcatagaccgtcttgaccagcgcaacttcctcctaggttccagcggggcctttccactgtcccatgacctggctgagcgggaccaggcctctgggacaggcaaggcctctcctcacaggcaactcaacccttcacatccagcccagccctcggtggactccggaccgctgaccgccaatcacaacacagcctctgctactttcagcctgccctgcctttgggctaaggctcccccagctggccacctggaacatggcacctttcgagtgaaaagttttctgggccacagtcctgccatcaatcaataa

SEQ ID NO: 121568 - DNA, 8779 bp, Homo sapiens
tcacttaacattaggtatatctcctaaagctatccctcccccctcgccccaccccacaacaggccccgctgtgcgatgttccccttcctgtgtccatgtgttcttattgttcaattcccacctatgagtgagaacatgcggtgtttggtttttttctccttgtgatattttgctgagaatgatggtttccagcttcatccgtgtccgtacaaaggacatgaactcatccttttttatgtctgcatagtattccatggtgtatatgtgccacattttcttaatccagtctatcatcgttggacatttgggttggttccaagtctttgctattgtgaatagtgccacaataaacatatgtgtgcatgtgtcttcatagcagcatgatttataatcctttgggtatatacccagtaatgggatggctgggtcaaatggtatttctagttctagatccctgaggaatcgccacactgacttccacaatggttgaactagtttacagtcccaccaacagtgtaaaagtgttcctatttctccacatcctctccagcacctgttgtttcctgactttttaatgattgccattctaactggtgtgaggtggtatctcattgtggttttgatttgtatttctctgatggccagtgatgatgcgcattttttcatgtgtcttttggctgcataaatgtcttcttttgagaggtgtctgttcatatcctttgcccactttttgatggggttgtttgtttttttctcgtaaatttgttggagttcattgtagattctggatattagccctttgtcagatgagtagattgcaaaaattttctcccattctgtaggtggcctgttcagtctgatggtagtttcttttgctgtgcagaagctctttagtttaattagatcccatttgtcaattttggcttttgttgccattgcttctggtgttttagacatgaagtcctcgcccatgcctatgtcctgaatggtattgcctgggttttcttctagggtttttatggttttaggtctaacatttaagtctttaatccatcttgaattaatttttgtataaggtgtaaggaagggatccagtttcagctttctacatatggctagccagttttcccagcaccatttattaaatagggaatcctttccccatttcttgtttttatcaggtttgtcaaagatcagatggttgtagatatgtggcattatttctgagggctctgttctgttccattgatctatatctctgttttgataccagtaccatgctgttttcgttattgtagccttgtagtatagtttgaagtcaggtagcatgatgcctccagctttgttcttttggctgaggattgacttggcaatgcgggctcttttttggttccatatgaactttaaagtagtttttttccaattcttgggcagcatggccattttcacaatgttgactcttcctatccatgagcatggaatgttcttccaatcgtttgtgtcctcttttatttccttgagcagtggtttgtagttctccttgaagagctctttcacattccttgaaagttggattcctaggtattttattctctttgtagcaattgtgaatgggagttcactcatgatttggctctctatttgtctgatattggtatataggaatgcttgtgatttttgcacgttgattttgtatcctgagactttgctgaagttgcttatcagcttaaggagatttggggctgacatgatggggttttctaaatatacaatcatgtcatctgcaaacagggacaatttgacttcctcttttcctaattgaataccctttatttctttctcttgcctgattgccctggccagaacttccaatactatgagtgagaacatgaggggggtgggtttctggttcctgtgttagtttgctcagaatgatggtttccagcttcatccatgtccctacaaaggacatgaactcatcattttttatggctgcatagtattccatggtgtatatgtgccacattttcttaatccagtctatcgttgatgggcatttgggttggttccaggtctttgctattgtgaatagtgccgcaataaacataggtgtgcatgcgtctttatagtagcatgatttataatcttttgggtatatacccagtaatgggatctctgggttaaatggtatttctggttctagatccttgaggaattgccacactgtcttccacaatggttgaactagtttacagtcccaccaacagtgtaaaagtgttcctatttctccacatcctctccggcatctgttgtttcctgactttttaatgatcgccattctaactgctgtgagatggtatctcattgtggttttgatttgcatttctctgatggccggtgatgatgagcattttttcatgtgtctgttggctgcataaatatcttcttttgagaagtgtctgtacctatcctttgcccactttttgatggggttgtttgtttttttcttgtaaatttgtttgagttctttgtagattctggatattagccctttgtcagatgagtagattgcaaaaattttctcccattctgtaggttgcctgttcagtctgatggtagtttcttttgctgtgttttcagtcttcagataccccagcaaagaacagaagctcttgagtttaattagatcccatttgtcaattttggcttttgttgccattgcttttggtgttttggacatgaagtccttgcccatgcctatggcctgaatggtattgcctaggttttcttctagggtttttatggttttaggtctaacatttaagtctttaatccatcttgaattaatttttgtataaggtgtaaggaagggatccagtttcagctttctacatatggctagccagttttcccagcaccatttattaaatagggaatcctttccccgttgcttgtttttcttgttgtttttgtcaggtttgtcaaagatcagatagttgtagatatgcggcattatttctgagggctctattctgttccattggtctatatatctgttttggtaccagtaccatgctgttttggttactgtagccttgtagtatagtttgaagtcaggtagcgtgatgcctccagctttgttcttttggcttaggattgacttggtgatgtgggctcttttttggttccatatgaactttaaagtagttttttccaattctgtgaagaaagtcattggtagcttgatggggatggcattgaatctataaattaccttgggcagtatggccattttcacgatactgattcttcctacccatgaacatggaacgttcttccatttgtttgtatcctcttttatttcattgagcagtggtttgtagttctccttgaagaggtccttcacatcccttgtaagttggattcctaggtattttattctctttgaagcagttgtgaatgggagttcactcatgatttggctctcttgtttgtctgtgttattggtgtataagaatgcttgtgatttttgtacattgattttgtttcctgagactttgctgaagttgcttatcagcttaaggagattttgggctgagacaatagggttttctagatatacaatcatgtcatctgcaaacagggacaatttgacttcctcttttcctaattgaataccctttatttccttctcttgcctaattgcccttgccagcacttccaacaccatgttgaataggagtggtgagagagggcatccctgtcttgtgccagttttcaaagggaatgcttccagtttttgtccattcagtatgatattggctgtgggtttgtcatagatagcccttattattttgagatacgtcccatcaatacctaatttattgagagtttttagcatgaagcattgttgaattttgtcaaaggccttttctgcatctattgagataatcatgtggtttttgtctttggttctgtttatatgctggattacatttattgatttgcgtatattgaaccagccttgcatcccagggatgaagcccagttgatcatggtggataagctttttgatgtgctgctggattcggtttgccagtattttattgaggatttttgcatcaatgttcatcaaggatattggtctaaaattctcttttttggttgtgtctctgcctggctttggtatcaggatgatgctggcctcctgaaatgagttagggaggattccctctttttctattgattggaatagtttcagaaggaatggtaccagttcctccttgtacctctggtagaattcggctgtgaatccatctggtcctggactcttttttgttggtaaactattgattattgccacaatttcagagcctgttattggtctattcagagattcaacttcttcctggtttagtcttgggagggtgtatgtgtcgaggaatttatccatttctcctagattttctagtttattggcgtagaggtgtttgtagtattctctgatggtagtttgtatttctgtgggatcggtggtgatatcccctttatcattttttattgcgtctatttgatgcttctctcttttcttgtttattagtcttgctagcggtctatcaattttgttgatcctttcaaaaaaccagctcctggattcattaattttttggagggtttttttttttgtctttatttccttcagttctgctctgattttagttatttcttgccttctgctagcttttgaatgtgtttgctcttgcttttctagttcttttaattgtgatgttagggtgtcaattttggatctttcctgctttctcttgtgggcatttagtgctataaatttccctctacacactgctttgaatgtgtcccagagattctggtatgttgtgtctttgttctcgttggtttcaaagaacatctttatttctgctttcatttcgttatgtacccagtagtcattcaggagcaggttgttcagtttccatgtagttgagcagttttgagtgagtttcttaatcctgagttctagtttgattgcactgtggtctgagagacagtttgttataatttctgttcttttacatttgctgaggagagctttacttccaagtatgtggtcaattttggaataggtgtggtgtggtgctgaaaaaaatgtaaattcttttgatttggggtggagagttctgtagatgtctattaggtctgcttggtgcagagctgagttcaattcctgggtatccttgttaactttctgtcttgttgatctgtctaatgttgacagtggggtgttaaagtctcccattattattgtgtgggagtctacgtctccttgtaggtcactcaggacttgctttatgaatctgggtcctcctgtattgggtgcatatatatttaggatagttagctcttcttgttgaatagcagatgctttgttactctccacctcatgcctctgtgaacttaagtcctctgtaggtgttagatctgcatgtaaataaacgtgccaatagctatgggagctgagcaccttccagatcctcagacctcgcctagatggagccaactccttcctccactgaggagtgtggaatgttcggcagagctgggtacaacaggtttcacctctaattttggaactggaaagtgttcctttttgacaaatgtggacacccttttcgacaggtctattgcactcagtgaataattctgaagccatttggtggctgtaatctctacacatcatcttttcatgggcctgaagatttctctgtcccacctgctttctggcctccctggcctgctgctctcggcatgaatagagaagtagcactgggcctgaggattgggaccacatcatgcacatcctttcgcacacagagatatgggcgaggtgtcctgacacttggacccacagctcagctgctggctctctatgagattgaagcaagtcatgtgaatgttcgggcttccaaacgctagggcagcaacatccacagcgcctttcgcttctcacagcctctgtctctgttttaggattcttttgctccttgggcctggaattaatctggccaatccaagaaatcatctggttcttcaccagaagttcagcattcttggcaggcatttttcccttggccacagaggaaccctgtatttctctggctctggctccttccaagagatgggaatgtaatagcagcagctgaagatatgaaaataactgagcctggggaacagaaagcacttcccacgagtgcccatgtttcagcgaagacgatagtttgctgagaatgatggtttccagcttcatccatgtccctacaaaggacatgaactcatccttttttatggctgcatagtattccatggtgtatatgtgccacattttcttaatcccgtctatcattgttggacatttgggttggttccaagtctttgctattgtgaatagtgccgcaataaacatacgtgtgcatgtgtctttatagcagcatggtttataatcctctgggtatatacccagtaatgggatggctgggtcaaatggtatttctagttctagatccctgaggaattgccacaccgacttccacaatggttgaactagtttacagtcccaccaacagtgtaaaagtgttcctatttctccacatcctctccagcacctattgtttcctgactttttaatgatcaccattctaactggtgtgagatggtatctcattgtggttttgatttgcatttctctgatggccagtgatgatgagcattttttcatgtgttttttggctgcataaatgtcttcttctgagaagtgtctgttcatatcctttgcccactttttgatggggttgtttgtttttttcttgtaaatttgtttgagttcattgtagattctggatattagccctttgtcagatgagtaggttgcaaaaattttctcccattctgtaggttgcctgttcactctgatggtggtttcttttgctgtgcagaagctctttagtttaatgagatcccatttgtcaattttggcttttgttgccattgcttttggtgttttcgacatgaagtccttgcccatgcctatgtcctgaatggtattgcctaggttttcttctagggtttttatggttttaggtctaacatgtaagtctttaatccatcttgaattaatttttgtataaggtgtaaggaagggatccagtttcagctttctacatatggctagccagttttcccagcaccatttattaaatagggaatcctttccccattgcttgtttttgtcaggtttgtcaaagatcagatagttatagatatgcggcattatttctgagggctctgttctgttccattggtctatatctctgttttggtaccagtaccatgctgttttggttactgtagccttgtagtatagtttgaagtcaggtagcatgatgcctccagctttgttcttttggcttaagattgacttggcaatgtgggctcttttttggttccatatgaactttaaagtagttttttccaattctgtgaggaaagtcattggtagcttgatggggatggtgttgaatctataaattaccttgggcagtatggccattttcacgatattgattcttcctacccatgagcatggaatgttcttccatttgtttgtatcctcttttatttccttgagcagtggtttgtagttctccttgaagaggtccttcacatcccttgtaagttggattcctaggtatgttattctctttgaagtgattgtgaatgggagtccactcatgatttggctctctgtttgtctgttattggtgtataagaatgcttgtgatttttgcacattgattttgtatcctgagactttgctgaagttgctcatcagcttaaggagattttgggctgagacagtggggttttctagatatacaatcatgtcatctgcaaacagggacaatttgacttcctcttttcctaactgaatgctctttatttccttctcctgcctgattgccctggccagaacttccaacactatgttgaataggagtggtgagagagggcatccctgtcttgtgccagttttcaaagggaatgcttccagtttttgcccattcagtatgatactggctgtgggtttgtcatagatagctcttattattttgagatacgtcccatcaatacctaatttattgagagtttttagcatgaagggttgttgaattttatcaaaggccttttctgcatctattgagataatcatgtggtttttgtctttggttctgtttatatgctgttttcctgtccacagcggaaagggcttcaggatggaaggagaaaggagcttcacgcgccccactttgtccgtgagtcctcggtacaccagctccatatagtgctcccgggtgaaaaagcaaccccgagtagtcatgcttgcccctgaaaccatgtgatcctggatcagtcccgccaatggttggccatccttgggaacaaggtactgctgatcagtgcaggccaggacgtaggcctcggcccggcccagctcactctgggggaaatgggcattcatctcgtctccatcaaagtcggcattataggccttgcagttggcatagtggagccgcagcactttctcttcaggcaggatgcgggcacggtgggcctggatggagggtctgtgcagtgtgggctgtcggttcagtagcagaatgtccccattcttcacatgccggcacaccgtgatcacatgtgagtacat

SEQ ID NO: 121569 - DNA, 454 bp, Homo sapiens
gagcgggcacggcagcagcagtggcaccaagtccagcataaagaaaaaccagaacatcggctacaagctgggccaccggcgcgccctgttcgaaaagcgcaagcggctcagcgactacgcgctcatcttcggcatgttcggcatcgtggtcatggtcatcgagaccgagctgtcgtggggcgcctacgacaaggcgtcgctgtattccttagctctgaaatgccttatcagtctctccacgatcatcctgctcggtctgatcatcgtgtaccacgccagggaaatacagttgttcatggtggacaatggagcagatgactggagaatagccatgacttatgagcgtattttcttcatctgcttggaaatactggtgtgtgctattcatcccatacctgggaattatacattcacatggacggcccggcttgccttctcctatgccccatccaca

SEQ ID NO: 121570 - DNA, 800 bp, Homo sapiens
tacactgcggtggaattcacaggatgttactagcaacttccttggagcgatgtggttgatatcaatatcttttctctccattggttatggtgacatggtacctaacacatactgtggaaaaggagtctgcttacttactggaattatgggtgctggttgcacagccctggtggtagctgtagtggcaaggaagctagaacttaccaaagcagaaaaacacgtgcacaatttcatgatggatactcagctgactaaaagagtaaaaaatgcagctgccaatgtactcagggaaacatggctaatttacaaaaatacaaagctagtgaaaaagatagatcatgcaaaagtaagaaaacatcaacgaaaattcctgcaagctattcatcaattaagaagtgtaaaaatggagcagaggaaactgaatgaccaagcaaacactttggtggacttggcaaagacccagaacatcatgtatgatatgatttctgacttaaacgaaaggagtgaagacttcgagaagaggattgttaccctggaaacaaaactagagactttgattggtagcatccacgccctccctgggctcataagccagaccatcaggcagcagcagagagatttcattgaggctcagatggagagctacgacaagcacgtcacttacaatgctgagcggtcccggtcctcggccaggaggcggcggtcctctttcacagcaccaccaacttcttcagagagtagctagaagagaataagttaacccccaaaaaagactttttgccatcatatgggcaataatt

SEQ ID NO: 121571 - DNA, 2868 bp, Homo sapiens
atgtgcccgatactcagggagcacaggggaagcactgaggggaagagaagacagaaaaggctcccacttgaacttactttgaaggatgaagaggtgttagcccatcgtcaggaaatcgaggtagcaaaggccagtccaagcaaagggaacatcataattcattttggttacaaaggtgtggagtaccatgatcaacaggatgttactagcaacttccttggagcgatgtggttgatatcaataacttttctctccattggttatggtgacatggtacctaacacatactgtggaaaaggagtctgcttacttactggaattatgggtgctggttgcacagccctggtggtagctgtagtggcaaggaagctagaacttaccaaagcagaaaaacacgtgcacaatttcatgatggatactcagctgactaaaagacactgtccgtgggcagcgactattcagcccaagctatcattcttaatttccctgccaggctgcgactaccggggtgaatcagcccgcgccaggcccctttcccacccgccgctgcagttaggacttggcaaagatgctcgatatttgcgtatttgtgaccggtctttgctttgtgtctgcgctgcagcgggcaatgcagggctcaggccccgggattctccccacacgctgctgcactggcgcagtcggtcgccatactttttctccccaaagccagtgcccccgcagttacttggcgggcagccggcagcccactctcggcgggatgatctgggagaagcgggcgtgggacgagggggctgctgttttgcagccctgcgaggcgtgcagtcggagaagtggtcggggttccacaccgtccctgagcctgcccccggccaaggtgatgtcatgcccattgttttggtgcgcccaaccaatcggactcgccgcctggattctaccggagccggcatgggcccttcctcgcaccagcagcaggagtccccgctcccgaccataacgcattgcgcagggtgcaccaccgcttggtctccctgcagctttaacagccctgacatggaaaccccattgcagttccagcgcggcttcttcccagagcagccgccgccgccgccgcgctcctcacacctgcattgccagcagcagcaacagagccaggacaagccgtgcccgcccttcgcgcccctcccgcaccctcaccaccacccgcacctcgcgcaccagcagccggccagcggcggcagcagcccatgcctccggtgcaacagctgcgcctcctccggtgccccggcggcgggggcgggagataacctgtccctgctgctccgcacctcctcgcccggcggcgccttccggacccgcacctcctcgccgctgtcgggctcgtcctgctgctgctgctgctgctcgtcgcgccggggcagccagctcaatgtgagcgagctgacgccgtccagccatgccagtgcgctccggcagcagtacgcgcagcagtccgcgcagcagtcggcgtccgcctcccagtaccaccagtgccacagcctgcagcccgccgccagccccacgggcagcctcggcagtctgggctccgggcccccgctctcgcaccaccaccaccacccgcacccggcgcaccaccagcaccaccagccccaggcgcgccgcgagagcaaccccttcaccgaaatagccatgagcagctgcaggtacaacgggggcgtcatgcggccgctcagcaacttgagcgcgtcccgccggaacctgcacgagatggactcagaggcgcagcccctgcagccccccgcgtctgtcggaggaggtggcggcgcgtcctccccgtctgcagccgctgccgccgccgccgctgtttcgtcctcagcccccgagatcgtggtgtctaagcccgagcacaacaactccaacaacctggcgctctatggaaccggcggcggaggcagcactggaggaggcggcggcggtggcgggagcgggcacggcagcagcagtggcaccaagtccagcaaaaagaaaaaccagaacatcggctacaagctgggccaccggcgcgccctgttcgaaaagcgcaagcggctcagcgactacgcgctcatcttcggcatgttcggcatcgtggtcatggtcatcgagaccgagctgtcgtggggcgcctacgacaagcctggaacagcggcgctcgcttcggtcctctatggcgtggacccagcagcccagccacgcgtcttcccagtctttccaggtctactctcgtctcttttggttttgaggccgagtgatctgacagatcacagagccaagacaggcgtcgctgtattccttagctctgaaatgccttatcagtctctccacgatcatcctgctcggtctgatcatcgtgtaccacgccagggaaatacaggaaaagtaagtgttatagctgactttctggctctatgtcctctggaattgcttaatgaagcaagaggaggccctgacattttcatggagaaccttggaaagcagatccgtgtgaccttttataaaatgtttatacacactctggcaaaacaagatggttcagagttggcttttcagagatggctctatagctctataatcggaagaacagtaatgaaaatttctcttcattcgtgcaccaaggccacagaaaacaggaaagaagaccacacggaacactcagtgggcctgcatctgctctgcagcatttacccagcagcaagaggtctcctctgcactagtgtgcaagaacacaggtggctgcagcaaggtgatcagtgtgatggaggaaaaagtttgccagcccctgagttagagaagtggatggtcagcaaaggcaagaagaaacatggctga

SEQ ID NO: 121572 - DNA, 582 bp, Homo sapiens
atggagatgactccaggtgcaggatctttggctgctggtggggacctgaccatgggaacagggatggccacagggagccaaggtggaaggcaattacaggagaaatgcttgacaatctattttcccttaataatgagaatggtggtgacttggactacaatggcagctgaggaggtaaaaaatgcagctgccaatgtactcagggaaacatggctaatttacaaaaatacaaagctagtgaaaaagatagatcatgcaaaagtaagaaaacatcaacgaaaattcctgcaagctattcatcaacttgctcttaattctatatggagaagagcagatatggtcacatctgtggctcagaaaagtagctttccttatgaaacctacgagggtagtaatggaaagttgttcatggtggacaatggagcagatgactggagaatagccatgacttatgagcgtattttcttcatctgcttggaaatactggtttgtaatgctgtgttagggggcaaattggggatggaaaggaaaagagagagcaaaggtgaccttgctgggttttatgaccgtccacagtcatga

SEQ ID NO: 121573 - DNA, 1186 bp, Homo sapiens
atgagctctgccaatcggtccatcctggaagtaccacaccttgatatcctcctccaagagctgcctggggtgagcaaggtggtgaccgtggaagtgagagggaactggcagcgctggctgaaggtgcgggacctcaccaagggagtgacctatttcttccgtgtccaagcgcggaccatcacctacgggcccgagctccaagccaatatcacagccgggccagccgagggatccccgggctcgcctagagatgtcctggtcaccaagtccgcctctgaactgacgctgcagtggactgagggacactctggcgacacacctaccacgggctatgtgatcgaggcccggccctcagtctttggcaacgggagttttcaagtgagtaaggaagaaaatcagtatttctctgaaggtttgacatccatagaagttccaagtcagcaggttcagcaagagggggctgttgccatggctctgatggtgcccgatgaaggcttatgggacatgtttgtgaaggacatcccgcggagcgccacatcctacaccctcagcctggataagctccggcaaggagtgacttacgagttccgggtggtggctgtgaatgaggcgggctacggggagcccagcaacccctccacggctgtgtcagctcaagtggaagccccattctacgaggagtggtggttcctcctggtgatggctctgtccagcctgatcgtcatcctgctggctggtgttcgccctcgtcctgcacgggcagaataagaagtataagaactgcagcacacgacaggggatctccaccatggaggagtctgtgaccctggacaacggaggatttgctgccctggagctcagcagccgccacctcaatgtcaagagcaccttctccaagaagaacgggaccaggtccccaccccggcctagccccggcggcctgcactactcagacgaggacatctgcaacaagtacaacggcgccgtgctgaccgagagcgtgagcctcaaggagaagtcggcagatgcatcagaatctgaggtcagtgtcggtgcctacttccgggcagtgaccatcagcccctacttctgcaaggatgccgggtttgctgtccgcaccatagccttgggcttggcagaaacagcaggcagcaaagcagatgctcggaaagggacatttgtctaa

SEQ ID NO: 121574 - DNA, 1350 bp, Homo sapiens
atgagctctgccaatcggtccatcctggaagtaccacaccttgatatcctcctccaagagctgcctggggtgagcaaggtggtgaccgtggaagtgagagggaactggcagcgctggctgaaggtgcgggacctcaccaagggagtgacctatttcttccgtgtccaagcgcggaccatcacctacgggcccgagctccaagccaatatcacagccgggccagccgagggatccccgggctcgcctagagatgtcctggtcaccaagtccgcctctgaactgacgctgcagtggactgagggacactctggcgacacacctaccacgggctatgtgatcgaggcccggccctcagtctttggcaacgggagttttcaagtgagtaaggaagaaaatcagtatttctctgaaggtttgacatccatagaagttccaagtcagcaggttcagcaagagggggctgttgccatggctctgatggtgcccgatgaaggcttatgggacatgtttgtgaaggacatcccgcggagcgccacatcctacaccctcagcctggataagctccggcaaggagtgacttacgagttccgggtggtggctgtgaatgaggcgggctacggggagcccagcaacccctccacggctgtgtcagaccggctgcaagccagggcgctggggggttcagagagggatgggctgtgtttgaggagaggggatctcagcagcatgaagggcagggaggcctcggcgttggggcagcagagcctcagccagaagccccaggagtttggaggaacgaccctgtgctcgtctgtggctcaagtggaagccccattctacgaggagtggtggttcctcctggtgatggctctgtccagcctgatcgtcatcctgctggtggtgttcgccctcgtcctgcacgggcagaataagaagtataagaactgcagcacaggaaaggggatctccaccatggaggagtctgtgaccctggacaacggaggatttgctgccctggagctcagcagccgccacctcaatgtcaagagcaccttctccaagaagaacgggaccaggtccccaccccggcctagccccggcggcctgcactactcagacgaggacatctgcaacaagtacaacggcgccgtgctgaccgagagcgtgagcctcaaggagaagtcggcagatgcatcagaatctgaggtcagtgtcggtgcctacttccgggcagtgaccatcagcccctacttctgcaaggatgccgggtttgctgtccgcaccatagccttgggcttggcagaaacagcaggcagcaaagcagatgctcggaaagggacatttgtctaa

SEQ ID NO: 121575 - DNA, 1062 bp, Homo sapiens
atgtcgctgacttcaggagtgaagctgcagaccttcgctgtagtgttacagctcttaaaggcgggcgtctggagttgttccttccttccgtgggtttgtcatcccgctggcttcaggagtgaagctgcagaccttcttgtgagtgttacagctcataaaggcggcatggacccaaagagtgagcagcacaagatttattgccaagagcaaaagaataaagcttccaccgcacagaagggacccaagcgggttgccactactggctccggaagcctgctttttcccttatctggccctacccacatcctgctgattggtccattttacagagagctattggtccgttttgacaggactctatacagaatcatcagtgccgctgatacttctaatactcttttatttgatggatcacaaacaggacagcttgtaccacagcttgaacctgatgcagagaggtcttttgcccaagacccactcaacattggcagccttatgggttacctgataaatggcgtattgcaagtccacacctgccgttggtctccgtgttacggtttagtcgctgtcacgtctgtcgctcatatgttacacgttttgcataggtgccccttcgcacctgtcggtcggttcgcttatcatcgcgacttcgttcatcgtttcgaaccgcccgtgccgggcgccctatgtagacaccatctatcgtctcccctccccccttcgtttggccggtcaccgcacccttccattgaagccatcgttccctcgccgctctcctcctcttctttattatccctcacccaggccccccgctcactaccccctctcaccctcatccgagccaaatcggcgctatacgatggctttaacagctgtcccgtatccttatacttccccgcttcaggccttcccgtttctgcacagtcggatcccccaattgcaactctttctcctaaccaacagttttacttccagaaccccagtcgagcccgttcaagttttggagatcctgtcacagtggaaagcaacaacaaagtggcactacgggtagctgcgaaataa

SEQ ID NO: 121576 - DNA, 753 bp, Homo sapiens
tcactgaccaggaatgaagccacggaccctcgcagtgagtgttacagttcttatagatggtgtgtctggagtctcttccttctgatgttgggacatgtcgctgacttcaggagtgaagctgcagaccttcgctgtgagtgttacagctcttaaaggcgggcgtctggagttgttccttccttccggtgggtttgtcatcccgctggcttcaggagtgaagctgcagaccttcttggtgagtgttacagctatatgatttttttccttcagaaatacttcccatcctgcttccaggacaccaaacactcttaattcttctgttttacaggtggtcttattaatgccttgtagttctctgattcccatctgtacttttgtagcatggagggtccgatccagggcttcctttatacttcgggaacccgtccagctgcgcgtgaaccggaaatcgtcgataccgcgaacttcctgattacgctgggtgcgaaaattagcggtcagggcaccgatcgtatcgcttgggtccatcataggaatataccagcgtagtataaagtgctcaattggtacatccgctttagaacataatgatcggcatgaaagatcgggtacgtacatcgtaccttgagtgagagcactagtaccgcccatgtcttcggaattattactggccatctccccatagataagacgctctttgatattcttctcataatgtggcctatttttactgctcttgctttggtttggcat

SEQ ID NO: 121577 - DNA, 507 bp, Homo sapiens
  misc_feature (1)...(507): n = a,t,c or g
atggctatagcacttgtgactggtggcagtcgcggcatcgggcgggcaactgcattactgttggcgcaagaagggtatacggtggcggttaattatcagcaaaacctccacgcggcgcaagaagtgatgaacttaataacgcaagccggtggcaaagcattcgtgctccatgcggatatcagcgacgaaaaccaggtcgttgcgatgtttacagcaatcgatcagcacgatgaaccgctagcaacgctggtcaataacgccgggatcttgtttacccagtgcaccgttgaaaaccttaccgcagagcgaatcaaccgagtactttccaccaacgtgacgggatattttctctgctgcggggngcataaaaccatgaccctgggctgtaccgtacaagcctgcggcttacactatcccatggatgactcgaataaatcggctttgatgagctgggctttagccccgatcaaccctaaaaactatgccgttttgcagaaaaagagctga

SEQ ID NO: 121578 - DNA, 350 bp, Homo sapiens
ggatacatgtgatccgaattcactatcgtatgtcatatagtatcctggcctttacgcttagcgcagaccgaagccataggcgctctaaatggcgtaaggatgtgggcattcaacaggtggtgcattccaacaaggtggccttggattacatgcagggtgattacgacttaaaccgtaacacgttacgtacaatgataacgacagcttggtacagtgcacttggcatccctatcgatagctcggggaagttagttaattacccgccaaatggcaaataccttctcaatcgtaaaagggacaacttagagcactgcaagctagcagctggacgtcacatgtggtacccctga

SEQ ID NO: 121579 - DNA, 2145 bp, Homo sapiens
atgttaatccaggccgaacgtccggtgattgttgccgggggcggggtaattaatgctgacgcagctgctctgttacaacaggttgctgaactgaccagcgttccggtgatcccaacgctaatgggctggggctgtatcccggacgatcatgaactgatggccgggatggtgggtctgcaaaccgggcatcgttacgagaaatacaccgaagggcgcaaaatcgttcatattgatattgagccgacgcaaattggtcgcgtgctgtgtccggatctcggtattgtctctgatgctaaagcggcgctgacactgctggttgaagtggcgcaggagatgcaaaaagcgggtcgtctgccgtgtcgtaaagaatgggtcgccgactgccagcagcgtaaacgcactttgctgcgcaaaacccacttcgacaacgtgccggtgaaaccgcagcgcgtgtatgaagagatgaacaaagcctttggtcgcgatgtttgttatgtcaccaccattggtctgtcacaaatcgctgcggcacaaatgctgcatgtctttaaagaccgccactggatcaactgtggtcaggctggtccgttaggctggacgattccggctgcgctaggggtttgtgccgctgatccgaaacgcaatgtggtggcgatttctggcgactttgacttccagttcctgattgaagagttagctgttggcgcgcagttcaacattccgtacatccatgtgctggtcaacagacctgcagcgaatggagctcaggggtcatgtcaccctgacgcgccggcggttttccgctcatctatcttcatacgaaaaagcgaagaaaaacttgtggtcacaatgaatgaattgagtgcgtcacgagcgttaccagaggaaaccatgcccggacgctttgaactaaaaccaaccctggagaaagtcttgcacgcgccggacaattttctcttcatggaccctctgccgccgatgcatcgtcgggggatcattattgccgccattgtattggcggtcggatttctgcttccatctgatgatacgcccaacgcgccggtggtgacgcgtgaagcgcagttagatattcagtcgcaatcacaaccgccgacagaagaacagctgcgggcgcaattagttaccccacaaaatgatcctgatcagaacctatacaggaaggccagccagaagagcagccgcaaactacccaaacgggacttaccccacatccttacgccatttagagcgcctatggcttcggtctgcgctaagcgtaaaggccaggttctacatcagcagtactcacttaagaaataccgctacaagcacatcgcggataacgtctgtcaatggttggatgaggtttttctccgaccaaaagaaatgtctgatattcataaactgacattcattgaaaagcgagaacgactaaagaattcggtcttcaaatcgctccatgacgtcaggactgtagaggatccaagtggtactcagctcgaagtcgtctcaaataacccgtgggatccgaagcgtcagttgctgaaatgggacggcactaagtggaccggctgggatattccggactacagcgcagcgcctccggaggccgtgccgtcgttgaataatccacaaacattcagcgagcagaagctggatgaggcgttatatcacggcgcggtcctgcgcgtgcgcccgaaagcgatgacggtggcggtgattatcgccggtctgctgccgattctgtggggaacgggggctggttcagaggtgatgagccggattgccgcgcctatgattggcggcatgatcaccgcacctttgctgtcgctgtttattatcccggcggcgtataagctgatgtggctgcaccgacatcggtggttaaagtgcaaatcggctcggcgaccacaatatcaaagcggctatacggatgatcggcatagccggagtgtaaaagcatcgcccacggcaggtttaccttcactcacccatgaacagcagcaaaaagctgtcgagcggatccaggaactgatggcacaagggatgagcagcggccaggcaatcgcgctggtggcagaagagctgcgtgccaaccactccggcgagcgaatcgtggcgcgttttgaggatgaagacgagtaa

SEQ ID NO: 121580 - DNA, 1063 bp, Homo sapiens
atgtttatccatttatcagtgcaaggacatgtggatgatttccaggttaaggtgaatatggatagaaccaacataaatattcgtgtacagatttgtttctgtgaatttaagtctttagttctcttagataagccaggtcgacaggaactcatcgatgacctcaacaaacgcacagacaattttttaacagactcaggtataagcgtttcagattggatcgatgcggctacatgggaagtgttttcatccctgcgcgaactggaacttctagggatcaagaacatacggctggcctcccaagatctacatggggtcattctcagttccgaaaccgtcgccgaagacatttggtgccgcatccttgatactgtgacgcgcaagggcgagcattctcgacgcattcacagtgctgatgacaagtcctacttacgaccagacctacttgagtggttcaagcagcgtgtcgaagatgaccaatctcggtcaggccgcaaaatctacgtcaaacgggacttaccccacatccttacgccatttagagcgcctatggcttcggtctgcgctaagcgtaaaggccaggttctacatcagcagtactcacttaagaaataccgctacaagcacatcgcggataacgtctgtcaatggttggatgaggtttttctccgaccaaaagaaatgtctgatattcataaactgacattcattgaaaagcgagaacgactaaagaattccgtcttcaaatcgctccatgacgtcagcgaatttttgggtcgagtgctgttgcacgcaactgatccggcagcaccacgaaagccagcctattccttgcatgctatacgtggaaaaagcaggggccgaaaaaattcttgaaaacgtgcatatcgttcgccgcgatccagaaggtgatcagctttggattggcttcagcgagttggtgactgatattaacattgccgtcagattgccggagatacggtatcagttgtacgaggacatttcggattgcatcgataccgcgcgcaaaaaaatcctcgacattaaagacgataactacctgctt

SEQ ID NO: 121581 - DNA, 180 bp, Homo sapiens
atgccgcgcgttaacatcggcttactgcatctgttgctgcaacatacctccgcctctctgacacttaatgagaactgcgatcccaccgtacgccacgacatggagcgttttttcctccgcacggttcccgacaacggaaattatgaggacctgcaggcatgcaagtttagacgcaattaa

SEQ ID NO: 121582 - DNA, 402 bp, Homo sapiens
atgtttgatgtccagatcatggcacaaacgctggtgaacggagccgatagcttctccctgctggcgattccgttctttgtgctggcgggtgaaatcatgaatgcgggcggcttgtcaaaacgcattgttgaccagccgatgaaactgataaccctcagactatcctgtcgtcatggaagtgatatcgcggaaggaaaatacgatatgagtcgtctggcggcctttctcggtccaagatgtcggttcctaatcccaaaagtattgtgtcaaggtttccaaacaatgacgactggatgtggagagccagaacctggaaatgccaatgggcacagacaaaaagccccaacaggagcctgccctctagtcaataagccaagaggacagaaaagtttcagacagtaa

SEQ ID NO: 121583 - DNA, 405 bp, Homo sapiens
ctactcatcttgctcaggatctggctctgaaggggctacgtgttttgctcgtggggggtaacgacccccagggaacagcctcaatgtatcacggatgggtaccagatcttcatattcatgcagaagacactctcctgcctttctatcgtctttcattgccatacggaactccggatgagcattcatcaggcgggcaagaatgtgaataaaggccggataaaacttgtgcttatttttctttacggtctttaaaaagccgtaatatccagctgaacggtcaactaaatttgaccatcggtaccttgggtgtttgcgaagcatcagaatgcggagacggtctttagcctcttcaatattaagtggaagatttagtatgtgcctttcctgtttagctttatcattcat

SEQ ID NO: 121584 - DNA, 309 bp, Homo sapiens
tcagtcggcgtgaaggcgatcgataaagtgcgagagaactcgcagatgattgcccgttcggcaaccatcctcgggatcacggtaatcggcgggctgatcgcttcgtatgtgcatattaacgtggtgacatcgtttgccatcgacaatacccacagcgttgcgctgcagcaggatttcttcgataaagtcttcccgaacattctctgtagttttggcctgctctctttgcttgctcctctcgtagcagaattcttctttcctcttgagactgtcctctctgtccaggtttaggacctggaagtcagccat

SEQ ID NO: 121585 - DNA, 516 bp, Homo sapiens
tgatttgcagaatgatgaagttgcatttagaaaattaaagctgattattgaagatgttcagggcaaaagctacctgacgaacttccatggcatgaatcttacccatgacaaaatgtgttccatggtcaaaaaatggcagacagtgatcgaagctcatgttgatgtcaagactaccaatggttacttgctttgtctgttctgtgttggttttactaaaaaatgcaacaatcaaatatggaagaagatcttgttttgacaacaggcatcatttcccacctccatgagcctttcttggtggtaacagactatgaccagtaataggtttccatttctgcacccagttgggggtgatattaaaattacttaataatctgttagcatgaacatgaacaactgtattgttactcacagctttcattaccccttgtagctcccttgacccgggcaacacagtgccctcatcaaaccttccgctaggttgtgtcatatgaagagtgtgatgtttgatgcacgatg

SEQ ID NO: 121586 - DNA, 1188 bp, Homo sapiens
atggagttttcaggacagccatggcagtcatgctatggctgtgtccagaatccagtgctagtgatattggcagtacaaactgaagtacttagtgcatatgtcagtaatgatgatattggtgttccaagcagaccacttctgctggattattttaagtattgtttctgcctgcatagcttcactcttcacaatagcaaagacatggagtcaacccaaatgaccatcaatgatagactggataaagaaaatgtggtacatatacaccatggaatactatgcagctgtaaaagagaaagagatcgtgtcttttgcagggacatgaatggaacccataatcctcagcaaactaacacaggaagagaaaaccaaacaccgcctattctaagtgggagcaccatggcggttttttttgaacaagctttcttacgacaggcggcaaaaagggatctcaagaagaaagtggttgatccattttctaagaaagattgttgtaatatgtaaagcaccctgctatgttcaatataagaaatattggaaaagacgttgggtcccccaggacccaaggaaccaaaattgcatcctgatggtctcaagggtccgtgtgtttgaaagtgagtcttgctgatttgcagcatgatgaagttgcatttagaaaattcaagctgattacttgaagatgttcagggtaaaaactgcctgactaacttccatggcatggatcttaccccgtgacaaaattgtgttccatggtcaaaaaatgggcagacaatgatttgaagctcaccgttgatgtcaagactacccgatgggttacttgcttcgtctgttctgtgttgggttttactaaaaaacgcaacaatcagatagggaagcctttttaggctcagccaccacagggtccgccaaatcgggaagaagatgatggaaatcatgacccgagaggtgcagacaaatgacttgaaagaagtggtcaataaattgattccagacagcattggaaaagacatagaaaaggcttgccaatctatttatcctctccatgatgtcttcgttagaaaagtaaaaatgctgaagaagcccaagtttgaattgggaaagctcatggagcttcatggtgaaggcagtagttctggaaaagccactggggacgagacaggtgctaaagttgaacgagctgatggatatgaa

SEQ ID NO: 121587 - DNA, 1143 bp, Homo sapiens
atggaggaaggcgaaggggaagcagacacttcttacaccgccggagcaggagaaacagagagagagcggggaagtgacagccgcagccgggctctcagccagcggccaggcgccccgcggaccatgctctccagtacgcagaacgcgggcggctcctatcagcgggtccgcggggcgcttgatacacaggagtggaagtggggagaggtgagtcctcgaaccctgaacgtggacggacgagcccttgtttcagtagccaacacacacgggacagacagaccggcgtacacactcaatcctcagagcagagatcagagatcaggagtaattactttaggctataagagacctttggaaagagaggatctttttgaactaaaggaaagtgattccttctgcactgcgtgtcccatctttgaaaaacaatggagaaaggaagttttaaggaatcaagagaggcaaaaagtaaaggccctcaacaaattggatgaggcactatgccctgggatcatccttactcagtctactgattcaaatgctaatctcttccagaaacagcctcacagacacacccagacatctggtagatggcaaattatcattttctgtgaacacagctcaaattttggctggaatggctatggctatgcagtggcacttcttgttgtagtctttttgcaaactctgattcttcagcaatatcaacgttttaacatgctcacctcagcaaaagttaagacagctgtaaatggactgatctacaaaaagctaggatggtcaggaaaagtgtcatggttaatattgcatgatgtgggtcatggaataatggaaggatacattgcatggggtaaaggctctgatgttagaataacttgggagaaaaaaagtacagaaatgcgtacaaggcctgctcagaaaatggccttacttttatcaaatgtttctcgacaaaagttttccactggggaaattattaacttgatgtcagcaactcatggacttgacagcaaacctcaatctcctctgagagagttacaaatggaagtcatcgaattttatcatttacttattcactcaaccagtattgaacaagcatgtatcttatgtcagccagtgtttcaggcacaggaagtacagcagtga

SEQ ID NO: 121588 - DNA, 410 bp, Homo sapiens
tcacaaagatcctggattcaaggaaatctgatgtttttctctgtttttttttccaattgtaatgtcggcaaagtcactgaactctctcggccttgtctcctcctctgtgaccgtgctggcgctgaactgactgtccgctgccaagggaagtgacagccgcagccgggctctcagccagcggccaggcgccccgcggaccatgctctccagtacgcagaacgcgggcggctcctatcagcgggtccgcggggcgcttgatacacagaaatgcagtccagagaaaagtgcctcatttttcagtaaagtgacatattcctgggttagcagagtaattactttaggctataagagacctttggaaagagaggatctttttgaactaaaggaaagtgatccttctgcactgcgtg

SEQ ID NO: 121589 - DNA, 864 bp, Homo sapiens
atgacggactacctgatcaggggcggcaccgactatgtgcccgataactggctccccgcgcagcagctctttgccagcgccgactgcctcacctacgacgacttcctgattctcccaggattcacagacttcatagctgatgaggcggacctgacctcagccctgacccggaagatcacgctgaagactccgctcatttcctcccccacggacactgccgacatagccattgcaatggctctgatgggaggtattggtttcattcaccacaactgcaccccagagttccaggccaaggaggtgcggaaggtcaagaagtttgaacagggcttcatcacggacccggtggtgctgaccccctcgcacactgtgggtgatgtgttggaggccaagatgcggcatggcttctctggcatccccatcactgagacgggcaccataggcagcaagctgaagaacagagactaccctctggcctccaaggattcccacaagcagctactgcgtggggcagctgtgggcacccctgaggatgacaaataccgcctggacttgctcacccaggcgggggtagacgtcgtagtcttggacttgtcccaagggaactcggtgtatcagattgccacggtgcattacatcaaacagaagtacccccacctccaggtgattgggatgacagccgcccaggccaaaaacctgattgacgctgcggtggacgggctgcgcataggtatgggctgcggctccatctgcatcacccaggaagtgatggcctgcggtgggccccagggcactgcattgtacaaggtggccgagtatgccctgtgctttggtgtgtccatcatagccgatggcggcatctag

SEQ ID NO: 121590 - DNA, 621 bp, Homo sapiens
atgtgggaaattttggaacttcctagggacttgttgaatggctttgcccaaaatgctgatagcaatatggacaataaagtccaggctgaggtggccttggatggaaatggggaacttgttgggtactacagcaaagcctccgctggtgatacccaggcaaacagggtctggagtggacctccagcaaactccaacagacctgcagctgagggacctgaaaggaataccatcaacatcaacaaaaaggacatcaacaccaaaaccccatctgtaggtcaccgacatcaaagaccaaaggtagataaaaccacaaagacaaggagaaacaagagcagaaaagctgaaaattctaaaaaccagagtgcctcttatcttccaaaggactgcagctcttcgtcagcgatgaaacaaagctggatggagaatgactttgacgagttgacagaaggagccttcagaaggtcggtaataacaaacttctctgagctaaaggaggatgttcaaacccatcacaaggaagctaaaaaccttgaaaaaagattagataaatggctaactagaataaacagtgtagagaagaccttaaatgacctgatggagaatggcatgggaaatacgtga

SEQ ID NO: 121591 - DNA, 1629 bp, Homo sapiens
ttattttgagatatgtcccatcaataccttgagagtttttagcacgaagtgttgttgaattttgtcaaaggccttttctgcatctattgagataatcatatggtttttgtcattggttctgtttatatgtttgattatgtttattgatttgcatatgttgaaccagccttgcatcccagggatgaagcccacttgatcatggtggataagctttttgatgtgctgctggattcgatttgccagtattttattgaggatttttgcatcaatgttcatcagggatattgccctaaaattctctttttctgttgtgtctgtgccaggctttggtatcaggatgatgctggcctcataaaatgagttagggaggattccctctttttctattgattggaatagtttcagaaggaatggtgccagttcctccttgtacctctggtagaattcggccttgaatccatctggtcctggactttttttggttggtatgctattaattattgcctcaatttcagatcctgttattggtctattcagagactcaacttcttcctggtttagtcttgggagggtgtatgtgttgaggaatttatccgcttcttctagattttctagtttatttgtgtagaggtgtttatagtattctctgatggtagtttgtatttctttctctctggctgcccttaacattttttccttcatttcaactttggtgaatctgacaattatgtgtcttggagttgctcttctggaggagtatctttgtggcgttctctgtatttcctgaatttgaatgtttgcctgcgttgctagattggggaagttctcctgtataatatcttctttgccatgggttcgaacttcctcctttagctcggagtagtttgatcgtctgaagccttcttctctgaactcgtcaaagtcattctccatcctgctttgttccgttgctgatgaggagctgcgttcctttggtcttggtgatggtgacgtacagatggggttttggtgtggatgtcctttctgttggttagttttccttctaacagtcaggatcctcagctgcagatctgttggagtttgctggaggtccactccagaccctgtttgcctgggtatcagcagcggaggttgccctgaattatttcttggatgagaatctaagaaccctttcttggggtctggattgggacccctttctggtaacagaagtgatgttgtgctgattttgctgctatcctttcgcaggactggcaacgcctgcttcctcctctgagctgtcaagtaggaagtccgggctgctctgtctgcccttgactgtgtgcagccctgttctgggtgagactccttcttccaggcaggtagacacagtctcctgtgcagacaaaacccactcccatcactaccagaggagggggctttctgcccacccagcccttccctgtaattctgcaaaggcagttctgtcctgagtaacttgtggctttcatgggaagctaagaagacgtgccttgaggatcctttcgtgtctctgcagagagcagtattctttaacgggctccctgaggagcacagagtacttgcaagccagtgaacaggaatgagaaaatttccaagagaattgtccat

SEQ ID NO: 121592 - DNA, 969 bp, Homo sapiens
ttacgatttggcctgtttttgcagtggctggtacgggttgttcctttccgtgtttagtgcttccttcaggagctcttttagggcaggcctggtggtgacaaaatctctcagcatttgcttgtctgtaaaggattttatttctccttcacttatgaggcttagtttggctggatatgaaattctgggttgaaaactcttttctttcagaatgttgaatattggtccccactctcttctgacttgtagagtttctgctgagagatccgctgttagtctgatgggcttccctttgtgggtaacccgacctttctctctggctgcccttaaaattttttccttcatttcaacttggtgaatctgacaattatgtgtcttggagttgctcttctcgaggagtatctttgtggcattctgtgtatttcctgaatttgaatgctggcctgtcttgctaggttggggaagttctcctggataatatcctttggtctttgatgatggtgacgtacagatggggttttgctgtggatgtcctttctgtttgttagttttccttctaacagtcaggaccctcagctgcaggtctgttggagcttgctggaggtccactccagaccctgtttgcctgggtatcagcagcagaggcagttctaggagttttttggatgagtctttagggttttctaggtatacggtcatatcttcagcaaaaagcaacagtttgacttcctctttacccatttggatgcccttgatttctttctcttgtttgattgctctcgctagaacttctgataatgtgttgaatagaaatggtgaaaatgggcatccttgtgttgttccagttctcaggaggaatgctttcaacttttccccattcagtataatgttggctgtgggtttgtcatagatggcttttattaccttaaggtatgtcccttctatgcctattttgctgagggttttgatcat

SEQ ID NO: 121593 - DNA, 1326 bp, Homo sapiens
cctccgctgctgataccaaggcaaacaggatctggagtggacctccagcaaactccaacagacctgcagctgagggtcctcactgttagaaggaaaactaacaaacagaaaggacatccacaccaaaactccatctgtacgtcaccatcatcaaagaccaaagactttaaaccaacaaagatcaaaagagacaaagaaggccactacataatggtaaagggatcaattcaacaagaagagctaactatcctaaatatatatacacccaatacaggagcacccagattcataaagcaagtccttagagacctacaaagagacttagactcccatacaataatagtgggagactttaacaccccactgtcaacattagacagttcaaagagacagaaggttgacaaggatatccaggaattgaactcagctctgtaccaagcagacctaacagacatctacagaactctccaccccaaatcaacagaatatacatttttttcagcaccacaccacacctattccaaaattgaccacatagttggaagtaaagcactcctcagcaaatgtaacagaacagaaattataacaaactgtctctcagaccacagtgcaatcagactagaactcaggattaagaaactcactgaaaaccgctcaactacatggaaactgaacaacctgctcctgaaagactactgggtacataacgaaatgaaggcagaaataaagatgttctttgaaaccaatgagaacaaagacacaacataccagaatctctgggacacaggcaaagctgcgtgtagagggatatttatagcaataaatgcccacaagagaaaccagaaaagatctaaaatggacaccctaacatcacaattaaaagaattagagaagcaagagcaaagacattcaaaagctagcagaagactaaaccaggaagaagttgaatctctgaataaaccaagaacaggctctgaaattgaggcaataattaacagcttaccaaccaaaaaaagtccaggagcagatggattcacagccgaattctaccagaggtacaaggaggagctgggaccattccttctgaaactattccaatcaatagaaaaagagggaatactccctaactcattttatgaggccagcatcatcctgataccaaagcctgacagagacacaacaaaaaaagagaattttaggccaatatgcctgatgaacatccatgcaaaaatcatcaataaaatactggcaaaccaaatccagcagcacatcaaaaagcttatccaccatgatcaagtgggcttcatccctaggatgcaaggctag

SEQ ID NO: 121594 - DNA, 2835 bp, Homo sapiens
atggatgaattcctcaacacatacaccctcccaagactaaaccaggaagaagttgaatctctgaatagaccaataacaggctctgaaattgtggcaataatcaatagcttaccaagaaaaaagagtccaggaccagatggattcacagccgaattctatcagaggtacaaggaggaactagtaccattccttctgaaactattccaatcaatagaaaaagagggaatcctccctaactcattttatgaggccagcatcatcctgataccaaagccaggcagagacacaaccataaaagagaattttagaccaatatccttgatgaacattgatgcaaaaatcctcaataaaataatactggcaaaccgaatccagcagcacatcaaaaagcttatccaccatgatcaagtgggcttcatccctgggatgcaaggctggttcaatatacgcaaatcaataaatgtaatccagcatataaacagaaccaaagacaaaaaccacatgattatctcaacagatgcagaaaaggcctttgacaaaattcaacaacccttcatgctaaaaactctcaagaaatttggtattgatgggacgtatctcaaaataagaataaaatacctaggaatccaacttacaagggatgtgaaggacctcttcaaggagaactacaagccactgctcaatgaaataaaagaggatacaaagaaatggaagaacattccatgctcatgggtaggaagaatcaacatcatgaaaatggccatactgcccaaggtaatttatagattcaatgccatccccatcaagctaccaatgactttcctcacagaattggaaaaaactactttaaagttcatatggaaccaaaaaagagcccgcattgccaagtcaatcctaagccaaaagaacaaagctggaggcatcacgctacctgacttcaaactatactacaaggctacagtaaccaaaacagcatggtactggtaccaaaagagagatatacatcaatggaacacaacagagccctcagaaataactccgcatatctacaaccatctgatctttgacaaacctgagaaaaacaagcaatggggaaaggattccctatttaataaatggtgctgggaaaactggctagccatatggagaaagctgaaactggatcccttccttacaccttatacaaaaattaattcaaggtggattaaagacttaaatgttagacctaaaaccataaaaaccctagaagaaaacctaggcattaccattcaggatataggcatgggcaaggacttcatgtctaaaacaccaaaagcaatggcaacaaaagccaaaattgacaaatgggatctcattaaactaaagagcttctgcacagcaaaagaaactaccatcagagtgaacaggcaacctacaaaatgggagaaaattttcacaacctactcatctgacaaagggctaatatccagaatctacaatgaactcaaacaaatttacaagaaaaaatcagacaaccccatcaaaaagtgggtgaaggacatgaacagacacttctcaaaagaagacatttatgcagccaaaaaacacatgaaaaaatgctcaccatcactggccatcagagaaatgcaaatcaaaaccacaatgagataccatctcacaccaccttcgctgctgatacccaggcaaacagggtctggagtggacctccagcaaactccaacagacctgcagctgaaggtcctgactgttagaaggaaaactaacaaacagaaagtacatccacaccaaaaccccatctgtacatcaccatcatcaaagaccaaagaactagaaaagcaagagcaaacacattcaaaagctagcagaaggcaagaaataactaagatcagagcagaactgaaggaaatagagacacaaaaaaaccttcaaaaaatcaatgaatccaggagctggtttttggaaaaggtcaacaaaattgatagactgctagcaagactaataaagaagaaaagagagaaggatcaaatagatgcaataaaaaatgataaaggggatatcaccaccgatcccacagaaatacaagctaccatcagagaacactataaacacctctacgcaaataaactagaaaatctagaagaaatggataaattcctggacacatacactctcccaagactaaaccaggaagaagttgaatctctgaatagaccaataacaggctctgaaattgaggcaataatcaatagcttaccaaccaaaaagagtccaggaccagatggattcacagccaaattctaccagaggtacaaggaggaactggtaccattccttctgaaactattccaatcaatagaaaaagagggaatcctccctaactcattttatgagtccagcatcatcctgataccaaagccgggaagagacacaaccaaaaaagagaattttagaccaatatccttgatgaacattgatgcaaaaatcctcagtaaaatactggcaaaccgaatccagcagcacatcaaaaagcttatccaccatgatcaagtgggctacatccctgggatgcaaggctggttcaacatatgcaaatcaataaatgtaatccagcatataaacagaaccaaagacaaaaaccacatgattatctcaatagatgcagaaaaggcctttgacaaaattcagcaacgtttcatcctgaaaactcttaatgaattaggtattgatgggacatatctcaaaataataagagctatctatgacaaacccacagccaatatcatactgaatagggaaaaactggaagcattccctttgaaaactggcaaaagatag

SEQ ID NO: 121595 - DNA, 1287 bp, Homo sapiens
cctctgctgctgatacccaggcaaacagggtctggagtgtacctccaacaaactccaacagacctgcagctgagggtcctgactgttagaaggaaaactaacagaaaggacacccacatcaaaaccccatctgtcagtcaccgtcatcaaagaccaaaggtagataaaaccacaaagatggggaaaaaacagaacagaaaaactggaaactctaaaaatcagagcacctctcctcctccacaggaacacagctcctcaccagcaatggaacaaagaataaccaatgcagagaagtacttaaaggacctgatggagctgaaaaccacggcacaagaactacatgacgaatgcacaagcctcagtagcccattcgatcaactggaagaaagggtatcagtgatggaagatcaaatgaatgaaatgaagcgagaagagaagtttagagaaaaaagaataaaaagaaacgaacaaagcctcaaagaaatatgggactatgtgaaaagaccaaatctacctttgattggtgtacctgaaagtgacagagagaatggaaacaagttggaaaacactctacaggatattatccaggagaacttccccaatctagcaaggcatgccaacattcaaattcaggaaatacagagaatgccacaaagatactcctcgaaaagggcaaccccaagatatataattgtcagattcaccaaagttgaaatgaaggaaaaaatgttaagggcagccagagataaaagtctggttacccacaaagggaagctcatcagactaacagctgggaaatttatagcactaattgcccacaagggaaatcaggaaagatctaaaattgacaccctaacatcacaattaaaagaactagagaagcaagagcaaacacattcaaaacctagcagaaggcaagaaataactaagatcagagcagaactgaaggaaatagagacacaaacaacccttcaaaaaatcaatgaatccaggagctggttttttgaaaagatcaacaaaattgatagactgctagcaagactaataaagaagaaaagagagaaaaatcaaatagatgcaataaaaaatgataaaggggatatcaccactgatcccacagaaatacaaactaccatcagagaatactataaacaccactatgcaaataaactagaaaatctaaaagaaatgaataaattcctggacacatacaccctcccaagattaaagcaggaagaagttgaatctctgaatagaccaataaaggctctgaaattgaggcaataa

SEQ ID NO: 121596 - DNA, 1122 bp, Homo sapiens
atgctatcaagtgtaggtctgctgttgacacacagaagaaagaagaaatccactgacactattaatgatgagtccctaaataaggagagagatatgacaggaaatccacacatctttcctcgataccaagagatttggcaagtttttgtgtcttcaggtaataactacatcacaactgccacggggccaacagctgttcctccgctgctgatacccaggcaaacagggtcaggagtggacctccagcaaactccaacagacctgcagctgaggctcctgactgttggaaggaaaactaacaaacagaaaggacatccacaccaaaaccccatctgtacgtcaccatcatcaaagaccaaagaaatacgaactaccatcagagaatactacaagcacctctatgcaaataaactggaaaatctagaagaaatggataaattccttgacacatacaccctcccaagactaaaccaggaagaagttgaatctctgcatagaccaataacaggctctgaaattgaggcaataattaatagcttaccaaccaaaaaaagtccaggaccagatggattcacagccgaattctaccagaggtacaaggaggagctgacaaacagagagccaaacatgagtgaactcccattcacaattgcttcaaagagaataaaatacctaggaatccaacttacaaggaacatgaaggacctcttcaaggagaactacaaaccacttctcaaggaaataaaagaggatacaaacaaatggaagaacattccatgctcatgggtaggaagaatcaatatcatgaaaatggccatactgcccaaggtaatttatagattcaccatccccatcaagttaccaatgactttcttcacagaattggaaaaaactacttcaaagttcatatggaaccaaaaaagagcccgtattgccaagtcaatcctaagccgaaagaacaaagctggaggcatcacgctacctgacttcaaactatactacaaggctacagtaaccaaaacagcatggtactggtaccaaaacagagatatagaccaatggaacagagccctcagaaataatgccacatatctacaactatccgatctttgtcaaatgtga

SEQ ID NO: 121597 - DNA, 3252 bp, Homo sapiens; identical to SEQ ID NO: 120702

SEQ ID NO: 121598 - DNA, 678 bp, Homo sapiens
cctccgctgctgatacccaggcaaacagggcctggagtggacctccagcaaactccaacagacctgcagctgagggtcctgactgttagaaggaaaaccaatgaacagaaaggacatccacaccaaaaccccatctgtacgtcaccatcatcaaagaccaaagactttaaaccaacaaagatcaaaagagacaaagaaggccattacataatggtaaagggagcaattcaacaagaagagctaattatcctacatatatatgcacccaatacaggagcacccagattcataaagcaagcccttagagactcacaaagagacttagactcccacacaataataatgggagactttaacacccctctgtcaacattagacagacccacgagacagaaagttaacaaggatatccaggaactgaactcagttctgcaccaagtggacctaatagacatctacagaactttccaccccaaatcaacagaatatacattcttctcagcaccacatcgcacttattccaaaattgaccacatagttggaagtaaagcactcctcagcaaatgtaaaagaggagaaattataacaaaaatcaaactagaactcaggattaagaaacagacgcaaaaccgctcaactacatggaaactgaacaaccttcttctgaatgactactga

SEQ ID NO: 121599 - DNA, 1047 bp, Homo sapiens
atggccgggtactcctctgagacaaaacctccagaggaacgatcaggcagcaacatttgctgttcaccaatatccgctgttctgcagcctccgctgctgatacccaggcaaacagggtctggagtggacctccagcaaactctgacagacctgcagctgagggtcctgactgttagaaggaaaactaacaaacagaaaggacatccacaccaaaatcccatctgtacgtcaccatcatcaaagaccaaaggaataaaatacctaagaatccaacttacaagggatgtgaaggacctcttcaaggagaactacaaaccactgctcaacaaaataaaagaagatacaaacaaatgcaagaacattccatgcttatgggtaggaagaatcaatatcatgaaaatggccatactgcccaaggtaatttatagattcaatgctatccccatcaagctaccaatgactttcttcacagaattggaaaaaactactttaaagttcatatggaaccaaaaaagagcccgcattgccaagtcaatcataagccaaaagaacaaagctggaggcatcatgctacctgacttcaaactatactacaaggccacagtaacgaaaacagcatggtactggtaccaaaacagagatatagaccaatggaacagaacagagccctcagaaataatgccatgtatctacaactgtctgatctttgacaaacctgagaaaaacaagaaatggggaaaggattccctatttaataaatggtgctgggaaaactggctagccatatgtagaaagctgaaactggatcccttccttacaccttatacaaaaattaattcaagatggattaaagacttaaatgttagatcaaaaaccataaaaaccctagaagaaaacctaggcaataccattcaggacataggcatgggcaaggacttcatgtctaaaacaccaaaagcaatggcaacaaaagccaaaattgacaaatgggatctaattaaactaaagagcttctgcacagcaaaagagaaactaccatcagagtga

SEQ ID NO: 121600 - DNA, 1650 bp, Homo sapiens; identical to SEQ ID NO: 116567

SEQ ID NO: 121601 - DNA, 1020 bp, Homo sapiens
atggcaatgcctccgctgctgatacccaggcaaacagggtctggagtggaccaccagcaaactccaacagacccgcagctgaggatcctgactgttagaaggaaaactaacacacagaaaggacatccacaccaaaaccccaactgtacatcaccatcatcaaagaccaaagagctaaaggaggaagttggaacccaacgcaaagaagttaaaaaccttgaaaaaagattagacgaatggctaactagaatagccaatgcagagaagtccttaaaggacctgatgcagctgaaaaccatggcacaagaactccaattagataaaactactttaaatttcatatggaaccaaaaacgagcctgcattgccaagacaatcctaagcaagaagaacaaagctggaggcatcaggctacctgacttcaaactgtactataaggctacagtaaccaaaacagcatggtactggcaccaaaacagatatatagaccaatggaacaggacagaggcctcggaaataatgccgcacatctacaaccatctgatctttgataaacctgacaaaaagaagcaatggggaaatgattccctatttaataaatggtgttgggaaaactggctagccatatgcagaaaactgaaattggaccccttccttacaacttctacaaaaattgactcaagatggattaaagacttaaaggtaaaacctaaaaccatagaaaccatagaagaaaacctaagcaataccattcaggacataggcatgggcaaagacttcatgactaaaacaccaaaagcaatggcaacaaaggccaaaattgacaaatgggatctaattaaactaaagagcttctgcacagcaaaagaaactaccatcagagtgaacacgcaacctacagaatggaagaaaatttgtgcaatctatctatctgacaaagggctaatatccagaatctataagaaacttaaatttacaagaaaaaaaacaaccccatcgaaaagtgggcaaaggatatga

SEQ ID NO: 121602 - DNA, 1260 bp, Homo sapiens; identical to SEQ ID NO: 116570

SEQ ID NO: 121603 - DNA, 2805 bp, Homo sapiens
atgtatggcactggctacagagatgttgccggaaaatgggctattgatccagactccaagagagagttcttggatgtaacacaggaaggaattcaaggttgtgattttagtggaacctgcaggcagactttaagtatcttaacccagccattgagacagtggggcttagaaggtatcaagaaaccaaacagctggattataagtgaagagtcagtcagtaatggagggcctccgctgctgatacccaggcaaacagcgtctggagtggacctccagcaaactccaacagacctgcagctgagggtcctgactgttagaaggaaaactaacaaacagaaaggaatagcatcaacatcaacaaaaaggacatccacaccaaaaccccatctgtacgtcaccatcatcaaagaccaaagttacataaaaccacaaagatggggaaaaaacatagcagaaaagctgaaaattctaaaaatcagagtggctctctccctccaaaggaatgcagctcctcaccagcagtggaacaaagctggacggagaatgagtttgatgagttcacagaagaaggcttcagaagtgattgaaagtcaaatgaatgaaataaagggagaagagaagtttagagaaaaaagagtaaaaagaaacgaacaaagcctacaagaaatatgggactatgtgaaaagaccagatctacgtctgattggtgtacctgatagtgacggggagaatggaaccaggttggaaaacactctgcaggatattatccgggagaatttccccaacctagcaaggcaggccagcattcaaattcaggaaatacagagaacgccacaaagatactcctcaagaagagcaactccaagacacataattgtcagattcaccaaagttgaaatgaaggaaaaaatgttaagggcagccagagagaaagaactcaagattaagaaactcactcaaaactgcttaactacatggaaactgaacaacctgctcctgaatgactactgggtacataatgaaatgaagggagaaataaagatgttctttgaaaccaatgagaacatagacacaacataccagaatctctggcatacatttaaggcagtgtgtagagggaaatttatagcactaaatgcgcacaagagaaagcaggaaagatctaagattgacaccctagcatcacaattaaaagaaatagagaagcaagagcaaacacattcaaaagctagcagaagacaagaaataactaagatcagagtagaactgaaggagatagagacacaaaaaagccttcaaaaaatcaatgaatccaggagctggttttttgaaaagatcaacaaaattgatagaccactaccaagactaataaagaagaaaagagagaagaatcaaatagacacaataaaaaatgataaaggggatatcaccaccaatcccacagaaatacaaactatcagcagagaatactataaacacctctatgcaaataaactagaaaatctagaagaaatggataaattcctggacacatacaccctctcaggactaaacaaggaagaagttgaatctctgaatacatcaataacaggctctgaagttgaggcaataattaatagcataccaaccaaaaaaaagtccaggaccagatggattcacagccgaattctaccagagcttagcagagacacaacaaaaaaagagaattttagaccaatatccctgatgaacatcgatgtgaaaatcctcaataaaatgctggcaaacggaatccagcagcacatcaaaaagcttatccaccatgatcaagtgggcttcatccctgggatgcaaggctggttcaacatacacaaatcaataaatgtaatccagcatataaacagaaccaaggacaaaaaccacatgattatctcaatagatgcagaaaaggcctttgacaaaattcaacagcccttcatgctaaaaactctcaataaattagatattgatgggacatatctcaaaataataagagctatttatgacaaacccacagccaatatcatactgaatgggcaaaaactggaagcattccctttgaaaagcagcacaagacagggatgccctctctcaccacacctattcaacatagtgttggaagttttggccagggcaatcaggcaagagaaagaaataaagggtattcaattaggaaaagaggaagtcaaattgtccctgtttgcagatgacatgattgtatatttagaaaaccccatcatctcagcccaaaatctccttaagctgataagcaacttcagcaaagtctcaggatacaaaatcaatgtgcaaaaatcacaagcattcctatacaccagtaacagacaaacagagagtcaaatcatgagtgaactcccattcacaattgcttcaaagagaataaaatacctagaaatacaacttacaagggatgtgaaggacctcttcaaggagaactacaaaccactgctcaacgaaataaaagaggacacaaacaaatggaagaacattccatgctcatggataggaagaatcaatattgtgaaaatggccatattgcccaaggatgacaaaaaatgtgtcagtgatgatcatgatgctgacaatgacagtgacaatgacggcgataactttctgcaagtctcagcagcaaaatcttacatctctcattactttcctgtgataaggctcctcacagcatactggaggagactctccaacagccttgaaaaggcaaagggccatgatgtggaagggccatgtggcaaggaattagtagttggcctttag

SEQ ID NO: 121604 - DNA, 762 bp, Homo sapiens
ttacaatttggcatgattttgcagtggctggtaccggttgttcctttccatgttgagtgcttccttcaggaactcttttagggcaggtctggtggtgacaaaatctctcagcatttgcttgtctgtaaagtattttatttctccttcacttatgaagcttagtttggctgggtatgaaattctgggttgaaaattcttttctttaagaatgttgaatattggcccccactctcttctagcttgtagagtttctgccaagagatcagctgttagtctgatgggcttccctttgtgggtaacccaacctttctctctggctgcccttagcattttttccttcatttcagctttgctgaatctgacaattatgtgtcttggggttgctcttctggaggaatatctttctagtgttctctgtatttcctgaatttgaatgttggcctgccttgctagattggggaagttctcctgcataatatcctgcagagtgttttccaacttggttccattctcccctttggtctttgatggtgacatacagatgggtttttggtgtggatgtcctttctgtttcttagttttccttctaacagtcaggaccctcagctgcaggtctgttggagtctgctggaggtccactccagaccctgtttgcctgggtatcagcagcagaggctgcagaacagcagatattggtgaacagcaattgttgctgcctgatcgttcctctggaagttttgtctcagaggagtacccggccat

SEQ ID NO: 121605 - DNA, 483 bp, Homo sapiens
gttgtgattttagtggaacctgcaggcagactttaagtatcttaacccagccattgagacagtggggcttagaaggtatcaagaaaccaaacagctggattataagtgaagagtcagtcagtaatggagggcctccgctgctgatacccaggcaaacagcgtctggagtggacctccagcaaactccaacagacctgcagctgagggtcctgactgttagaaggaaaactaacaaacagaaaggaatagcatcaacatcaacaaaaaggacatccacaccaaaaccccatctgtacgtcaccatcatcaaagaccaaagttacataaaaccacaaagatggggaaaaaacatagcagaaaagctgaaaattctaaaaatcagagtggctctctccctccaaaggaatgcagctcctcaccagcagtggaacaaagctggacggagaatgagtttgatgagttcacagaagaaggcttcagaag

SEQ ID NO: 121606 - DNA, 1593 bp, Homo sapiens
tcaggtacaccaatcagacatagatttggtcttttcacatagtcccatatttcttggaggctttgtttcttttctttttattcttttttctctaaacttctcttctcgcttcatttcattcattttgtcttccatcgctgatatcctttcttctaattggttgcattggctactggggcttgtgcattcgtcacgtagttctcgtgctgtggttttcagctccatcaggtcctttaaggacttctctgcattggttattctagttatccattcgtctaattttttttcaaagtttttaacttctttggcattggttcgaacttcctcctttagctcggagtagtttgatcttctgaagccttcttctctcaactcgtcaaagtcattctccatccagctttgttccattgctggtgaggagctgtgttcctttggaggaggagaggtgctctgatttttagtttccggtttttctgctctgttttttcccccatctttggtctttgatgatggtgacgtacagatgggtttttggtattgatgtcctttctgtttgttcgttttccttctaacagtcaggaccctcagcagcaggtctgttggagtttgctggaggtccactccagaccctgtttgcctgggtatcagcagcggtggctgaagaacagtggatattggtgaaccgcaaatgctgctgcctgattgttcctctggaagttttgtctcagaggagtacccggccgtgtgaggtgtcagtccatccctgagatgccaggagatggctagggacaaaaaaagaagttgatgattattggcattaatagcaggaaccaccatggtcctcagtgacccgctctgcagaagatgccagcatcttaggtcactgagataatgaacaatcattttctcttttgcttcagaaaaggaaagggaagaataaaacttgtcaatagtagggtagagcaccaagcaggctcctggggtccctggtttcagtccttggttgctggacaatatttctggacctgctctgggccagatgggagcccacttccctgaaaggagagacccaagcctggcatcattcatcacaagctgactgaagagctcgtaggcaggctcaacaccagatggaagctgccaaggcttgggccttccaccctctgaagccacagcccatgctctatgttggccccattcagccatagctggagtggctggatcacagtgcaccaagtccctaggctcttgaatgctttgctgcttagaaatttcttctgcctgataccctaaatcacccctttcaagttcaaagttccacaaatctgtagggcaggagcaaaatgccaccagtctctttgctaaaacataacaagggtcacccttgctccatttcccaacaagtttctcatttctatctgagaacacctcagcctggacattattgtccataacactatcagaattttgggcaaagccattcaacaagtctctatgaagttccaaactttcccacattttcctgtcttcttctgagccctccaaactgttccaacctccgcctgttacccggttccaaagtcgcttccacat

SEQ ID NO: 121607 - DNA, 4563 bp, Homo sapiens
atgaaacatactttgataccaagaattaaaaatgcctgtctacaaatgtcttcccttgctgttcctgtaaattcattagtgtgcttaggaaagattttggaatacttggataagtggttggtacttgatggtatcctacccttcttacaacaaattccatccaaagagtctgcagtcctcatgggtattttaggcatttacaaatgtacttttactcataagttgggaatcaccaaagagcagctgactggaaaagtattgcctcatcttattcccctgagtattgaaaacaatcttaatcagttcaattctttcatttccatcataaaagagatgctgaataggttggagtctgaacataagactaagctggagcaacttcatataatgcaagaacaacagaaatctttggacataggaaatcaaatgaatgtttctgaggagacaaaagttacaaatattgggaatcagcaaattgacaaggtttttagccacattggagcagaccttctgactggcagtgattccgaaaataaagaggatggtgctttgaatgttcctcctgctggtgcgaagccaacccaacaaagacccacagatatgtctgcccttaataatctctttggccctcagaaacccaaagttagcatgaaccaattatcacaacagaaaccaaatcagtggcttaatcagtttgtacctcctcaagtttctccagctacgggcagttcagtaatgggaacacagatgaacatgataggacaatctgcctttgatgtctgctccaatgaggatctccctgaagttgagctggtgagtctgctagaagaacaactaccacagtataggctaaaagtagacactctctttctatatgaaaatcaagactggactcagtctccacaccagcggcagcatgcatctgatgctctctctccagtccttgctgaagagactttccgttacatgattctaggcacagacagggtggagcagatgaccaaaacttacaatgacatcgacatggttacacatctcctggcagagagggatcgtgatctggaactcgctgctcgaattggacaagctctcttaaagcggaaccatgtcttatctgagcagaacgaatccctggaggagcaattgggacaagcctttgatcaagttaatcagctgcagcatgagctatgcaagaaagatgagttacttcgaatcgtctccattgcttctgaagaaagtgaaactgattccagctgttctacacctcttcggttcaatgagtcctttagcttatctcaagggttgctgcagttggaaatgctgcaagaaaagctcaaggaactggaagaagagaatatggctcttcgatccaaggcttgtcacataaagacagaaactgttacctatgaagaaaaggaacaacagcttgtcagcgactgtgttaaagaacttcgtgaaacaaatgctcagatgtccagaatgactgaagaattgtcagggaagagtgatgagctgattcgataccaagaagagctttcctctcttttgtcacagattgtagaccttcagcacaaacttaaagaacatgtgattgagaaggaagaactaaaacttcacctgcaagcttccaaagatgcccaacggcaactgacaatggagctgcacgagttacaagacaggaatatggagtgtctaggaatgttacatgaatcccaagaagaaataaaggaacttcgtagtagatctggccctactgctcatctctacttctcccaatcatatggagcttttactggggaatctttggcagctgagattgaggggactatgcgtaaaaagctgagtttggatgaggaatcttctctctttaaacaaaaagcccaacagaagcgggtatttgataccgtcaggattgccaatgacacacggggccgctctatctcattcccagctctgttacccattccaggctccaaccgttcaagtgtcatcatgacagcaaaaccttttgagtctggtcttcagcaaacagaggacaaatcactcctgaaccaggggagcagctcagaggaggttgcagggagctcccagaagatgggccaaccaggaccctcaggagatagtgatttggctacagcactgcatcgccttagcttgcgtcgacaaaactatttaagtgagaagcagttctttgctgaagaatggcagcggaagatccaggttctggcagaccagaaggaaggagttagtggctgtgtcaccccgacagagagccttgcctctctctgcaccacccagtcagagatcacagacctcagcagtgccagttgccttcgaggttttatgccagaaaaattacaaattgtcaagccccttgaaggatcacaaactctgtatcactggcagcagcttgctcaaccaaacttgggaaccatccttgatccacgaccaggtgtcattactaaaggctttacccagttgcccggggatgctatttatcacatctcagatttagaagaggatgaagaggagggtattacttttcaggttcagcaacctcttgaagtggaagagaaactttcaacatccaagccagtaacagggatcttcctgccacccattacttcagcaggtggaccagttacagttgcaaccgccaacccaggaaagtgcctgtcgtgcacaaactcaacattcactttcaccacctgtagaatattacatccctctgacatcactcaggttacccccagctctgggttcccttcattatcctgtggaagtagcggtagcagttcatccaacacggctgtgaattctcctgccttgtcctatagactcagcattggtgagtccatcaccaaccgacgagattccactacaaccttcagtagcaccatgagcttggccaaacttctacaagagcgaggcatctctgccaaagtgtaccacagcccaatttcagagaaccccctccagcctctccctaaatccctggctatcccttccacaccaccaaattcaccatctcactcaccttgcccttctcctttaccctttgagcctcgagtgcatctctctgaaaattttttggcctctcgaccagctgagacattcctccaggagatgtatggcttgagaccctcccggaaccctcctgatgttggccagttgaagatgaacttagtggacaggctgaagagactggggatagccagagtggtcaagaaccctggtgcccaagagaatggaagatgccaggaggcagaaattggtcctcaaaaaccagattctgctgtttatttaaattcaggggctttgaccacgacctttgaagagcttcattttgagatcaagccccacgatgactgcacagtagagcaaatctatgagattttgaaaatctaccaactcatggaccacagtaacatggactgcttcatctgctgtatcctctcccatggagacaagggcatcatctatggcactgatggacaggaggcccccatctatgagctgacatctcagttcactggtttgaagtgcccttcccttgctggaaaacccaaagtgttttttattcaggcttgtcagggggataactaccagaaaggtatacctgttgagactgattcagaggagcaaccctatttagaaatggatttatcatcacctcaaacgagatatatcccggatgaggctgactttctgctggggatggccactgtgaataactgtgtttcctaccgaaaccctgcagagggaacctggtacatccagtcactttgccagagcctgagagagcgatgtcctcgacagtcacaatattatgtgatgtatttcagaggcgatgatattctcaccatcctgactgaagtgaactatgaagaaccagaagcagctgcatgtaatggcaagaccatcagactcccaggggagatggatttaaaaaccaccctcagtcatagaactgagcaaactcagaaactggaagacaaatgtcctgtgttgttttgcatagaaacaaggacacagcctccgctgctgatacccaggcaaacagggtctagagtggacctccagcaaactccaacagacctgcagctgagggtcctgactgttagaaggaaaactaacaaacagaaaggatatccacaccaaaaccccatctgtacgtcactgtcatcaaagaccaaagagaagtccttaaaggacctgatggagctgaaaaccatggcacaagaagtatgtgacaaatgcacaagcctcagtagccgattcgatcaactggaagaaagggtatcagtgatggaagatcaaatgaatgaaatgaagcaagaagagaagtttagaaaaaaaagaataagaagaaatgaacaaagcctccaagaaatatgggactatgtgaaaagaccaaatctacgtctgattggtgtacctgaaagtgacagggagaatggaaccaagttggaaaacactctgcaggatattatccaggagaacttccccaaccgagcaaggcaggccaacaatcagattcaggaaatacagagaacagcataa

SEQ ID NO: 121608 - DNA, 1359 bp, Homo sapiens
atgttgacattgcgggatctgggatccaggtatagtgagattcgtggcccatgcctggggctgtctccgactcgggtggtaggcaaggaagagcttgtcatgtcgtacatggatggcacactcaatacgggagcttcacatatgagaaatcaacagcttcaggcacagctattactgtggatgtgtcttcactatcttcatctagcagatccccagttatttgtgcacgagaaaattgacttcattacctacaagacgtcattacctggtaaaatgtccagtgatcgagctttgaggaagcagcaacagttgaacaaccttgtctatgtggtaacaaatcaggccaaacctggtgacagaattgtggatttctgcagcgaaatacaaactaccatcagagaatactataaacacctctacgcaaataaactagaaaatctagaagaaatggataaattcctggacacatacaccctcccaagactaaatcaggaagaagttgaatctctgaatagaccaataacaggctctgaaattgaggcaataattaatagcttaccaaccaaaagaagtccaggaccagatggattcacagccgaattctaccagaggctaaaacagtgccgaaaagcacatctagacccagtgtctctcacacaccggagcggccccggagcgcgggaggaccggctgagtgacagcggagacgcgtcccgaggttgttggaacctgtcacagcacgccgccgtcacgtcgcccgagtctgaggagcggcgcatcaggaccctcagctgcaggtctgttggagtttgccggaggtccactccagaccctgtttgcctgggtatcagcagtggaggctgcagaacagtgaatattggtgaacagcaaatgttgctgcccgatcgttcctctggaagttttgtctcagaggggtaccgtccgtgtgaggtgtctgcccctactggggggtgccctccagttaggtgtctgatgatcaacactgtgtccttaataggtgtcaagtttactgaagtgtttgattcaataaacatatctgaacatctagagcttgcatgcctgcaggatcacaactccttgctagcaagggaacaaaactggacagaggatgagtttgacgaattaacagaagtaggcttcagaaggtgggtaataacaaactcctctgagctaaagaagcatgttctagtcagatgcaaggaagctaagaaccttgaaaaaacattagaggaattgctaactagaattaccagtttagagaagaacataaatgacctgatggagctgaaaaacacaacacaagaacttcgtgaagcatacacaagtatcaatagctga

SEQ ID NO: 121609 - DNA, 915 bp, Homo sapiens
atgcagatacggcaacagtggcgaaaagacttggatcacaacacccaagttcttcaaaagccttcccaagaaggatggcttcaaacaaacccagactgtgaagactacaatagatatttaattcttcaatgcctagacaacaatgaacatacggatggactgacacctcacacggccgggtactcctctgagacaaaacttccagaggaacaatcaggcagcagcatttgcggttcaccaatatccactgttcttcagccaccgctgctgatacccaggcaaacagggtctggagtggacctccagcaaactccaacagacctgctgctgagggtcctgactgttagaaggaaaacgaacaaacagaaaggacatcaataccaaaaacccatctgtacgtcaccatcatcaaagaccaaagatgggggaaaaaacagagcagaaaaaccggaaactaaaaatcagagcacctctcctcctccaaaggaacacagctcctcaccagcaatggaacaaagctggatggagaatgactttgacgagttgagagaagaaggcttcagaagatcaaactactccgagctaaaggaggaagttcgaaccaatgccaaagaagttaaaaactttgaaaaaaaattagacgaatggataactagaataaccaatgcagagaagtccttaaaggacctgatggagctgaaaaccacagcacgagaactacgtgacgaatgcacaagccccagtagccaatgcaaccaattagaagaaaggatatcagcgatggaagacaaaatgaatgaaatgaagcgagaagagaagtttagagaaaaaagaataaaaagaaaagaaacaaagcctccaagaaatatgggactatgtgaaaagaccaaatctatgtctgattggtgtacctga

SEQ ID NO: 121610 - DNA, 771 bp, Homo sapiens
ttagttgactgtcagctgtccttgctccaggatgctgtttttgacaacggatgttttattgcctttgatgttcattaagaagcttggcgcaaatgttgcctttttatcctcgaagaagcctctgtttgtcatgtagcttgtgataaccacattgttgcctttggcttgcggcactttggtctttgatgatggtgacatacagatggggtttcggtgtggatgtcctttctgtttgttagttttccttctaacagtcaggaccctcagctgcaggtctgttggagtttgctggaggtccactccagaccctgtttgcctgggtatcagcagcagaggatcaggctcgaaccctttaagatcaacgttcttgagcagatcacgaagcatatcgaaaaactgcagtgcggaggtgtagtcaaacaactcagcaggcgtgggaacaatcagcacatcagcagcacatacgacattaatcgtgccgatacccaggttaggcgcgctgtcaataactatgacatcatagtcatgagcaacagtttcaatggccagtcggagcatcaggtgtggatcggtgggcagtttaccttcatcaaatttgcccattaactcagcctcaatacggtgcagagccagacaggaaggaataatgtcaagccccggccagcaagtgggctttattgcataagtgacatcgtccttttccccaagatagaaaggcaggagagtgtcttctgcatgaatatgaagatctggtacccatccgtgatgcat

SEQ ID NO: 121611 - DNA, 482 bp, Homo sapiens
gcccgacgttgcatgctgccgggcgccatggacgcgggattttcccgggtcgacgatttcgtggcttctccagtcgcgtctttctcactcactggggagcccggcggtggcggcacctttcgaggtagacccgctgagctgctagcccgccggccagcgagtgagaggtcggacagactgtggagccgacagactgaaggacagcggcaccgccagacggccagaaagttccgccatgagctggggcacggagctgtgggatcagttcgacagcttagacaagcatacacaatggggaattgacttcttggaaagatatgccaaatttgttaaagagaggatagaaattgaacagaactatgcgaaacaattgagaaatctggttaagaagtactgccccagacgttcatccaaagatgaagagccacggcttacctcgtgtgtagccttgtttaatatcacttaatgagttaaatgactat

SEQ ID NO: 121612 - DNA, 1961 bp, Homo sapiens
ttcccatgggaacctagagaaggactttccctatattccccacctctttgggcttcagcaaaagaaaatggacctcaagggagtcttcaagagctgcttcaaaatttactgttcatcaaagcacttgctgaagactggcttcatttcagaggctgtgctgtgttatggagaaggaggtgaaggagatacggtgcttaccatgaaggagaggtggccacatgaatgcatcgttttaatacagtgcaataagggcagactgacacctcacacggccagatactcctctgagacaaaacttccagaggaacgatcaggcagcagcatctgcggttcaccaatatccgctgttctgcagccaccgctgctgattcccaggcaaacagggtctggagtggacctccagcaaactccaacaaacctgcagctgagggtcctgactgttagaaggaaaactaacaaacagaaaggacatccacaccaaaaacccatctgtatgtcaccatcatcaaagaccaaagactttaaaccaacaaagatcgaaagagacaaagaaggccattacataatggtaaagggatcaattcaacaagaagagctaactatcctaaatatatatgcacccaatacaggagcacccagattcataaagcaagtcctgagtgacccacaaagagacttagactcccacacattaataatgggagactttaacaccccactgtcaacattagacagatcaatgagacagaaaggcaacaagggtatccaggaattgaactcagctctgcaccaagcagaccaaatagacatctacagaactctccaccccaaatcaacagaatatacaatcttttcagcaccacaccacacctattccaaaatcgaccacatagttggaagtaaagcattcctcagcaaatgtaaaagaacggaaattataacaaactgtctctcagaccacagtgcaatcaaactagaactcaggattaagaaactcattcaaaaccactcgactacatggaaactgaacaacctgctcctgaatcactactgggtacataacgaaatgaaggcggaaataaagatgttctttgaaaccaatgagaacaaagacacaacgtaccagaatctctgggacacactgaaagcagtgtgtagagggaaatttatagcactaaatgcccacaagagaaagcaggaaagatctaaaattgacaccctgacatcacaattaaaagaactagagaagcaagagcaaatacattcaaaagctagcagaaggcaagaaataactaagatgagagaagaactgaaggaaatagagacacaaaaaacccttcaaaaaaatcagtgaatccaggagctggttttttgaaaagttcaacaaaattgatagacggctagcaagactaataaagaagaaaagagagaagaatcaaatagacgcaataaaaaatgacaaacgggatatcaccactgatcccacagaaatacaaactaccatcagagaacactataaacacctctacgcaaataaactagaaaatctagaagaaatggataaattcctcgacacatacaccctcccaagactaaaccaggaagaagttgaatctctgaatagaccaataacaggctctgaaattgaggcaataattaatagcttaccaaccaaaaaaagtccaggaccagatggattaacagccaaattctaccagaggtacaaggaggagctggtaccattccttctgaaactattccaatcaatagaaaaagagggaatcctccctaactcattttatgaggtctgcatcatcctgataccaaagcctggcagaggcactacaaaaaaagagaattttagaccaatatccttgatgaacattgatgcaaaaatccttaataaaatactggcaaaccgaatccaacaactcatcaaaaagcttatccaccatgatcaa

SEQ ID NO: 121613 - DNA, 787 bp, Homo sapiens
cagagcagcccggacttcctacttgacagctcagaggaggaagcaggcgttgccagtcctgcgaaaggatagcagcaaaatcagcacaacatcacttctgttaccagaaaggggtcccaatccagaccccaagaaagggttcttagattctcatccaagaaataattcagggcaacctccgctgctgatacccaggcaaacagggtctggagtggacctccagcaaactccaacagatctgcagctgaggatcctgactgttagaaggaaaactaaccaacagaaaggacatccacaccaaaaccccatctgtacgtcaccatcatcaaagaccaaagcaaggcaggccaacattcaaattcaggaaatacagagaatgccacaaagatactcctcaagaagagcaactccaagatgcataattgtcagattcaccaaagttgaaatgaaggaaaaaatgttaagggcagccagagagaaaggtcaggttacccacaaagggaaccccatcagactaacagcagatctcttggtaaaaactctacaagccagaagagagtgggggccaatattcaacattctcaaagaaaagaattttcaacccagaatttcatatccagccaaactaagcttcataagtgaaggagaaataaaatcctttacagacaagcaaatgctgagagatttcggcaccaccaggcctgccctaaaagagctcctgaaggaagcactaaacatggaaaggaacaaccagtaccagccactgcaaaaacatgtcagattgtaa

SEQ ID NO: 121614 - DNA, 1167 bp, Homo sapiens
atgttctttgaaaccaacgagaacaaagacaccacataccagaatctctgggacgcattcaaagcagtgtgtagagggaaatttatagcactaaacgcctacaagagaaagcaggaaagatccaaaattgacaccctaacatcacaattaaaagaactagaaaagcaagagcaaacacattcaaaagctggcagaagccaagaaataactaaaatcagagcagaactgaaggaaatagagacacaaaaaacccttcaagaaatcaatgaatccaggagctggttttttgaaaggatcaacaaaattgatagactgctagcaagactaataaagaaaaaaagagagaagaatcaaatagacacaataaaaaatgataaaggggatatcaccaccgatcccacagaaatacaaactaccatcagagaatactacaaacacctctacgcaaataaactagaaaatctagaagaaatggatacattcctcaaatgggccttaagcacaattgaaatacaggcctggagaagcaaacagcctccactgctgatactcaggcaaacagggtctggagtggacctccagcaaactccaacagacctgcagctgagggtcctgactgttagaaggaaaactaacaaacacaaaggacatccacaccaaaaccccatctgtacgtcaccatcatcaaagaccaaagaaaatctagaagaaacggataaattccttgacacatacactctcccaagactaaaccaggaagaagttgaatctctgaagagaccaataacatgctctgaaattgaggcaataattaatagtttaccaatcaaaaaaagtccaggaccagatggattcacagccaaattctaccagaggtacaaggaggagctggtaccattccttctgaaactattccaatcaacagaaaaagaggcaatcctccctaactcattttatgagaccagcgtcatcctgataccaaaacctggcagagacacaacaaaaaaagagaattttagaccaatatccctgaagaacatcgattcaaaaatcctcgataaaatactggcaaaccgaatccagcagcacatcaaaaagctatccaccatgatcaagtgggcttcatccctgggacgcaagcctggttcaacatatgcaaatcaataa

SEQ ID NO: 121615 - DNA, 2673 bp, Homo sapiens; identical to SEQ ID NO: 117841

SEQ ID NO: 121616 - DNA, 690 bp, Homo sapiens
tcaacaagatggtgaattgactagtgggtagatccacaggacgggtgtggtcgccatgatcgcgtagtcgatagtggctccaagtagcgaagcgagcaggactgggcggcggccaaagcggtcggacagtgctccgagaacgggtgcgcatagaaattgcatcaacgcatatagcgctagcagcacgccatagtgactggcgatgctgtcggaatggacgatatcccgcaagaggcccggcagtaccggcataaccaagcctatgcctacagcatccagggtgacggtgccgaggatgacgatgagcgcattgttagatttcatacacggtgcctgaacggccgggtactcctctgagacaaaacttccagaggaacgatcaggcagcaacatttgctgctcaccaatatccactgttctgcagcctccactgctgatacccaggcacacagggcctggagtggacctccagcaaacaccaacaaacctgcagctgagggtcctgactactctggccaggtgatgagaggctgtggccctcttgggaagagcagaagaaactttctcttccaactgatcctgacacttggctctgaggaagccctcaggctgctcagggtcccaggtgtgtgcctccacctggggctcaaccgctgagctctgtgactgcttcgctgtgccactgtgcat

SEQ ID NO: 121617 - DNA, 2317 bp, Homo sapiens; identical to SEQ ID NO: 120362

SEQ ID NO: 121618 - DNA, 1239 bp, Homo sapiens; identical to SEQ ID NO: 115459

SEQ ID NO: 121619 - DNA, 834 bp, Homo sapiens
atgtgtaatgcacaagtcctggaatacatggggaaatcatcatcactactgaccagcgacttgcagcttgttcgagatgctctccgcagcctgcgcaacagcttcagtggccacgatcctcagcaccacactattgacagcttggagcagggcatttctagcctcatggagcgcctgcatgttatggagacgcagaagaaacaagaaagaaagcctccactggtgatacccaggcaaacagggtctggagtggacctccagcaaactccaacagacctgcagctgagggacctgactgttagaaggaaaactaacgaacagaaaggaatagcatcagcatccacaaaaaggacatctacaccaaaaccccatcgtaggtcaccaacatcaaagaccaaagcaccacattgcacttattctaaaatttaccacataattggaagtaaaacactcttcagcaaatgtaaaagaaaagaaatcacaacaaacagcctctcagaccacggggcaatcaaattagaactcaggattaagaaactcactcaaaatggcacaactacctggaaactggacaacctgctcctgaatgactgctggttaaataacgaaatgaaggcagaaataaagatgttctttgaaaccaatgagatcaaagacacaatgtacaagaatccctgggacacatttaaagcagtgtgtacaggggaatttatatcactaaatgcccacaagagaaagcaagaaagatctaaaattgacatccgaacatcacaattaaaagaactagagaagcaagagcaaacaaattcaaaactagtagaaggcaagaaataa

SEQ ID NO: 121620 - DNA, 915 bp, Homo sapiens
atggccatggacaaagacttcatgactaaaacaccaaaagcaatggcaacaaaagccaatattgacaaatgggatctaattaaactaaagagcttctgcacagcaaaagaaactatcatcagagtgaagaggtattcttctgagacaaaacttccagaggaacgatcaggcagcagcatttgcggttcaccaatatctgctgttctggagccactgctgctgatacccaggcaaacagggtctggagtggacctccagcaaactccaacagacctgcaactgagggtcctgactgttagaaggaaaactaacaaacagaaaggacatccacaccaaaaacgcatctgtacgtcaccatcatcaaagaccaaagagaagtccttaaaggacctgatggagctgaaaaccacggcacgagaactatgtgacgaatgcacaagcctcagtagccaacgtgatcaactggaagaaagggtatcagcaatggaagacgaaatgaatgaaatgaagcgagaagagaaggttagagaaaaaagaataaaaagaaacgaacaaagcctccaagaaatatgggactatgtaaaaagaccaaatctacgtctgattggtgtacctgaaagtgatggggagaatggaaccaagctggaaaacactctgcaggatattatccaggagaacttccccaatctagcaaggctggccaacattcaaattcaagaaatacaaagaacaccacaaagatactcctcaagaagagcaaccccaagacacataattctcagattcaccaaagttgaaatgaaggaaaaaatgttaagggcagccagagagaaaggtcgggttacccacaaagggaagcctgtcagactaacagctgatctgtcggcagaaactctacaagccagaagacagtag

SEQ ID NO: 121621 - DNA, 666 bp, Homo sapiens
  misc_feature (1)...(666): n = a,t,c or g
atggttgatgtctttggtgttggaagctgcgatggtctagagcagggtatcagaacctgggtcttgaggagtgtaggaggtggcctggaatgtcccaaagtatttgctgatgtggagccaggaggatgtatgatctcaggctttgaaactaaagaggatcagttcgacagcttagacaagcatacacaatggggaattgacttcttggaaagatatgccaaatttgttaaagagaggatagaaattgaacagaactatgcgaaacaattgagagaaaacagtgtagcacatttatatctcacagcacaaagagaatttaagctttctgaagaagaagtcanggtcaggaccctcagctgcaggtccgttggagtttgctggaggtccactccagaccctgtttgcgtgggtatcagcagtggaggctgcagaacagcggatattggtgaacagcaaatgctgctccctgatcgttcctctgaaagttttgtctcagaggagtacctggccatggtgtttccaaaaacggagccaaaacagcagaagaaggaggaggaggagaaaggggagctaagtccagacaaggaggttctgacaaaagagaaagaggaactgaagggcgaggagaaattttggcagtctttttccgttcagaaattattttag

SEQ ID NO: 121622 - DNA, 793 bp, Homo sapiens
atggagtttttcctcctgcttttgagaatcttttgtttcctgcttctaacaacctatgctcatatgtgtgagcaaagaaataacataaaactggaacttatatttaaagaggaagcagagtgtaaaactttgaaaaatgtgcagcccagctacgtggtagaaaagaaaaatccattttcaggggagaaattcaagctggctgcagaaattcgcataactaaaaggaaggcaaatgcttacacaatgggggaaaggcctcgatggcatttcagtgaccttcacagcagcccctctttacaggcccagagaggtctagaaggatataatgatcttgttggctgtgtccagggccctgctgtcctgcacagcctcagaacactgctcccttcatcccagaagcttgaactccagccatggctgaaaggggcccagctacagctgcaggtcagttggagtttactggaggtgcactccagaccctgtttgcctgggtatcagcagcggcggctgcagaacagtggatattggtgaaccgcaaatgctgctgcctgatcgttcctctggaagttttgtctcagaggagtacctggccgtgcataggcttggttatgccggtactgccgggcctcttgcgggatatcgtccattccgacagcatcgccagtcactatggcgtgctgctagcgctatatgcgttgatgcaatttctatgcgcacccgttctcggagcactgtccgaccgatttggccgacgaccaggcctgctcgcttcgctacttggagccactatcta

SEQ ID NO: 121623 - DNA, 1845 bp, Homo sapiens
atgcagagctgcccagggagctccagactgggcgccgcagggacggggctgaacgcggggatcccggctgcgggcccagccgccatcttgcggccagaggggcctggggctgaactgcgccagcagggacctcagccaccgctgctgatacccaggcaaacagggtctggagtggacctccagcaaactccaatggacctgcagctgagggtcctgactgttagaaggaaaactaacaaacagaaaggacatccacaccaaaaacccatctgtacctcaccatcatcaaagaccaaagaaatacaaactaccatcagagaatactatcaacacctctacacaaataaactagaaaatctagaagaaatggataaattctttgacacatacaccctcccaagactaaaccaggaagaagttgaatctctgaatagaccaataacaggctctgaaattgaggcaataattaataacttaccaaccaaaaaaagtccaggaccagatggattcacagccgatttctaccagagtgttggaagttctggccagggcaatcaggcaggagaaggaaataaagggcattcaattaggaaaagaggaagtcaaattgtccctgtttgcagatgacatgattgtatatctagaaaaccccatcgtctcagcccaaaatctccttaagctgacagccaacttcagcaaagtctcaggatacaaaatcaatgtgcaaaaatcacaagcattcttatacaccaataacagacaaacagagagccaaatcatgagtgaactcccattcacaatggcttcaaacagaataaaatacctaggaatccagcttacaagggatgtgaaagacctcttcaaggagaactataaaccactgctcaatgaaataaaagaggatacaaacaaatggaagaacattccatgctcatgggtaggaagaatcaatatcatgaaaatggccatactgcccaaggtaatttatagattcaatgccatccccatcaggctaccaagaactttcttcatagaattggaaaaaactactttaaagttcatatggaaccaaaaaagggcccacattgccaagtcaatcctaagccaaaagaacaaagctggagatatgtgaaacagagcaagaaaatagctgtctatgcagaaagaagcaggtgctcaccaggcactgaatttgctggcaccttgatcttggacttcccatcctccagaactgcaccctccagtaggggcagactgacgcctcacacggccaggtacccctctgagacaaagcttccagaggaacgatcaggcagcaacatttgctgttcagcaatattcgctgttctgcagcctctgctgctgatatccaggcaaacagggtctggagtggacctccagcaaactccaacagacctgcagctgagggaacgcagctcctcgccagcaacggaacaaagctggatggagaatgactttgacgagttaagagaaggcttcagacgatcaaactactccaagctaaaggaggaagttcaaacccattgcaaagaagctaaaaaccttgaaaaaagattagacgaatggataactagaataaccaatgtagagaagtccttaaatgacctgatggagctaaaaaacatggcaaaagaactacgtgatgaacgcacaagcttcagtagcgaattcaatcaactggaagaaagggtatcagtgattgaaaatcaaatgaacgaaatgaagcgagaagagaagtttagagaaaaaagagtaaaaagaaatgaacaaagcctccaagaaatatgggactatgtgaaaagaccagatgagatctacatctga

SEQ ID NO: 121624 - DNA, 2448 bp, Homo sapiens
atgaaagtccagaagcttctggcagccaccttttccatcacagtacagccagccttggggggcagactgacacctcacacggccgggtactcctctgagacaaaacttccagaggaacgatcaggcagcagcatttgctgttcaccaatattcgctgttctgcagcctcaactgctgatatccaggcaaacagggtctggagtggacctctggcaaactccaacagacctgcagctgagggtcctgtctgttagaaggaaaactaacaaacagaaaggacatccaccccaaaaacccatctgtacgtcaccatcatcgaagaacaaagttgcaaagctaacagctccttatgagaactcaaaaggcactccttatgttcccagcaataaagatctaaggcccaacagatttgtgagtatccaagagatcgaattctttcttctgaggggggcaagaattgaggttgttgcagacccgtatagaagtgaatttgccactgatgcagaaaaagcagttgacaaaatccaccatctctttatgattaaaaccctcagcaaaatggacattaaagggacgtaccttaaggtaataaaaatcatctatgacaaacccacagccaacatcatactgaatggggaaaagtttaaagcattccctcagagaactggagcaaaacaaggatgcccattttcaccatttctattcaacacattatcagaagttctagcgagagcaatcaaacaagagaaagaaatcaagggcatccaaatgggtaaagaggaagtcaaactgttgctttttgctgaagatatgaccgtatacctagaaaaccctaaagactcatccaaaaaactcctagaactgcctctgctgctgatacccaggcaaacagggtctggagtggacctccagcaagctccaacagacctgcagctgagggtcctgactgttagaaggaaaactaacaaacagaaaggacatccacagcaaaaccccatctgtacgtcaccatcatcaaagaccaaagacagatcaatgagacagaaagttaacaaggatatccaggaattgaactcagctctgcaccaagcagacctgatagacatctacagaactctccaccccaaatcaacagaatatacattcttctcagaaccacaccacacctgttccaaaattgaccacatagttggaagtaaagctctcctcaggaaatgtaaaagaacagaaattataacaaactgtctctcagaccacagtgcaatcaaactagaactcaggattaagaaacgcacgcaaaaccgctcaactacatggaaactgaacaacctgctcctgaatgactactgggtacataacgaaatgaaggcagaaataaagatcttctttgaaaccaaagagaacaaagacacaacataccagaatctctgggatgcattcaaagcagtgtgtagagggaaatttatagcactacatgcccacaagagaaagcaggaaagatctaaaattgacacactaacatcacaattaaaaggaccagagaagcaagagcaaacacattcaaaaactagcagaaggcaagaaataactaagatcagagcagaactgaaggaaatagagacaccaaaaacccttcaaaagctcaatgaatccaggagctgtttttttgaaaagatcaacaaaattgatagaccactagcaagactaataaagaagaaaagagagaagaatcaaacagatgcaataaaaaatgataaaggggatatcaccaccgatcccacagaaacacaaactaccatcagagactaccataaacacctctacgcaattaaactagaaaatctagaagaaatggataaattcctcgacacatacactctcccaagactaaaccaggaatctctgaatagaccaataacaggctctgaaattgaggcaataattaatagcttaccaaccaaaaaaaagtacaggaccagacggattcacagccgaattctatcagaggtacaaggaggagctgtgttggaagttctggccagggcaatcaggcaggagaaagaaataaagtgtattcaattaggaaaagaggaagtcaaattgtccctgtttgcagacgacatgattgtatatctagaaaaccccactgtttcagcccaaaatctccttaagctgataagcaacttcagcaaagtctcacgatacaaaatcaatgtgcaaaaatcacaagcattcttatacactaataacagacaaacagagagccaaatcatgagtgaactcccattcacaattgcttcaaagagaataaaatacctaggaatccaacttacaagggatgtgaaggatctcttcaaggagaactacaaaccactgctcaacgaaataaaagaggacacaaatggaagagcattccatgcccacggattggaagaatcaatatcatga

SEQ ID NO: 121625 - DNA, 4476 bp, Homo sapiens
ttatggtgatgtacagatggggttttggtatggatgtcctttctgtttgttagttttctttctaacggtcaggaccctcagctgcaggtctgttggagtttgctggaggtccactccagaccctgtttgcctgggtatcaccagcggaggcttttcaatttggatgccctttatttctttctcttgtctaattgctccagacattacttccactactatattgaaaaacagcagtaaaagtgggcattcttgtcttgttccagtcagcatgtcgttttttgactttttagtaattgccattctaactggtgcaagttggtatctcagcgtgattttgatttgcatttctctaatgatcagtgatgttgagctttttttcatatgttcatcagcctcatgtatgtctgcttttgagaagtatctgttcatgtcctttgcccactttttaatagggttgtttgcttttttcttgtaaatttgtttgagttctttgtagattctggatattagccctttgtcagataagtagattgcaaaaatgttctcccattctgtaggttgcctattcactctgacggtagtttcttttgctgtgcagaagctctttagtttaattagatcccatttgtcaattttggcttttgttgccattgcttttggtgttttagacatgaagtcctttcccatgcctatgtcctgaatggtattgcctaggttttcttctagggtttttatggttttaggtctaacatttaagtttttaatccatcttgaattaatttttctacaaggtgtaaggaagagatccagtttcagctttctacatacggctagccagttttcccagcaccatttattaaataggaaatcctttccccatttcctgcttttgtcagatttgtcaaagatcagatagttgtagatgtgtggcattatttctgagggctctgttctgttccaatggtctatatcgctgttttggtaccagtaccatgctgttttggttactgtagccttgtagtatagtttgaagtcaggtagcgtgatgcctccggctttgttcttttggcttaggattgtcttggcaatgcgggctcttttttggttccatatgaactttaaagtagttttttccaactctgtgaagaaagttatgggtagcttgatggggatagcattgaatctataaattaccttgggcagtatggccattttcacaatattgattcttcctatccatgagcatggaatgttcttccatttgtttgtgtcctcttttatttcattgagcagtggtttgtagttctccttgaagaggtccttcacatcccttgtaagttgtattcctaggtattttattctctttgaagcaattgtgaatgggagttcactcatgatttggctctctgtctgtctgttattggtgtataggaatgcttgtgatttttgcacattgattttgtatcctgagacttcgctgaagttgcttatcagcttaaggagattttgggctgagacgatggggttttctaaatatacaatcatgtcatctgcaaacagggacaatttgacatcctcttttcctaattgaataccctttatttctttctcttgcctgattgccctggccagagcttccaacactatgttgaataggagtggtgagagaggacatccctgtcttgtgccagtcttaaaagggaatgcttccagtttttgcccattcagtatgatattggctgtgggtttgtcataaatagctcttattattttgagatatgtcagatatgtcccatcaatacctagtttattgagagtttttagcataaagggctgttgaattttgtcaaaggccttttctgcttctattgagataatcatgtggtttttgtctttggttctgtttatatgatggattacgtttattgatttgagtatgttgaaccagccttgcatcccagggatgaagccaacttgatggtggtggataagctttttgatgtgctgctggatttggtttgccagtattttattgaggatttttgcatcgatgttcatcagggatattggtctaaaattctctttttttgttgtgtctctgccaggctttgatatcaggatgatgctggcctcataaaatgaattagggaggattccctctttttctattgattggaatagtttcagaaggaatggtaccagctcctctttgtacctctggtagagttcagctgtgaatctgtctggtcctggactttttttggttggtagactattaattattgcctcaatttcagaacctgttattggtctattcacagattcaacttcttcctggtttagtcttgggagggtgtatatgtccaggaatttatccatttcttctaggtgttctagtttatttgcatagaggtgtttatagtattctctgatggtagtttgtatttctgtgggattggtggtgatattccctttatcattttttattgcatctatttgattcttctctattttcttctttattagtcttgctagcagtctatcaattttgttgatcttttcaaaaaaccagctcctggattcattgatttttttgaagggctttttgtgtctctatttccttcagttctgctctgatctggcctttggtctttgatgatggtgacgtacagatggggttttggtgtggatgtcctttctgtttgttaagttttcctttctaacagtcaggaccctcagctgcaaggtctgttggagtttgctggaggtccactccagaccctgtttgcctgagtatcagcagtggtggctgcagaacagctgatattggtgaactgcaaatgctgctgcctgattgttcctctggaacttttgtctcagaggagtacccggccatgtgaggtgtcagtctgcccctactggggggtgcctcccagttaggctgctcgggggtcagggacccacttgaggaggcagtctgcccattttcagatctccagctgcgtgctgggagaaccactgctctcttcaaagctgtcagacagggacatttaagtctgcagaggtaactgctgtctttttgtttgtctgtgcccatattgccatgtaaaatcaaagtcctgagggaggagccaagatggccgaataggaacagctccagtctacagcccccagcatcagcgacgcagaagacgggtgatttctgcattaccaactgagcctccactggtgatacccaggcaaacagggtttggagtggacctccagcaaactccaacagacctgcagctgagggtcctgactgtgagaaggaaaactaccaaacaggaaggacattccaccaaaaccccatctgtacgttaccatcatcaaagaccaaaggaagataaaaccacaaagatggggagaaaccagagcagaaaagctgaaaattctaaaaatgagagcgcctcttctcctccaaaggaatgcagctcctcgccagcaacagaacaaagctggatggagaatgactttgacaagtacacagaagtaggcttcagacaactggtaataacaaacttctctgagctaaaggaagatgttcaaacccatcacaaagaagctaaaaatcttgaaaaaagattagacgaatggctaactagaataaacagcatagagaataccttaattgatctgatggagctgaaaaccatggcacgagaactacgtgactcatgcacaagcttcagtagacaattcgatcaagtggaggaaagggtatcagtgattgaagatcaaatgaacgaaatgaagcgagaagagaagtttagagaaaaaaagatgctggaagttctgcccagggcaatcaggcaggagaaagaaataaagggtattcaattaggaaaagaggaagtcaaattgtccctgtttgcagataacatgactgtatatttagaaaaccccatcatctcagcccaaaatctccctaagctgataagcaacttcagcaaagtctcaggatataaaatcaatgtgcaaaaatcacaagcattcctatacaccaataacagacaaacagagagccaaatcatgagtgaactctcattcacaattgcttcaaagagaataaaatacctaggaatccaacttaaaagggatgtgaaggaactcttcaagaactacaaaccactgctgaaggaaataaaggaagacacaaacaaatggaagaacatcccatgttcatgggtaggaagaaccaatatcgtgaaaatggccatactgcccaagataatttatagattcaatgctatccccatcaagccaccaatgactttctttacagaattggaaaaaactactttaaagttcataaggaaccaaaaaagagcccacattgccaagacaatcctaagcaaaaagaacaaagctggaggcatcatgctacctgacttcaaactatactacaaggctacagtaacaaaaacagcatggtaa

SEQ ID NO: 121626 - DNA, 573 bp, Homo sapiens
atgtctgcagcatgtgggcagaactacaccttggccttgatggaaatgggctccgtgtttgcgtttggggagaacaagatggggcagctgggccttggcaacctgacagacactatccccagccccgcacagataatatacaatggccagccaattaccaaaatggcctttggggctgaattcagtatgataatggactgcaaaggaaacctctattcctttgggtgccatgaatatggtcagctgggacacaactcggatgggaagttcatcgcccgggcacggcggacagatggctatggccggctgggccacgcagagcaggatgagatggtcccccacctggtgaagctgtttgacttccctggacatcgggtgtcccagatctatactggttacacctgctcctttgccatcagtgaagtgggtggtctgtttttccagggggccaccaacacctcccgtgaatctaccacatacccaaaagcagtgcaggacctctgtggctggataatccagagcctggcttgtgggaagagcagcatcattgtggccaccgagagagcaccatag

SEQ ID NO: 121627 - DNA, 1407 bp, Homo sapiens
atgagcctgggcttagcaagtgagcggctgtgggcaggtttggggttgcccgcattgccacttgccgatgagggaggggagtgtggggagactctgttcgtgtggaggtcacagaaacttgaagggtcaaagtgcaaagggcagcttttgatttttggggcaaccaactgggacttgattggtcgaaaagaagtgcctaaacagcaagctgcttaccgcaatctcggtcagaatttgtgggggccccacagatatgggtgcctggcgggggtccgggtgcggacagtggtctcgggctcgtgtgctgcacacagcctcctcatcaccacggaagggaagctgtggagctggggtcgaaatgagaaggggcagctgggacatggtgacaccaagagagtagaagcccctagactcatcgagggtcttagccacgaagtgattgtgtctgcagcatgtgggcggaaccacaccttggccttgacggaaacgggctccgtgtttgcgtttggggaaaacaagatggggcagctgggccttggcaaccagacagacgctgttcccagccccgcgcagataatgtacaacggccagccaattaccaaaatggcctgtggggctgaattcagtatgataatgggactgcaaaggaaacctctattcctttggggtgccctgaatatgggtcagctggggacacaactcaggatggggaagtttcattcgcccggggcacagcggatagagtacgactgtgaactagttccccggcgagtggccatcttcattgagaagacgaaagatggacagattctgcctgtaccaaacgtggttgtacgagacgtggcctgtggcgctaaccacacgctggtcctggactcccagaagcgagtcttctcctggggctttggtggctatggccggctgggccacgcagagcagaaggatgagatggtcccccgcctggtgaagctgtttgacttccctgggcgtggggcttcccagatctatgctggttacacctgctcctttgctgtcagtgaagtgggtggtctgtttttctggggggccaccaacacctcccgtgaatctaccatgtacccaaaagcagtgcaggacctctgcggctggagaatccggagcctggcttgtgggaagagcagcatcattgtggccgccgatgagagcaccatcagctggggtccgtcaccgacctttggggaactgggctacggggaccacaagcccaagtcttccactgcagcccaggaggtaaagactctggatggcattttctcagagcaggtcgccatgggctactcacactccttggtgatagcaagagatgaaagtgagactgagaaagagaagatcaagaaactgccagaatacaacccccgaaccctctga

SEQ ID NO: 121628 - DNA, 477 bp, Homo sapiens
atggtggcagaggatgcatctgtgggaagcacagaatgccttgctgctcacagaaccccactagctccgagtatagtgaccctgatttttccttacaatcatgcctgctttggagactctagagaggtggctatgtccccagggagagtctttatccctaaagaaaagcctatagaaactcgtaaagaagaaaaagtgacccttgacccagaactggaagaagctttggccagtgcctctgacaccgaactctatgatcttgcagctgtccttggagtacacaatttgctcaacaatccaaagttcgatgaagaaacagccaacaataaaggtggcaaaggacctgtcagaagtaagttgatgtgcaatctgtggttttgtaaagctttggagcctccagagttgctggatcacttgggctttgagcaatcaaaccagaacagagcagctgacaatgagagctccatctggcggtga

SEQ ID NO: 121629 - DNA, 1218 bp, Homo sapiens
atgcttatagaaggacacctagtatggggtaatcccctccaggaaaccaagccccagtactcagaagaagaaatagaatggggaacctcacggggacatagtttcctcccctcaggatggctagccaccaaagaaggaaaaatacttttgcctgcagctaaccaatggaaattacttaaaacccttcaccaaacccttcacttaggtattgatagcacccatcagatggccaaatcattatttactggaccaggccttttcaaaactatcaagcagatagtcagggcctgtgaagtgtgccaaagaaataatcccctgccttatcgccaagctccttcaggagaacaaagaacaggccactacccaagagaagactggcaactagattttacccatatgcccaaatctcagggatttcagtatctactagtttgggtagatactttcactggttgggcagaggccttcccctgtaggacagaaaaggcccaagaggtaataaacgttcatgaaataattcccagattcggacttccccaaggcttacagagtgacaatggccctgctttcaaggctacagtaacccaaggagtatcccaggtgttagccttactaagaatccgaaactctccccaaaaagcaggacttagtccatacaaaatgctgtatggacggcccttcctaaccaatgaacttgggcttgaccgagagacagccaacttagttgcagacatcatctccttagccaaatatcaacaggttcttaaaacattacagggagcctgtccccaagaagagggaaaggaactattccaccctgtggcccctatgcccatctacactgaacaagatttatacaatcatgtcatacctaagccccgcaacaaaagagtacccattcttccttttgttattggagcaggagtgctaggcggagtagctactggcattggcggtatcacaacctctactcagttctactacaaactgtctcaagaactaaatggtgacatggaatgggtcgctgataccctggtcaccttgcaagatcaacttaactccctagcagcagtagtccttcaaaatcgaagagctttagacttgctaaccgcggaaagcgggggaacctttttatttttagaggaaaaatgctgttgttatgttaatcaatccggaatcatcaccgagaaagttaaagaaattcaaggtcgaatataa

SEQ ID NO: 121630 - DNA, 1929 bp, Homo sapiens
atgcctgaaagccccactcccttgttagggagagacattctagcaaaagcaggggccattatacacctgaacataggagaaggaacacctgtttgttgtcccctgcttaaggaaggaattaatcctgaagtctgggcaacagaaggacaatatggacgagcaaagaatgcccatcctgttcaagttaaactaaaggattctgcctcctttccctaccaaaggcaatacccccttagacctgaggcccaacaaggactccaaaagattgttaaggacctaaaagtgcaaggcctagtaaaaacatgcaatagcccctgcgatactccaattttaggagtacagaaacccaatggacagtggaggttggtgcaagatctcaggattatcgatgaggccattgtccctctatacccagctgtacctaacccttatactctgctttcccaaataccagaggaagcagagttgtttacagtcctggaccttaaggatgcctttttctgcatccctgtacatcctgagtctcaattcttgtttgcctttgaagatccttcaatcccaatgtctcaactcacctggactgttttaccccaagggttcagggatagtccccatctatttcaccatacattagcccaagacttgagccagttctcatacctggacactcttgtcctttgcctcccgttgagaaaccaacaggagtgccatcaagccacccaagtgctcttaaatgtcctcgctacctgtggctacaaggtttccaaacaaaaggctcagctctgctcacagcaggttaaatacttaggggtaaaattatccaaagggaccagggccctcaacaatgaagaacagatagaacataactgtcaacaagtaattgctcaaacctacgccactcgaggggaccttctagaggttcccttgactgatcccaacctcagcttgtatactgatggaagttcttttgtagaaaaaggacttcaaaaaggggggtatgcagtggtcagtgataatggaatacttgaaagaaatcccctcactccaggaactagtgctcagctggtggaactaatagccctccctcgggcactagaattaggagaaggaaaaaggggctcatcagaatctatatgcttcctctcattcttagtgccccctatgaccatctacactgaacaggatttatacaatcatgtcgtacctaagccccgcaacaaaagagtacccattcttacttttgttgtgggagcaggagggttaggcggattaggtactggcattggcggtatcacaacctctactcagttctactacaaactatctcaagaactaaatggtgacatggaatgggttgctgactccctagtcaccttgcaagatcaacttaactccctagtagcagtagttcttcaaaatcgaagagctttagacttgctaaccgccaaaagagggggaacctgtctatttttaggggaagaatgctgttattatgttaatcaatccggaatcgtcacagagaaagttaaagaaattagagatcaaatacaacgcagagcagaggagcttcaaaacaccggaccctggggccttgtcagccaatggatgccctggattctccccttcttaggacctctagcagctataatattgttattcctctttggaccctgtatctttaacctccttgttaagtttgtctcttccaaaattgaagctgtaaagctacaaatcattcttcaaatggagccccagatgcagtccatgactaaatctaccacggacccctggaccagcctgctagcccatgctctgatgttaatgacatcaaaggcacccctcctgaggaaatctcaactgcacaacacctactatgccccaattcagcaggaagcagttagagcggtcatcagccaacctccccaatag

SEQ ID NO: 121631 - DNA, 1341 bp, Homo sapiens
atggcaaagattaaagaaagaaatccatacaatgaagaaaatatagaacataactgtcaacaagtaattgctcaaacctatgccgctcgaggggaccttctagaggttcccttgactgatcccagcctcaacttgtatactgatggaagttcctttgtagaaaaaggacttcgaaaagtggggtatgcagtggtcagtgataatggaatacttgaaagtaattccttcactccaggaactagtgctcagctggcagaactaatagccctcagtcaggcactagaattaggagaaggaaaagggacagaaaaggcccaagaggtaataaaggcactagttcatgaaataattcccagatgcggacttccccgaggcttacagagtgacaatggccctgctttcaaggcaacagtaacccagggactatcgcagatgtcagatacatcctgggaaggacgctacccggtcattttatctaccccaaccgcggttaaagtggctggagtggagtctaggatacatcacactcgagtcaaaccctggctactgccaaaagaacccggaaatccaggagacaacgctagctattcctgtgaacctctagaggatctgggcctgctcttcaagcaacaaccgccacatatttcaatccctgtacctgaacaatggaacaacttcagcacagaaataaacaccacttccattttagtaggacctcttgtttccaatctggaaataacccatacctcaaacctcacccgtgtaaaatttagcaatactatagacacaaccaactcccagtgcatcagatgggtaactcctcccacacaaatagtctgcctaccctcaggaatattttttgtctgtggtacctcagcctatcactgtttgaatggcttttcggaatctatgtgcttcctctcattcttagtgcaccctatgaccatctacactgaacaagatttatacaattatgtcgtacctaagccccgcaacaaaagagtacccattcttccttttgttatccgagcaggaatgctaggcagattaggtactggcatgggcagtatcacaacctctactcagttctactacaaactatctcaagaactaaatggtgacatggaacgggttgccgactccctggtcaccttgcaagatcaacttaactccctagcagcagtagtacttcaaaatcgaagagctttagacttgctaactgcagaaagagggggaacctgtttatttttaggggaagaatgctgttattatgttaatcaatctggaatcatcactgagaaagttaaagaaattcgagatggaatacaacgcagagcatag

SEQ ID NO: 121632 - DNA, 846 bp, Homo sapiens
cctttgccactacatcaatttccttagtcaggtatgccacaggttgcaagctcatccctcggatctgtgtaaggactcctagagctattcctgttttttctgtgacatatgaagaaaagtcttgccctgttggcaaacttaacactggggcttgggttagggcctggaaagccacttctacttcagttgtccatcttactaaatgggtattggctttctgagtttccttaattagtgtatttaatgacctggctatttcgccatacctgggaatccattttcggcagaaacctattacgccaaggaatccccttagttgctttagggttttgggatgaggataagccagtataggctggatgtgttcctcactgagggccctggtgcctttggataattttagccctaagtaacctgctgtgagcagagttgagcctttggtttggaaaccatgtagccacaggtagcgaggaaattgaagagcgcttgggtggcttgatggcacaaggtttctccactgtctgttgggtttctgtactcctaaaattggagtactgcaggggttactgcatggttttactaggccttgggcttttaggtccttaacaatcttttggagtccttgttgggccttgggtctgagggggtactgcctttggtagggaaaggaggtggaatcctttagtttaacttgaacaggacgggcattctttgctcgtccatattgtccttctgttgcccagacttcaggattaattccttcctcaagcaggggacaacaaacgggtgttccttctcctatgttcaggtgtataatggcccctgcttttgctagaatgtctctcc

SEQ ID NO: 121633 - DNA, 611 bp, Homo sapiens
ttatattcgaccttgaatttctttaactttctcggtgatgattccggattgattaacataacaacagcatttttcctctaaaaataaaaaggttcccccgctttccgcggttagcaagtctaaagctcttcgattttgaaggactactgctgctagggagttaagttgatcttgcaaggtgaccagggtatcagcgacccattccatgtcaccatttagttcttgagacagtttgtagtagaactgagtagaggttgtgataccgccaatgccagtagctactccgcctagcactcctgctccaataacaaaaggaagaatgggtactcttttgttgcggggcttaggtatgacatgattgtataaatcttgttcagtgtagatgggcataggggccacagggtggaatagttcctttccctcttcttggggacaggctccctgtaatgttttaagaacctgttgatatttggctaaggagatgatgtctgcaactaagttggctgtctctcggtcaagcccaagttcattggttaggaagggccgtccatacagcattttgtatggactaagtcctgctttttggggagagtttcggattcttagtaagg

SEQ ID NO: 121634 - DNA, 902 bp, Homo sapiens
ctatgctctgcgttgtattccatctcgaatttctttaactttctcagtgatgattccagattgattaacataataacagcattcttcccctaaaaataaacaggttccccctctttctgcagttagcaagtctaaagctcttcgattttgaagtactactgctgctagggagttaagttgatcttgcaaggtgaccagggagtcggcaacccgttccatgtcaccatttagttcttgagatagtttgtagtagaactgagtagaggttgtgatactgcccatgccagtacctaatctgcctagcattcctgctcggataacaaaaggaagaatgggtactcttttgttgcggggcttaggtacgacataattgtataaatcttgttcagtgtagatggtcatagggtgcactaagaatgagaggaagcacatagattccgaaaagccattcaaacagtgataggctgaggtaccacagacaaaaaatattcctgagggtaggcagactatttgtgtgggaggagttacccatctgatgcactgggagttggttgtgtctatagtattgctaaattttacacgggtgaggtttgaggtatgggttatttccagattggaaacaagaggtcctactaaaatggaagtggtgtttatttctgtgctgaagttgttccattgttcaggtacagggattgaaatatgtggcggttgttgcttgaagagcaggcccagatcctctagaggttcacaggaatagctagcgttgtctcctggatttccgggttcttttggcagtagccagggtttgactcgagtgtgatgtatcctagactccactccagccactttaaccgcggttggggtagataaaatgaccgggtagcgtccttcccaggatgtat

SEQ ID NO: 121635 - DNA, 2678 bp, Homo sapiens; identical to SEQ ID NO: 117139

SEQ ID NO: 121636 - DNA, 459 bp, Homo sapiens
atggccgtgcggtataccgacgagaacgtactgagaaagggaacgagggaagcggggacgatgatgcgcttacgaggcacgaccgagtgctgcgccgattttgcggcatgggatgttacgcacgacgcactgcgcgcgacaggtggagaattgcctggcgcgcaggtgatgttaaccacaaccgaatgcgggagacatgtggacttttgtgaccgggccgtgtggctgccgcgcatgtgggggtacccactggccttacctggagagatgaggaaattgtacaccgtgcgtatggcggggagagacattctagcaaaagcaggggccattatacacctgaacataggagaaggaacacctgttcgttgtcccctgcttgaggaattaatcctgaagtctggaaaacagaaggacaatataggcaagcaaagaatgcccgtcctgttcaagttaaactaa

SEQ ID NO: 121637 - DNA, 910 bp, Homo sapiens
gatacttctcccagccactaagttatgaactggggagctttattcttttcacatgcttttctaattatgcttgaaagccccactaccttgttagggagagacattctagcaaaagcaggggccattatacacctgaacataggagaaggaacacccgtttgttgtcccctgcttgaggaaggaattaatcctgaagtctgggcaacagaaggacaatatggacgagccaaagaatgcccgtcctgttcaagttaaactaaaggattctgcctcctttccctaccaaaggcaatacccccttagacctgaggcccaacaaagggcttccaaaagattgttaaggacctaaaagcccaaggcctagtaaaaccatgcaatagcccctgcagtactccaattttaggagtacagaaacccaacggacagtggaggttagtgcaagatctcaggattatcgatgaggccattgtccctctatacccagctgtacctaacccttatactctgctttcccaaataccagaggaagcagagttgtttacagtcctggaccttaaggatgcctttttctgcatccctgtacatcctgagtctcaattcttgtttgcctttgaagatccttcaatcccaatgtctcaactcacctggactgttttaccccaagggttcagggatagtccccatctatttcaccatacattagcccaagacttgagccagttctcatacctggacactcttgtcctttgcctcccgttgagaaaccaacaggagtgccatcaagccacccaagtgctcttaaatgtcctcgctacctgtggctacaaggtttccaaacaaaaggctcagctctgctcacagcaggttaaatacttaggggtaaaattatccaaagggaccagggccctca

SEQ ID NO: 121638 - DNA, 1307 bp, Homo sapiens
atgaaattgtcagcagactcaataatcaccctaaggggcatcattctggatgccgacattctctatgatggaaagggactgaaagaactcagcctagctctaggactcacccctgagcacaaaggcaatgttgggcacgctggtaaaggaccactagaatccagcagcccggacccctttctttgtgatcaagaaaggcgggaaaagggggagagacattctagcaaaagcaggggccattatacacctgaacataggagaacacccgtttgttgtcccctgcttgaggaaggaattaatcttgaagactgggcaacagaaggacaatatggacgagcaaagaatgcccgtcctgttcaagttaaactaaaggattctgcctcctttccccaccaaaggcagtacccccttagacccgaggctcaacaaggactccaaaagattaaggacctaaaagcccaaggcctagtaaaagcatgcaatagcccctacaataatccaactttaggagtacagaaacccagtggacagtggaggttagtgcaagatctcaggattatcaatgaggtcactgtccctctatacctagctgtacctaacccttatattctgctttcccaaataccagaggaagcagagtggtttacagacctggaccttaaggatgcctttttctgcatccctgtacatcctgactctcaattcttatttgcctttgaagatccttcaaacccaatgtctcaactcacctggactgtttcaccccaagggttcagggatagcccccatctatttggccaggcattagcccaagacttgagccggttctcatacctgggcactcttgtcctttggccatgcatttcaatccctgtacctgaacaatggaacaactacagcacagaaataaacaccacttccgttttagtaggacctcttgtttccaatctggaaataacccatacctcaaacctcacctgtgtaaaatttagcaatactgtagacacaaccaactcccaatgcatcagtgcccccatgaccatttacactgaacaagatttatacaattatgttgtacctaagccccacaacaaaagagtactcattcttccttttgttatcggagcaggagtgctaggtggactaggttctggcattggcggtaccacaacctctactcagttctactacaaactatctcaagaactcaatggtgacatggaatgggttgccgactccctggtcaccttgcaagatcaacttaacttcctagcatcagtagtccttcaaaattgaagagctttaga

SEQ ID NO: 121639 - DNA, 3831 bp, Homo sapiens
atgcctcttctccaaatgattgcaacacctctccagcaatctctgatttctacggaggatgagatggatgaattgacagaagtaggctttgaaaggtgggtaataacaaacttcactgaggaacccagcccagctctaggattcacccctgagcacaaaggcaatgttgggcatgctggtaaaggaccactagaatccagcagcccagacccctttctttgtggtcaagaaaagcaggaaaagggtgcaggactgctacatcggcagtacccccttagacttgaggccaaacagggactcaaaaaaattgttaaggacctaaaagcccaaggcctagtaacaccatgcagtagcccctgcaatactccaactttagcagtacagaaacccaacggacagtggaggttagtgcaagatctcaggattatcaatgaggctgttgtccctctatacccagctgtacctaacccttacattctgctttcccaaataccagaggaagcagagtggtttacagtcctggaccttaaggatgcctttttctgcatccctgtacatcctgactctcaattcttgtttgcctttgaagatccttcaaacccaatgtctcaactcacctggactgttttaccccaagggttcagggatagcctccatctatttggccaggcattagcccaagacttgagccagttctcatacctggacactcttgtccttcagtatatggatgatttacttttagtgacccattcagaaaccttgtgccatcaagccacccaagcgctcttcaatttcctcgctacctgtggctacatggtttccaaaccaaaggctcaactctgctcacagcaggttacttagggctaaaattatccaaaggcaccagggccctcagtgaggaacacatccagcctatactggcttatcctcatcccaaaaccctaaagcaactaaggggattccttggcgtaataggtttctgccgaaaatggattcccaggtatggcgaaatagccaggtcattaaatacactaattaaggaaactcagaaagccaatacccatttagtaagatggacaactgaagtagaagtggctttccaggccctaacccaagccccagtgttaagtttgccaacagggcaagacttttgttcatatgtcacagaaaaaacaggaatagctctaggagtccttacacagatccgagggatgagcttgcaacctgtggcacacctgactaaggaaattgatgtagtggcaaagggttgacctcattgtttacgggtagtggtggcagtagcagtcttagtatctgaagcagttaaaataatacagggaagagatcttactgtgtggacatctcatgatgtgaatggcatactcactgctaaaggagacttgtggctgtcagacaactgtttacttaaatgtcaggctctattacttgaagggccagtgctgcgactgtgcacttgtgcaactcttaacccagccacatttcttccagacaatgaagaaaagataaaacataactgtcaacaagtaatttctcaaacctatgccactcgaggggaccttttagaggttcctttgactgatcccgacctcaacttgtatactgatggaagttcctttgtagaaaaaggacttcgaaaagtggggtatgcagtggtcagtgataatggaatacttgaaagtaatcccctcactccaggaactagtgctcagctagcagaactaatagccctcacttgggcactagaattaggagaagaaaaaagggcaaatataatacagactctaaatatgcttacctagtcctccatgcccatgcagcaatatggaaagaaagggaattcctaacttctgagagaacacctatcaaacatcaggaagccattaggaaattattattggctgtacagaaacctagagaggtggcagtcttacactgccggggtcatcacaaaggaaaggaaagggaaatacaagagaactgccaagcatatattgaagccaaaagagctgcaaggcaggaccctccattagaaatgcttattaaacttcccttagtatagggtaatcccttccgggaaaccaagccccagtactcagcaggagaaacagaatggggaacctcacgaggcagttttctcccctcgggacggttagccactgaagaagggaaaatacttttgcctgcaactatccaatggaaattacttaaaacccttcatcaaacctttcacttaggcatcgatagcacccatcagatggccaaatcattatttactggaccaggccttttcaaaactatcaagcagatagtcagggcctgtgaagtgtgccagagaaataatcccctgccttatcgccaagctccttcaggagaacaaagaacaggccattaccctggagaagactggcaactgattttacccacaagcccaaacctcagggatttcagtatctactagtctgggtagatactttcacgggttgggcagaggccttcccctgtaggacagaaaaggcccaagaggtaataaaggcactagttcatgaaataattcccagattcggacttccccgaggcttacagagtgacaatagccctgctttccaggccacagtaacccagggagtatcccaggcgttaggtatacgatatcacttacactgcgcctgaaggccacagtcctcagggaaggtcgagaaaatgaatgaaacactcaaaggacatctaaaaaagcaaacccaggaaacccacctcacatggcctgttctgttgcctatagccttaaaaagaatctgcaactttccccaaaaagcaggacttagcccatacgaaatgctgtatggaaggcccttcataaccaatgaccttgtgcttgacccaagacagccaacttagttgcagacatcacctccttagccaaatatcaacaagttcttaaaacattacaaggaacctatccctgagaagaggaaaagaatattccacccaagtgacatggtattagtcaagtcccttccctctaattccccatccctagatacatcctgggaaggaccctacccagtcattttatctaccccaactgcggttaaagtggctggagtggagtcttggatacatcacacttgagtcaaatcctggatactgccaaaggaacctgaaaatccaggagacaacgctagctattcctgtgaacctctagaggatttgcgcctgctcttcaaacaacaaccaggaggaaaaatcgaagctgtaaaactacaaatggagcccaagatgcagtccaagactaagatctaccgcagacccctggaccggcctgttagcccacgatctgatgttaatgacatcaaaggcacccctcctgaggaaatctcagctgcacaacctctactacgccccaattcagcaggaagcagttagagcggtcgtcggccaacctccccaacagcacttaggttttcctgttgagatgggggactgagagacaggactagctggatttcctaggctgattaagaatccctaagcctagctgggaaggtgaccacatccacctttaaacacggggcttgcaacttagctcacacctgaccaatcagagagctcactaaaatgctaattaggcaaagacaggaggtaaagaaatagccaatcatttattgcctgagagcacagcaggagggacaatgatcgggatataaacccaagttttcgagccggcaacggcaaccccctttgggtcccctccctttgtatgggagctctgttttcatgctatttcactctattaaatcttgcaactgc

SEQ ID NO: 121640 - DNA, 872 bp, Homo sapiens
agtgtctgttcttgactctttcttgcggatgcacctctgattctgtaagatcaagatgggggcatccgtacatctctagttgtgctgcaatatgccagcagctcaacatcgagaacgagcgagtaacgaatccaggcatggagggtgctgtcctccacttggctgctaagctcggccctccgcatgatgccttcacaactccccaagaagcggtgctgtctgctccttcggccttgccctcctctgccgccacatccctcctttcccttctcaccccacaacagatgttttgctccaagacagctgggcctaagcccttcagttcgaatcctcatccaagactgaaagctcctacatcttcctgtcactttagccacaagctgcaccgtctggaaatgcccactgctactagggacacaggcgaggccggacagtgccggaggacccggggtgcctctctccacgtgcgcggcctcacaggacaagcggcacctccagtccaccctcgctccagccctcccgtactatacccccggcatcctctgccccgaagcagggagatgccgggagccctccctaccaggctgtaccggagaaaaacaaacctggagccacaccgcgcacatgcgcagaaagcccaaagcggctcccgcgaccggggccaaaaagtttcttatgaattacatctccctgatgatttggctgtcctcaacatttcctcgtttggcagaattcaggtgtggaatttctccagacacggtcggttcctgtggcccgctgccgcggcggcaccacctccacttgcgctgtggctccacttgcttggttctggtccactggacgctcaccctgagaaaacacgctggacatga

SEQ ID NO: 121641 - DNA, 807 bp, Homo sapiens
atggactgcttcaggctactgcactccagcctgcgcaacagatctagatctttctttaaaaaaaagaggaagaagaagaaggaggaggaggagaaggagaagaaaagaagaagaagaagaagacggaggaggaggaggaagaagaggaggagaggaagaagagaggaggaagaaggagaagaagaaggagaggaagaagaggaggaggaggagaaggaagaaagaactggtgctggagacagcagtgaggatgaggggtttgatgagatcccatccccaggggattccagacagaaaacggaaggaaatgcagcaaacatcatttcaggctgtgatcagcgttatgaggaaagtgagatggatttagggactagaggaattgtctcaggccatagatatatcttcactttccgtgtgagtcctttggaggccatcggggagctgctgttccccttcagcgtggctcctgctcagggaggtcttggcttccgcagggtggaccagcttgcactgcctatgggtgcgcagtccctggaacgccctttctgtgtggatggaggctcacgacccccgcttaattatgccgtgtcctccgttgaagacctcctcaatgggaacaattttaaatgccccactactctaagaaccattgaaatcacagttggaaacctcataatttcaccaaggcagaagcaattaaatgcaaacattggcaaaaattttaacgctgcagaaaatcacgaaaatgccaagaccacgactcgttccagcaccgtgggggctgacacccatctcactgctggataa

SEQ ID NO: 121642 - DNA, 372 bp, Homo sapiens
  misc_feature (1)...(372): n = a,t,c or g
tttcttcccaccctgtcttctcccctaggtgggtcctgagcccccacccccaatcccagtgctacacctgaggttctggagctcaaaatctgacagcctctcccccattctgtgtgtgtcggggggacagagggaaccatttaagaaaagataccaaagtagaagtcaaaagaaagacatgttggctannnnnnnnnnnnnnnnnnnnnnnnnnnnnnnnnnnnnnnnnnnnnnnnnnnnnnnnnnnnnnnnnnnnnnnnnnnnnnnnnnnnnnnnnnnnnnnnnnnnnnnnnnnnnnnnnnnnnnnnnnnnnnnnnnnnnnnnnnnnnnnnnnnnnnnnnnnnnnnnngcctagatgttcaagagggtgaa

SEQ ID NO: 121643 - DNA, 3015 bp, Homo sapiens
cacgtgggtgcctctgacccggacgcgggtcccgggtggggcggcctcacctcccggccccgcctggtcacgccgcgctccgcccccaggggccgcgccttccagggcgccacagtgggcctggcgcccgtcgagggcatgtgccgcgccgagagctcgggaggcgtgagcacggaccactcggagctccccatcggcgccgcagccaccatggcccatgagatcggccacagcctcggcctcagccacgaccccgacggctgctgcgtggaggctgcggccgagtccggaggctgcgtcatggctgcggccaccgggtacgcgggtggggggtcggggctgcggcggggcggctagtcctggggacttcctccgctgcgtttctttggtcgtccctcagtttcctcttctgtaaaatggggataatgatcatagtgtccgcttcagggtggtttatgaggcttaaagggaagaagctcaggcaaagtggattctcaacggtatgaagattattttccgagtaacctggcgaggttactcctacaccgggaggagcaccgtcgggtcgcgattccaccttgggtcccgggctgctcactattggggcctcatcgtcccctgtcccgcttgttgtgtgactttgcgcgggttacttcccctctctgggctctgcgcgtctggcggctgtagccaagcccaggggtggggatcagagaagcgcgggggttgggggactgtccctccatgcccaatgccctccccgtgccggtaggcacccgtttccgcgcgtgttcagcgcctgcagccgccgccagctgcgcgccttcttccgcaaggggggcggcgcttgcctctccaatgccccggaccccggactcccggtgccgccggcgctctgcgggaacggcttcgtggaagcgggcgaggagtgttactgcgtttcctggccaggagtgccgcgacctctgctgctttgctcacaactgctcgctgcgcccgggggcccagtgcgcccacggggactgctgcgtgcgctgcctgctgaagccggctggagcgctgtgccgccaggccatgggtgactgtgacctccctgagttttgcacgggcacctcctcccactgtcccccagacgtttacctactggacggctcaccctgtgccaggggcagtggctactgctgggatggcgcatgtcccacgctggagcagcagtgccagcagctctgggggcctggctcccacccagctcccgaggcctgtttccaggtggtgaactctgcgggagatgctcatggaaactgcggccaggacagcgagggccacttcctgccctgtgcagggagggatgccctgtgtgggaagctgcagtgccagggtggaaagcccagcctgctcgcaccgcacatggtgccagtggactctaccgttcacctagatggccaggaagtgacttgtcggggagccttggcactccccagtgcccagctggacctgcttggcctgggcctggtagagccaggcacccagtgtggacctagaatggtttgcaatagcaaccataactgccactgtgctccaggctgggctccacccttctgtgacaagccaggctttggtggcagcatggacagtggccctgtgcaggctgaaaaccatgacaccttcctgctggccatgctcctcagcgtcctgctgcctctgctcccaggggccggcctggcctggtgttgctaccgactcccaggagcccatctgcagcgatgcagctggggctgcagacagggaccctgcgtgcagtggccccaaagatggcccacacagggaccaccccctgggcggcgttcaccccatggagttgggccccacagccactggacagccctggcccctggaccctgagaactctcatgagcccagcagccaccctgagaagcctctgccagcagtctcgcctgacccccaagcagatcaagtccagatgccaagatcctgcctctggtgagaggtagctcctaaaatgaacagatttaaagacaggtggccactgacagccactccaggaacttgaactgcaggggcagagccagtgaatcaccggacctccagcacctgcaggcagctttggaagtttcttccccgagtggagcttcgacccacccactccaggaacccagagccacattagaagttcctgagggctggagaacactgctgggcacactctccagctcaataaaccatcagtcccagaaggcaaaggtcacacagcccctggacctcccttcaccagtgggagggttgggtagtgctggccattcccaaaagggcttctgtcctgggagtctggtgtgtctcctacatgcaatttccacggacccagctctgtggagggcatgactgctggccagaagctagtggtcctggggccctatggttcgactgagtccacactcccctggagcctggctggcctctgcaaacaaacataattttgggggaccttccttcctgtttcttcccaccctgtcttctcccctaggtggttcctgagcccccacccccaatcccagtgctacacctgaggttctggagctcagaatctgacagcctctcccccattcttgtgttgtgttcggggggacagagggaaccattttaaggaaaagattaccaaagtagaaagtcaaaaagaaagacatgttggctataggcgtggtggctcatgcctataatcccagcactttgggaagctggggtaggaggatcaccagaggccaggaggtccacaccagcctgggcaacacagcaagacaccgcatctacagaaaaattttaaaattagctgggcgtggtggtgtgtacctgtaggcctagctgctcaggaggctgaagcaggaggatcacttgagcctgagttcaacactgcagtgagctatggtggcaccactgcactccagcctgggtgacagagcaagaccctgtctctaaaataaattttaaaaagacatatta

SEQ ID NO: 121644 - DNA, 462 bp, Homo sapiens
tgagctcttctctgagctggcagaagacaaggagaactacaagaaattctatgaggcattctctaaaaatctcaagcttggaatccacgaagactccactacccgccgccgcctgtctgagctgctgcgctatcatacctcccagtctggagatgagatgacatctctgtcagagtatgtttctcgcatgaaggagacacagaagtccatctattacatctctggtgagagcaaagagcaggtgcccctgtcccacctggctccccctgctggtgtatagtgtttttttccctctcctgtccttgtgttgaaggcagtaaactaagggtgtcaagccccattccctctctactcttgacagcaggattggatgttgtgtattgtggtttattttattttcttcattttgttctgaaattaaagtatgcaaaataaagaatatgccgtttttatacaaaaaaa

SEQ ID NO: 121645 - DNA, 1269 bp, Homo sapiens
atgaagctgagatggaagctggggccagatgtgaaggtggaggggaaaggtgagtgctattgcaaacaacattcagcaaggaccccgctgacaagagagcatttgcgcatagggctgaaaaagatgcctgaggaagtgcaccttggagagaaggaggtggagacttttgcctttcaggcagaaattgcccaactcatgtctcttatcatcaataccttctattccaacaaggagattttcctttgggagttgatctctaatgcttctgatgccttggacaagattcgctatgaaagcctaacagacccttccaagttggacagtggtaaagagctgaaaattgacatcatccccaatactcaggaacataccctgactttggtagacacaggcattggcatgaccaaagctgatctcataaataatttgggaaccattgccaagtttcaagatcagacagagtacttagaagagatgcaggtcaaagaagtagtggagaagcactctcagttcctaggctatcccatcaccctttatctggagaaggaacgagagaaagaaattagtgatggtaaggcagaggaagagaaaggtgagaaagaagaggaaaataaagatgacgaagaaaagcccaagatcgaagatgtgggttcagatgaggaggatgacagtggtaaggataagaagaagaaaactaagaagatcaaagagaaatacattgatcaggaagaactaaacaagaccaagcctatttggaccagaaacactgaagacatcacccaagaggagtatggagaattctataagagcctcaccaatgactggaaagaccacttggcagtcaggtacttttctgtagaagagtatgtttctcgcatgaaggagatacagaagtccatctattacatcactggtgagagcaaagagcaggttgccaactcagcttttgtggagcaagtatggaagcgggactccagggtggtatatatgaccgagcccattgatggctaccaactcaaggagtttgatgggaagagcctggtctcagttaccaaggagggcctggagctacctgaggatggggaggagaagaagagaatggaagagaggaaggcaaagtttgagaacctctgcaagttcatgaaagaaactttagataagaaggttgagatggtgacagtctccaacaggcttgtgtcttcatcctgctgcattgtgaccagcacctacagctggacagccaatatggagcagatcatgaaagcctag

SEQ ID NO: 121646 - DNA, 478 bp, Homo sapiens
ctccagcagagtcaaatttttgaaattcattcgcaaaaaaccattgttaagaagtgccttgatctcttctttgagttggcagaagaaaaggagaattacaagaatttctttgaggcattctctaaaaatcttcaagcttggaatccacgaagactccactaaccgccgccgcctgtctgagctgctgcgctatcatacctcccagtctggagatgagatgacatctctgtcagagtatgtttctcgcatgaaggagacacagaagtccatctattacatcactggctccccctgctggtgtctagtgtttttttccctctcctgtccttgtgttgaaggcagtaaactaagggtgtcaagccccattccctctctactcttgacagcaggattggatgttgtgtattgtggtttattttattttcttcattttgttctgaaattaaagtatgcaaaataaagaatatgccattatatc

SEQ ID NO: 121647 - DNA, 862 bp, Homo sapiens
atgaagctgagatggaagctggggccagatgtgaaggtggaggggaaaggtgagtgctattgcaaacaacattcagcaaggaccccgctgacaagagagcatttgcgcatagggctgaaaaagatgcctgaggaagtgcaccttggagagaaggaggtggagacttttgcctttcaggcagaaattgcccaactcatgtctcttatcatcaataccttctattccaacaaggagattttcctttgggagttgatctctaatgcttctgatgccttggacaagattcgctatgaaagcctaacagacccttccaagttggacagtggtaaagagctgaaaattgacatcatccccaatactcaggaacataccctgactttggtagacacaggcattggcatgaccaaagctgatctcataaataatttgggaaccattgccaagtttcaagatcagacagagtacttagaagagatgcaggtcaaagaagtagtggagaagcactctcagttcctaggctatcccatcaccctttatctggagaaggaacgagagaaagaaattagtgatggtaaggcagaggaagagaaaggtgagaaagaagaggaaaataaagatgacgaagaaaagcccaagatcgaagatgtgggttcagatgaggaggatgacagtggtaaggataagaagaagaaaactaagaagatcaaagagaaatacattgatcaggaagaactaaacaagaccaagcctatttggaccagaaacactgaagacatcacccaagaggagtatggagaattctataagagcctcaccaatgactggaaagaccacttggcagtcaggtacttttctgtagaag

SEQ ID NO: 121648 - DNA, 621 bp, Homo sapiens
  misc_feature (1)...(621): n = a,t,c or g
tgataccagagttcncaattttaccgtggtgtggtgactctgggactgcccctgaacatctcccgagaaatgctccagcagagcaaaatcttgaaagtcattcgcaaaaacattgtttaagaatgccctttgagctcctctctgagctggcagaagacaaggagaattacaagaaattctatgaggcattctctaaaaatctcaagcttggaatccacgaagactccactaaccgccgccgcctgtctgagctgctgcgctatcatacctcccagtctggagatgagatgacatctctgtcagagtatgtttctcgcatgaaggagacacagaagtccatctattacatcactggtgagagcaaagagcaggtggccaactcagcttttgtggagcgagtgcccctgtcccacctggctccccctgctggtgtctagtgtttttttccctctcctgtccttgtgttgaaggcagtaaactaagggtgtcaagccccattccctctctactcttgacagcaggattggatgttgtgtattgtggtttattttattttcttcattttgttctgaaattaaagtatgcaaaataaagaatatgccgtttttatacaaaaaaaaa

SEQ ID NO: 121649 - DNA, 3017 bp, Homo sapiens
  misc_feature (1)...(3017): n = a,t,c or g
ctttttttttccctgaagcctttaatttttgggggggggttgggcccaatttgtcccccccccaaaaaaagggttttttccaaaaattcccaagggggtttttatttggccccccataaggaaaaaaatttttctttccctgcccgggtaaaatttggcccccccaagggttcttttaaacggccccccnnnnntntnnngggaataaaaacggcatattcgtttattgtgcatacgtttaatttcagaacaaaattgaagaaaataaaataaaccacaatacacaacattccaatcctgcttgtcaagagtagagagggaatggggcttgacacccttagtttacttgccttcaacacaaggacaggagagggaaaaaaacacgtagacaccagcagcggggagcccaggtggggacagggggcactccgaggctgacagtggggagccccatgggggacacctattacaaggggcaccaaagttttcccacttttggaacttccttaacctaattcgactttctttcccatgcggagaccgcatccttcatccgcccttcgagaggggggggatcttcatcagggaactgccagcatttggggttcctcttggctggccactttcatctttcatccaataccttaggacctagctttgattcatggcgatagatgccggttgggagtggggtctggggggatcctcaaggggaaaagccagaagattagcaggggcgggttttcaaacagccagcagcaccaccagggtcctttaactgcccttatcatttcttggtcgggcctcagcctttctggcccgcagcgtctccacaaaatgggggtgggtcagggggtgattctcaaggtgcttttttgcccatcatatagccccatgggggggagttgtcccgaagtgccctgggcttttcatgatcccgctcaattaatgcctgacccgcccctaggtgcttgtgaccaatgcaggcaaggtgaagacacaaagtctatttggagattgtcacctttcttcaacccttcttatctaaggatttctttcatgagcttgcagaggttctcaaaacttttgccttgctctcttccatcttcttcttcttcctccttcatccttcaggcaagctccaagacccttcctttggtaactgagacccaggctcttcccatcaaaattccttggagctgctgcacacaagtactcgttcaatggggctcgggtcatatatacccacctcggaagccccgtttccggcactcgctccaacaaaaagctgagttggccacctgctctttgcttctcaccaagtgatgtaatagatggacttctgtgtctcccttcatgcggagaaacattacttctgacaggaggatgtcatctcatctccaggactgggaggttatgatagcgcaagcaggctcaagacaggctggctggctggttagtggagtcctccgtggattcccaagcttggagatttttaagagaaatgccctccatagaatttcttgtaattctcccttgtccttctgcccagcctcagagaaagagctcaaggcacttccttaacaatgtttttgcggaaatgactttcaaagatttttgctactgctggagcatttcatcgggaggatgttcaggggcagatccttcagagtcaacccacacccacgggattaaaattgagatactctggtatccaactcatcacaagctgtccatgatgaacacacggcggaccataggagttggaatggttggttctttttcttcttggttctcaaaaaggtcaaaagggagcccggacggagggaataaatagcaaatgcccctggaatttccaaactgaccttctacaggaaaagtgcttggactgccaaagtggtcttccccaagtcattaagtgaggctcttgtagaattctcccatactcctcttggggtgatgtcatcagggtttctggtccaaatagggcttgggtcttggtttaagttccttccctggatcaaatgtaattcctctttggatcttccttaagttttcttcttctatatccttaccgatgtcatcctcctcatctgaacccacatcttcgatcttggggtttttcttcatcatctttatcttcctcttctttcccaacctttctcttacctactggcctcatcatcaactaatttccttctactacgttccttcatccaaataaagggtgatgggatagcctatgaactgagaatggcttcttcactacttcttgggacccgcctctcttctaggtactctgtctggatcttctttaagatggaggatcacttggggtaccccttgccaatgtggctcatccatggtcagcacgcacagtgaaggaacctccagcagaagactcccaagcatactgttcatcatcgttgtgcttttgtgatcacaaccactttctctgcccaccaagtagggcaggaataaaagccaactcccccactgccccaatccatgggagatgtctgcacccagccttgaagagcctccatggaatgcttttagggtaccaggacttgggcaatgggttccccaaatttatttatggaggatcagctttggtcatgcccaatgccctgtgtcctacccaaagtccagggtacggttccctgaagggttggggatgatgtcaaatttttcagctctttaccaactgtcacaactttcgaagggtcttgtcaggcttctcatagcggaatcttgtcccaaggcatcatgaagcatatagagatcaactcccggaaggaaaatctccttgttggaatagaaggtattgatgatgagggacatgagttgggcaatttcctgcctgaaaggcaaaagtctccacctcctcctctccatggtgcacttcctcaggcatcttgaaaaaaaatcttgaaaagaaaaggattatacgtaatagtgagcaacgtaggcttgctttccgatacccagacagccccaacactgcgccggagtga

SEQ ID NO: 121650 - DNA, 816 bp, Homo sapiens; identical to SEQ ID NO: 118684

SEQ ID NO: 121651 - DNA, 837 bp, Homo sapiens
ggccagagtgcgtaattggcatagacatacttagcagctggcagaacccccacattggctccctgactggtagggtgagggctattatggtgggaaaggccaaatggaagccattagagctgcctctacctagaaaaatagtaaatcaaaaacaatatcacatccttggagggactgtggaaattagtgccaccattaaggacttgaaagacacagaggcggtgactcccaccacatccccattcaactctcccatttggcctgtgcagaagacagatggatcttggagaatgacagtggattattgtaaacttaaccaagtggtgactccaattgcagctgctgtaccagatgtggttcattgcttgagcaaatcaacacatctcctggtacctggtttgagtggagtccaaaagaaggctctgcagcaggttcaggctgctgtgcaagctgctctgccatttgggccatatgacccagcagatccaatggtgcttgaggtgtcagtggcagatagggatgctatttggagcctttggaacgccgccattggtgaatcacagcggaggcctctaggattttggagcaaggctctcctgtcttctgcagataactactctccttttgagaggcagctcttggcctcttactgggctttggtggaaactgaacgtttgacggtgggtcatcaagtcaccctgcgacctgaactgcctatcatgaattgggtgctttctgacccatctagccataaagttagtggtgcacagcagcgttccatcatcaaattgaagtggtatatacatgattgggttcgagcaggtcctgaaggcacaa

SEQ ID NO: 121652 - DNA, 402 bp, Homo sapiens
atggatcgcattcctccacctcctagtactgtgtcaggtgcaatcaggtgcagggaaggtcagcaaggaactgagggtggctttcagccaacagcccttgaagaagtgaatcctgttgaaaaccatatgaccacccctgtcattgcccagtgggcccatgaacaaagtggccatgatggcagggatggaggttgcacatgggctcagcaacatggacttccactcaccaaggctgacctggctacagccactgctgagtgcccaatttgtcagcagcaaagaccaacactgagccctcgatatggcaccattcctcagggtgatcagccagctacctggtggcaggttgattgtactggacctcttccaacatggaaagggcagaagtttgtcctcacttga

SEQ ID NO: 121653 - DNA, 489 bp, Homo sapiens
gggtatatcaactctttggctttgtgtcataaccttattcggagagacctcgatcactttttacttctgcaagatatcacactggtccattacattaatgacattatgctaattgggtccagtgagcaagaggtagcaaacacactggacttattgcccaatgggcccatgaacaaagtggccatggtggcagggctggaggttacgcatgggctcagcaacacggacttccactcaccaaggctgacctgcctggctatggccactgctgagtgtccaatttgccagcagcagagaccaacactgagccctcgatatggcaccattccttgggggcatgggacgcacctggagggcgagggtgctggcgtctccagaaggctggagagtagtgtggatcagaggagcctcttagggatgcagatgcttgagtccgttacaacccgaccaagacgctcccagcaggaggccaaggacctgcgtttttaa

SEQ ID NO: 121654 - DNA, 1680 bp, Homo sapiens
aaacttaaacatgctagcttgagcctaaagggagttgaggagaggaagcaggagagcagtattagaaagagcacagtaccagacacagttatgcctgtcgttgaaccaggagtcaagactcaagttccagcaggctctagatgtaaggttcagagtgtgaccaatgaggaggtgcgctacactccaaaagaacagagttttctaacttataaagcagaaatctggagaacagtgccagaatgcataattggcatagacatacttagcagctggcagaatccctacattggctccctgactggtagggtgaggcctatcatggtggaaaaggccaaatggaaggcattagagctgcctctacctagaaaaatagtaagtcaaaaacaatatcacaaccctggagggattgcagagattagtgccaccatcaaggacttgaaagatgcaggggtggtgattcccaccatatccccattcaactttcctatttggcctgtgcaaaagacagatggatcttggagaatgacagtggattactgtaagcttaaccaagtggtgaccccaactgcagctgctgtaccagatgtggtttcattgcttgagcaaattaacatatatccttgtacctggtatacagccattgattcgacaaatgcctttttctccattcctgtccataaggcccaccaaaagcaatttgccttcagcttgcaaagtcagcaatataccttcactgtcctgcctcaggggtatatcaagtctccagctttgtgtcataattttgttcacagagatcttgatcacttttctcttccacaagatatcacactggtctattctactgatgacattatgcggattggacccagtgaatcacagcagagacctctaggattttggagcaaggccctgccatcttctgcagatacctactctccttttgagacacagctcttggcttgttactgggctttggtagaaactgaaggcttgattatgggtcatcaagtcaccatgcgacctgagctgcttagaaggcacaaggatgtagaacctccaaatttactgcgaggggcacagccacagtcccgcaaagcagcagctgcagcaacagtggatgataatgagcaacagcaagaacaacagggtgctgacgaaggtgaggaagataatgtaggcagcagtgtcccacttggactgaaagggctgatccctgtcagctgttggtctccccacacttccagagccattactcccagctcctccatgaacaacagacccattttagcagaagcgccctggcaccagcagctgcatcagaccccacctgggcagaagccagctaaggcagtgcaggttgctggtggtcttcaggttgtctgcatctggcaggggtttgagtgcctgcacttggtgctgggcacggctgagccatcccagacgccaaggagtttacagtctagtccagtcagtgacgaggttaaaacgaattctcgcatcattgctactgcgaatgcaccgggacaggatcagcccttcaaattctcccacgtggtccctgcaggcgcagagtgcggaagtcgggccgcggccgccgcagagcgccgggggcgggaggagcaaacgcaggaggccatggccgccgccgccgccgccgccgacgccggcgccggctgctaa

SEQ ID NO: 121655 - DNA, 703 bp, Homo sapiens
aaatgcgaccaaggtctctccgaataagaatatgacatgaataagattatgacacaaagccggagagttgatacacccctgaggtatgacagtgaaggtatattgctggccttgccagctgaagacaaattgcttctggtgggccttggaacaggaatggagaaaaaggcatttgtcaagtcagtggctacataccaggtaccaagagatatggtaatttgctcaagcaatgaaaccacatctggtacagcagctgcaaattggagtcaccacttggttaaacttacgataatccgctgccgttcaccaagatccatctgtcttctgcacaggccaaatgggagagttgaaccgggatgtggtgggaatcaccaccccgcgtctcaagtttttgatggtgacactaatctctgcaatccctccgggaatacgatattgtttttgatttactgtttttctaggtagaggcagctctcatggcttccatttggcctttccaaccataaaagccctcaccctaccagtcagggagccagtgtgggggttctgccagctgctaagtatgtctctgccaattctgcattctggcactgggaaaatgaccacaggatgagtccggggacccactggacccactgtaagtcagacctgagctaaaactccattaattacctgacctccttaagcccctatttaactggag

SEQ ID NO: 121656 - DNA, 2542 bp, Homo sapiens
tcaagctgctttcctagatgtggagatcagagaaggacttggaaaagctgatgtcagagcacagacccagatgtagagttgagccatcagctgtcttgggaaagagcactgcagtggatagaaggtgcaggtgtgcctgcaaatgcagggaaacaccaccccattaatcaaagatgccccacatccactgacatataaaaggaccttcccactccatcccctttccagctcttcatcccactgacagccacttttattggcaataaaatcccccacatttaccatcttcaatacgttcatgtcacctgattcttcctgctgccccaaggccacacagagttcagctcctgctagcgcccagaagcactcatcccagcccctgcacccactcacctgtgtgctcctcctcccatgaggggttgagagctgcaggctgagtaagtccaactggtagatgatgcctggggtccattctcccactggtcttggctggctatgacatcccaggtctctgggtgtcagcatgtgcatttcagcatgtgcgtctctaaatttgacatgatatgtacgaaatatggctgctgtgaggattaaatcatgtgctaacacaggagtgaccacgttttcaggtgtctccagccattcaatcaccctgtttctcctgtggagcctccttttcatttttttctgcagcgttgtccctccagaagtttgccattctccagaactaaaatgaaaccctgtggggtccctccaccgccctccaggcacaccactgtggcccgatcccggggctcttctccttgccattctccctgctctaatagattttcttttccaacagctttcttctgtgtaaaaaactttttcagtctttaaatctccaaagatgtctttattttctctcacagtcaattgatcttttagccaagtataagatttaaggttcaaagacatctccacctgaactttgaaagcactgatctgttgtctgctagcttctgcattattgatgtgagtttcaagcaatgaaaccacatctggtacagcagctgtaattggagtcaccacttggttaagcttacaataatccactgtcattctccaagctccatctgtcttctgcacaggccaaatgggagagctgaatgaggatgtggtgggaatcgccacccctgcatcttttaagtccttgatggtggcagtaatctccacaatccctccagggatgtggtattctttttgatttgcaatttttctaggtgatggcagctccaatggcttccatttggcctttcccacaacagtagccctcaccctaccagtcagggagccaatgcaggggttctgccagctgctaaatatgtctataccaattatgcattctgacactctaggggcccaccaagcctttagtctagttataggcctagaagcaaacagaggtgttgggggtggcttctgaggagaatcaacattattttgcctggcaactgcctcaggcagcgcagggtttatctcttcagacaaaggtggaaaggctgatagcagcatgggtgggggagaggacgttgccactactggggatggggaagctgttacttctggccaaaaatgttcatcagagtttattaactcagtgtccccagcttcatcagggtcctcccacatgtccccattccaagttgcagggtcccattcttttccaatcaatgccctcattctaacagtagacacctggtcaatcactctcacgttaagagcttgtgtctgtttttccatagtttcagctctttctctacaggagtgggatgactatcaggtggcagagcggtactcctaccaaaaacaatcagaaatgccagacaaaatggcaaaatggcagttgttaaaggaatttaacgggtatatcaactctccagttttgtgttctaatgttattcagagagaacttaatcacttttctcttctgcaagatatcacactggtccattacattgatgacatcatgctgattggatccagtgagcaagaattagcaaacacactggacttattggtgagacatttgtttgccagaggatgggaaataaatctgactaaaattcagggactttctacctctgtaaaatttctaggggtccagtgttgtcaggcctgtcaagatatgccttctaagtgggcccatgaacaaagtagccatggtggcagggatggaggttacacattggctcagcaacatggacttccactcaccaaggctgacctggctatggacactgctgagcgcccaatttgtgagcagcagaaaccaacactgagccctcaatacggcaccattccttgggggttatcagccagccacctggttgcagcattgtctctgaccaaggcactcactttatggctaaagaagtgtggcagtggcctcgtgcttatggaattcactggtcttaccatgttccccatcatcctgagcagctggattgaaagaatgatgggatggccttttgaagtcacaattacaacgccaactaggtga

SEQ ID NO: 121657 - DNA, 1017 bp, Homo sapiens
tggtgattcccaccacatcccagttcaactttcccatttggcctgtgcagaagacagatggatcttggagaatgacagtggattattgtaagcttaaccaagaggagaattttaataatcaagtagataggatgacccattctgtggataccactcagcctctttccccagccacccatgtcatcacccaatgggcccatgaacaaagtggccatggtggcagggatggaggttacacacgggttcagcaacatggacttccactcaccaaggctgacctggctacagcgggcaaagttttccagaaggctgtgtaagctctgaattagcattcaatatatggtactctttctctcatagccaggattcacaggtccaggaatcaaggagtggaagtggaagtggcaccactcaccatcagccccagtgatccaccagcaaaatttttgcttcctgttcccccgacattacgttctgctggcctagagttcttagttccagaggaaggaatgctgccatcaggagacacaacagttccattaaactggaagttaagattgccacctggacactttgggctcctcttccctttacatcaacaggctaataagggaaggcttagcccccattctcgggaaaggggtacttctgtctttgcctcctccaattcccaacctgtcacagctctgaacaatgagccagcaggccctaataagagagatattggcaaagccaagggattgaaattccaccaccctgggccccacaggcaggagagagacatgctggagcaatgctatgaccttggggctatccagtgggaaagcaatggaaccatcttatcaagaagcaaggaaggcattgaaattggacctgctttccatcaggcacacagaaacatcactctccatcagttaggccggagacagaaggagctgaccagaggccacggcattcctgggctagacgggaacccactaactggaattgcctggtctcccatgcaaaccttgtccc

SEQ ID NO: 121658 - DNA, 2207 bp, Homo sapiens
aagtaacagcttccctatccccagtagtggcaacatcccctccccaacccatgctgccatcagactttccacctttgtctgaggagataaaccctatgctgcctgaggcaacagtgatagcctcccctaaggaaattgccaggcaagataatgttgattcccctcaggagccacccccaacaccccagttttcttctagacctataactagactaaagtcccagtgggcccccagagggccagagtgcgtaattggcatagacatacttagcagctggcagaacccccacattggctccctgactggtagggtgagggaaggctacatggtgggaaaggccaaatggaaaccattagagttgcctttacctagaaaaatagtaaatcaaaagcaatattgcatccctggagagattgcagagattagtaccaccatcagggacttgaaagacacaggtgtggtgattcccaccacatccccattcaactcttccatttggcctgtgcagaagacagatggatcttggagaatgacagtggattattgtaagcttgaccaagtggtgaccccaattgcagctgctgtaccagatatggtttcattagttaagcagattaacacatctcctggtacctggcaacacattactcatttggatgtgttactctggcggatttatcaagtgacccaaaaggctgccagttttgagtggggtccagaacaggagaaggctctgcaacaggtccaggctgctgtgcaagctgctctgccacttgggccatatgacccagcagatccaatggtgcttgaggagaaatggcgaaatgtgcgattatatactgatttatgggctgtagccaatggtttggctggattatcagggacttggaagaagcatgattggaaaattggtgacaaagaaatttgggaaagaggtatgttgatggaccactctgagtggtcaaaaactgtgaagatgtttgtatcccatgagcatgttctaacccaatgcaaggaagctaagaaacttgaaaaaaggttagaggaattgctaactggaataactagtttagagaagaacataaatgacccgatggaattgaaaaacatagcacgagaactttgtgaagcatacacaagtatcaatagccgaattgataaagtggaagaaaggatatcagagattgaagatcaacttaatgaaataaagtggaaagacaagattagagaaaaaagaatgaaaaggaacaatgaaagcctccaagaaatatgggactatgtgaaaagaccaaacctacatttgattggtgtacctgaaagtgacaggaagaatggaaccaagttggaaaacacacttcaggatattgtccggaagaacttccccaacctagcaagacaggccaacattcaaattcagaaaatacagagaacaccacaaaaatactccttgagaagagcaaccccaagacacataatcatcagattcaccaaggttgaaatgaaggaaaaaatattaagggaagccagagagaaagtattggatgttctggccagggcattcaggcaacagaaagaaataaagagtattcacataggaagagaggaagtcaaattgtctgtgtttgcagatgacatgattgtatatttagaaaacctcattgtctcagttcaaaatctccttaagctgataagcaactttagcaaactctcaggatacaaagccaatgtgcaaaaatcacaagcattcctatacactggtcatatacaaacagagagccaaatcatgagtgaactgccattcacaattgctacaaagagaataaaatacctaggaatccaacttacaagggacatgaaggacctcttcaaggagaactacaaaccactgctcaaggaaataaaagaggatacaaacaaatggaagaacattccatgctcatgggtaggaagaatcaatatcgtgaaaatggccatactgcccaaggtcaaggatataactaagaacatacagatgctacacagatcagtagagacagccacaattctagccacaggggcagctgtcaatggtcttcagggtcccaccaaggtgctaacaatgatactatcagttgggacaggaattttgccctttcagcagccagcctctaataaccctttggcaaccgatggtaactggccaggtctggtctctggtgttgcctaa

SEQ ID NO: 121659 - DNA, 627 bp, Homo sapiens
atggccccagggatggttcccattccaccacctgggaaataccattcccccaaaaagcttatttattcaactcccccaaaaccggggacttatggcatcagcgactccctttcccaatacccgacttcagccaaagccgaacctgtccccacccacaagaaccctaggagagagagcccgatcccccactcatcaccatccagtttcacggatgggcttcacccaactcccctggagatgcacgcccacacccccaaaataagacatctgggagaggacggcctgcgccacgccagcgcgttcccaccacaatcaccacccccgcgccacccgcacggtccccaaattcagcccatagtccagcctttcgggaccttccttttcgcgcagaaaagggtacggctgcggcaagggtcccgcgggagcctcactcaccagcgccaccaaagaacaaggggtcgctccagccaccagctggggagctcctccagcggggcgccaggactacactaccccgaatcctcggcacagcgcccggaccacacctcccaggatgctcggcgccaccaggcgcgccctgaaggccggcagctcccattggcctctgacggatccgtttctgagtaa

SEQ ID NO: 121660 - DNA, 555 bp, Homo sapiens
ttagcccttttcctcctccgtgattgtttccagtgttttgcaactgatctgatctggggaaacgtcgtgtttaatttggagcatgctgccaacgtccccagtaggatttcggaggcagccgcaggtttcggcgcctacttttaggctgagcactgcttgtgagtaccgttcacactgacacacgaggctccactcgcatccgcagctgcgtggctttccctcgtggttattccacagtgtgtctatccgttctccagccagtggacatttagagtttccaagttttgctcgtagctcaggaagtggcagcaccagtcccttgtcctttggggcgatgacaacagagaagcaagccttggggggcagggctgctttccccccaaaatacaagtaagcacaaggcagagcggcgtgctttgtgttgacgtcgcagcagcagccatcctggcagtgaggggtcacagtcacggccacaggctcgcccatgcacagaggcacgttctggcacagctgcacagggacaccaggctctggtgacaggtgactcatgcccat

SEQ ID NO: 121661 - DNA, 2067 bp, Homo sapiens
atgggggtggaggtctcagggagtgccaagtgctgctgggaacggaagacctggcgaatgaacttgaagaagacaaaggcgggaaataggtcccaggggaaaggccccggggtcagagcggaccacaagtcctgccatacgggcctacttggtgttcctccaacacgccagaaccccaaagcctcagagcaccccagtaactccaagtccccgttccgctccagtctaggggtcaaagatgacagcctcagcccatgcctggaggtcacagcccaaggcaccatgagtgcaaatgcccccaaccccaagttctgcaaaagggccccacctggacggggtcagagtaccagctgcaaaccccgagtgaccaaccgcaggccccacaagggctgccatcctgagagcaacaccagcgccttctctccccatgcctggaacaaacaggccgagcccaagagggaacagtctccaagactctgcccctgcttcagatgccggctggcctcccacagaggctgtgacatgtccccgcctggagcagggagaatcctcctcagcggaatctgtgagcgcacagaccacaggggcctcgcccagtgccaggcacagagcggagaaatggcaggggcggcgctggctgcaggcagctctgagctttcctgtgacactcctcaaaaggagctgaggcaatgcatagccctgcaggaagagactggaaatggtcttggagagagaactgcggggcatggtgacagcggtgagaggctgcaggtgcacagatctcaacgaggggccaacgtgcctctgtgcatgggcgagcctgtggccgtgactgtgacccctcactgccaggatggctgctgctgcgacgtcaacacaaagcacgccgctctgccttgtgcttacttgtattttggggggaaagcagccctgccccccaaggcttgcttctctgttgtcatcgccccaaaggacaagggactggtgctgccacttcctgagctacgagcaaaacttggagactctaaatgtccactggctggagaacggatagacacactgtggaataaccacgagggaaagccacgcagctgcggatgcgagtggagcctcgtgtgtcagtgtgaacggtactcacaagcagtgctcagcctaaaagtaggggcatcaccgctggccagctgcctgctgtggtctgcgagtcgtgggagtgtcacatttgaacgctgggacaggggacgcaggcttagaagacaggagacactctctgagctgttgattttttcagagcagtcggacctgttcccaaccgagttctccgaggccttgtcagccacctgcctccctggtgctgtgacacggcctgtgcgggttttgcgggcgcccgcggccaccgacaccttcttcccagtgcggcccgggctgcggccccgggtccgaggaggcccggggagacccggaggaggtcagaaggccttcagggtccccgggatgggcctaatcatgattgtcactgaagatccaggagggcttcctggaggaggaggcagctccattctgaaatgccaagggtacagctttattgggacagccagtgtctctgaatatgttgacctggtcaacccgtcctccttcattcccaaggtgggaaaaccgtggagcttcccagagcccagcacagggcagaagccctacacgttccccaggagatggaaagaagattccctggttctggggactgaagattttgacaagctggtaatgcgcacctctggtcagaaccacgtctgcagaggaaagacccagccatatccctcttttctcagctgcctgctaggccctctgacccccatcaccgcaatgaccacctcccccactgaactgcgaaccgcactgggggcgaggccggctctgtcggggtcacgtatccctgtatccctggcccctagcacaggtttgcagagctcacgactgccctcctgctctgccccatcccacagtggggtcttccatgcctgctctgatatgttcatcatcacagccttcccagttggattttgcaattaa

SEQ ID NO: 121662 - DNA, 807 bp, Homo sapiens
atggcagtgggggctcccgtggcaaaagagaaggaagtgctagcggtgaaacatcagtacctcctaatgggatgtgatagaacacccgaaaaactgctgaatggtgtggtgcttccccagagcccaggggacagtgtctggggtcccacccctgagaaagtaaccccaggaagactgacagctgcctctcggaaacagattgatcagtgtgcctcaggccaccgcagccctctttcagtcatgctggcattagagcacagagagggcttcactcggccagggacctcctccacggtcagggaagaagggactgacaatgaagagagaatcgcatgtgtgagtgcccctagtgtttaccagaaactcagagagctgtgcagagaaaacttttcgatatacatctttgaatatgacaaaagatttgccatgtatggagaggagtttattttctatgattacaataatccattggacttacccgaaagaattgctgcacatagttttgacatcgtaatagcagatcctccctatctttcggaggaatgtctcagaaaaacatcggaaaccgtcaagtacctgacgcggggcaagattctgctgtgcacaggaaagaagcggcagacccttgtggtatgtgttacagaccttaaagttggtgtggacccaaagagtgccatcatggaagaacaggcagcagaactccttggagtgaagatgtgcacgtttgttccaagacacacccggaacttggcaaatgagtttcgctgttatgtgaattatgattctgggctggactgtgggatctga

SEQ ID NO: 121663 - DNA, 879 bp, Homo sapiens
cgactgcgcacgcgcggctggttataaacaacttgtgaaatgagtgatttggaagatgatgagacaccccagctttctgcccatggcctttagcagctctccaggaattttatgctgagcaaaagcaacaaattgagccaggcgaggatgataaatataacattggaataatagaagagaattggcaactgagcccagttttggtatagtcaggaaactgctctgcagctggcacaggaggcaattgcagctgtaggagaaggtggcagaatcgcatgtgttggctccccctagtgtttaccagaaactcagagagctgtgcagagaaaaccttttcgatatacatctttgaatatgacaaaagatttgccatggaatgaaaagaagttaattttctatgattacaataatccattggacttacccgaaagaattgctgcacatagttttgacatcgtaattagcagatcccttcccctatctttcgggaggaatgtctcagaaaaacatcggaaaccgttcaagtacctgacgcggggcaagattctgctgtggcacaggtgcccatcatggaagaacaggcagcagaactcccttggagtgaagatgtgcacgtttgttcccaagacacacccggaactttggcaaatggagttttcgcctggtttatgtgaatttatgattctggggctggactgtgggatctgattacagacggtgacataacacaggaaggaaccctgtcacattcctctttttgtattttcgtagtagatttaaaagttataatctcttcccctccccccaaactggagctgtccctgggctgggtttccaaataaaagtgtgcgatcttcattattgtttccttaaaaaaaa

SEQ ID NO: 121664 - DNA, 712 bp, Homo sapiens
atggcgccgaaagcaaagatggaagctcctgcccctcctgaagcggaagccaaagtgaaggctttgaaggccaagaaggtagtgttgaaaggcgtccacagccacaaaaaaaaaagaagatccgcacgtcacccactttccgataacactgcgactccggaggcagcccaaatatccttgggagagcgtcccccgaagaacaagcacccagatatcctcgggagagcgccccctggagaacaagcagcccagatatcctcgagagagctcccccccgccgggagaacaagcgccaaaatatcctccggaagagcgctcccctggagaaacaaggcttgaccacctatgcctatccatcaagtttcccgctgacccactgagtcctgcccatgaagaagatagaagacaacaacacactgtgttccattggtgaatgttaaagccaacaagcaccacgattaaacaggctgtgaagaagctgtatgacatttgatgtggccaaggtcaacacccttgattcggcctgatggagagaagaatggcatatgttccgacttggctcctggattacgatgctttgggatgtttgccaacaaaatttgggattatctaaacttgagtccagcttgcctaatttctgaatatatatatatatatatatatctttttcacccataaaaaaaaaaaaaaaaaaaaaacggacgcgtggggt

SEQ ID NO: 121665 - DNA, 1038 bp, Homo sapiens
gacaaggattcactctgtgactcttgtaaaaccagctgctcctacaactgctcaaagccaagaagcagttggcaggatcaagatatttcatctggtacagggctccattccagactcacattggccaacacaggaaaggagtccaagactgtccaggcttctttggaccagcagctgggaaggctccttagtgtctccctgaggctgggtgtggagccttctctgcagtcatctggaaacttgttggtttctttgctcttatctagattcataacatataaagttactatagtggaatgggtaaaaacttacgctctggggttagatctgaaaaagtcggaaagacctgggtttgaatctgagctccacagccacaacagctgtgagtgtgctgtatcacacctgaagccagtacatctcagagtctcacccatgggccacagtgagtactacctggttaccactgctgattattcagaggccaatggctcacagtcagcaggtgatgaattcttccagactcagtctttcccttcaaggcagcaggctctcttccggcccaaaatacaaattaccatcagagaatactataaacacctctatgcaaataaactagaaaatctagaagaaatggataaattcctcaacacatgcaccctccaaagactaaaccaggaagaagttgaatccctgaatagaccaataacaggctctgaaattgaggcaataattaatagcctaccaaccaaaaaaaggccaggaccagatggattcacagccaaattcaaccagaggtacaaggaggagctggttatttacaagaaatttcaaattccctgcattgttccagagctaaattcaacaataagtgctaattcaacaaatgctgacacgtgtacgccaaaatatgttaccttcaattcaaagggaactgctcaaaatgcagattctgattctgcaggcctagagtggagcctgatgttctgcatatctgataaagtctcaggtgatgatgatgctgatgctgttgattcttga

SEQ ID NO: 121666 - DNA, 573 bp, Homo sapiens
gaaaggaagagacattttcagcctggtacgtggatggccgcgttctggtggtgatagttacctttggcataattctccctctgtgtctcttgaagaacttagggtatcttgggctatactagtggattttccttgagctgtatggtttttttcctaattgtggttatttacaagaaatttcaaattccctgcattgttccagagctaaattcaacaataagtgctaattcaacaaatgctgacacgtgtacgccaaaatatgttaccttcaattcaaagaccgtgtatgctttacccaccattgcatttgcatttgtttgccacccgtcagtcctgccaatttacagtgagcttaaagacccgatcacagaaaaaaatgcagatggtttcaaacatctcctttttcgccatgtttgttatgtacttcttgactgccatttttggctacttgacattctatgacaacggtgcagtccgacctccttcacaaatatcagagtaaagatgacattctcatcctgacagtgcggctggctgtcattgttgctgtgatcctcacagtgccggtgttat

SEQ ID NO: 121667 - DNA, 2056 bp, Homo sapiens
  misc_feature (1)...(2056): n = a,t,c or g
atgagtgagcttgaagacaggctatttgaaaatacacagtcagaggaatcgaaaggaaaaagaataaaaaagaatgaagtatgtctacaagatctaaaatatagcctcaaaagggcaaatctaagagacactggccttaaggaggaggttatttacaagaaatttcaaattccctgcattgttccagagctaaattcaacaataagtgctaattcaacaaatgctgacacgtgtacgccaaaatatgttaccttcaattcaaagaaaaaaatgcagatggtttcaaacatctcctttttcgccatgtttgttatgtacttcttgactgccatttttggctacttgacattctatgacaacgtgcagtccgacctccttcacaaatatcagagtaaagatgacattctcatcctgacagtgcggctggctgtcattgttgctgtgatcctcacagtgccggtgttatttttcacggttcgttcatctttatttgaactgggcttaagaaaacaaaggtttaatttatggccgtcaataccggtggttacctgcatactcttggttgttatcaaccttgttggtgatcttcatacccctccatgaaggatattttttggagtcgtaggaagttacatcttgcttaacatgcttattttcattcttccttcatcttctttattttaaaaatcacagaccaggatggagataaaggaactcaaagaatttgggctgcccttttcttgggcctgggggtgttgttctccttggtcagcattcccttggtcatctatgactgggcctgctcatcgagtagtgacgaaggccactgaaacccgccgagaaaaagaaacatccctgttgtctgctcagtcaagtccccacacatcagcaatctctcaccactttttttgcaagtttacagaagcaaacagaaatgtacaggatacttaaaatggaatacctttttggttgcaaaacagagcacatggttctataatgcttcatgtccctccaagatttgagatcaatttagggattgtgaaatttttttttcaaatttcatacaatcatatttcccagtacttttcacaatcattttttacccatctaactctatgttttgtggcttcccggtctcttagaactttgaaaacatgatatacaataatgtttatttattatacatccagattctgaaataattttcctactgatgttcagctcacactatctgtacctttttaggaggaggaaaaggaatcttgaattgtatatatttattttggctttacagaaaaaaatgggttcgtaaataattttgcctattttggggtaacatagcacatgggggtaatcatctgaaagttatagggcactgccacctgctgaatcagagcatgcccaatatttgaggtggctctgatttcctgggcagctgaactcgggtagtccagtggcctagctggtgaccacatctagtcccatccagagacattctctggcaaagtgttctcagctggaaaagtgggttgggggatgattctttaccttgggtaaatttaaattgaaggcttacacatttggggtaatctagtcaaatgaagtattttttccctcttgggcaacttggtggtcagagttactctgggtcttgagtcaactttcgctgggggaaaacctatgggaacctacttgcaaaaaggattgtcccaaaatgccctaaagaaaatactccctctggatggcatttaagccttccaanccctaacctgtctttgctgaagtggtagaaaaatgttttagtacattataggcccagcagcttttaatccatgtccaccagctagttgcacagagaatcatgtgtacctaactataggatgatctatgataagtaactcctgttttatattgagtatttttgtgaagtcttttaaagacttgttttatatctataaatctagtttatttcaaatacaagaattttgttccttaaataagcctcatttctatttcttctttattaattctccatctagtcttttgtaaaaaaaaa

SEQ ID NO: 121668 - DNA, 1178 bp, Homo sapiens
tttaattgtgagatattctactcattttttatggtgatgaagagatttctaagacatttgcacttaatgaacgaaggggagaaattaaaataatcagaaaactagattttgaaaaaattgtgtcatatcaggtggatattaaagcctctgatggggcaggtctttctggaaaatgcactgtcataatacaggtggtagatatcaacgataacgctccggaactgaccatggcttcattcacaagccccatccgcgaaaattctcctgagaccgttgcagctcttttcagcattcaagaccgcgattctgttcgccctcaggtcgctggactacgaggccctgcaggagttcgagttccgcgtgggcgcttcagacccgggcttccacggcgctgagcagcgagagcgctggtccgcgtgcttggtgctggacgccaacgacagctcactcttcgtgctgttcccgctgcagaacggctccgcgccctgcaccgagctgatgccccgggcgggccgccgagccgggctacctggtgaccaagcagttgctcaaggccacggagccagggctgttcggcgtgtgggcgcacaatggggaggtgcgcaccgccaggctgctgagcgagcgcgacgcaaccaagcacaggctggtggtgcttgtcaaggacaatggcgagcctcctcgctcggccaccgccacgctgcacgtgctcctggtggacggcttctcccagccctacctgcctctcccggaggcggccccggcccaggcccaggccgaggccgacttgctcaccgtctacctggtggtggcgttggcctcggtgtcttcgctcttcctcctctcggtgctcctgttcgtggcggtgcggctgtgcaggaggagcagggcggcctcggtgggtcgctgctcggtgcccgagggtccttttccagggcatctggtggacgtgagcgacaccaggaccctatcccagaggtacaagtatgaagtgtttctgacgcgaggctccgggacaaatgaattcaaattcctgaagtctgttatccctaagcatccgggcgctgtgaatgatgggaggaaaagtccaactttgtaaatggttttggattcaattaagaatctgtagatttttcagagcatttaggataaaggttagtcctttatcaatagaaaaa

SEQ ID NO: 121669 - DNA, 798 bp, Homo sapiens
acgcgtccgggagcccatggtgccagcctgaccgacctggccaacctgagcgaaggcgtctccctggcagagaggggcagttttggagccatggatgatcctttcaaaaataaagccttgttatttagcaacaacacgcaagagttgcatccggatcctttccagacagaagaccccttcaaatctgacccatttaaaggagctgaccccttcaaaggcgacccgttccagaatgacccctttgcagaacagcagacaacttcaacagatccatttggaggggaccctttcaaagaaagtgacccattccgtggctctgccactgacgacttcttcaagaaacagacaaagaatgacccatttacctcggatccattcacgaaaaacccttccttaccttcgaagctcgacccctttgaatccagtgatcccttttcatcctccagtgtctcctcaaaaggatcagatccctttggaaccttagatcccttcggaagtgggtccttcaatagtgctgaaggctttgccgacttcagccagatgtccaaggtaaaagtacacctgtaagccagcttggttccgcagactttcccgaggcccccgatccattccagccactcggggctgacagcggcgacccgttccaaagtaaaaaggggtttggggacccgtttagtggaaaagacccatttgtcccctcctctgcagctaaaccttctaaggcctctgcctcgggctttgcagacttcacctctgtaagttgagtcctccgcctccgggccaccccactcccttccg

SEQ ID NO: 121670 - DNA, 1146 bp, Homo sapiens
atggggttttgccatgttggccaggctagtctcaaactcctggcctcagatccctttggaaccttagatcccttcggaagtgggtccttcaatagtgctgaaggctttgccgacttcagccagatgtccaagacagatccacaggtgaggagtgaactgttgaaggaggacagcagcgaggctggttaccagactggacccgttggtgtccggccctcaccacacggtgacctgaactcactgtggctctggtcccagacagctgtagggcttctccagacgctggcagtgtggttggagctcatctttaaggcctggggacaactggggcagcagatgggggcactcccagattccaatcgcagcttcgtacttggtgtgatcattgtcgtgtggtccatgtgccaactttatctagtgccacccccaccttctggccctttcacctcctccttgggaggggcaggattctcagatgacccctttaaaagtaaacaggacactcctgctctgcctccgaagaaacctgctcctccacggcctaaaccgcccagcgccaccgcctaccggtgccggatggcgggggaccagggcctccctgctcaccagcccagagtagcagcagatgccgtgggaccctgtgtggggagcaagagggtccccccggcccagctgcccaggtccacgcaagtgccgtatgtgcgtggtcccccgagtcattcagcacccctctctgctgctgcccagtctagtgggaaggaggagccagccacagatctggcgctcccaccctatgccagcagcacccccgagttgacaaccaaaaatgttcccagactgggtcactctccactgagcatcacagatgcagaagatcatggaaattggcatttgagtgtcagaaaggggcagaaaaaaatgatgatgggatatttctggattagtcggtatgacctagcgctgcctgagttggtgtctcttactgaaacgtacaactatcacactttctattctgtctgttctccaacagaacatacacgcaagaaacagaaacagcttcagccccgtgaacgatttgcctttcactggactcagaagcttccaggagaaacctggaagacattttcaaataagcaagaaaaatag

SEQ ID NO: 121671 - DNA, 1040 bp, Homo sapiens
atgggagtttgatgttccagcaagtaccaatggttgagattgatgggatgaagttggtacagaccagagccattctcaactacattgccagcaaatacaacctctacgggaaagacataaaggagagagccctgtacgctatgacccatgatgacgaagtccgagctccgtacgccagctgcagcttgcaaattataatcagagtgccagttcagaaccagagtcgatgctgtacgaaccatgatgattccaggttcacccaggtcttaaagagccacagacaagactaccttgttggcaacaagctgagctgggctgacattcacctggtggaacttttctactacgtggaagagcttgactcgagtcttatctccagcttccctctgctgaaggtaaaactgttagcgtcttcggtgaaacctgtgccactcccgtcggccctccgctggcccgcacacgcagtcgcgcaaaatattgtcacttcctggctgactggcggacgcttcatcgaactaaaaaccgtccaaattcttgaccgcctggagctggaaaagccctgtatcgatgccgaagacgagtgctttaacaccgaatggtctaccgagtttaccctgcttaaagcctgggatgaatacctcaaagcctggtttgccctgcaccttctcgaagcgatgttccagccttctgattccggtaaatcgttcatctttaatatgagcgtcggttacaacctcgaaggacagcccctgaacccaaagaattacccatcccaaggggtgccaagggtcttaaagagccacagacaagactaccttgttggcaacaagctgagctgggctgacattcacctggtggaacttttctactacgtggaagagcttgactcgagtcttatctccagcttccctctgctgaagccacacacgcatgttgacaatacaaagaaaggatcgcacccccacatgtgcgcatacactgactacgtcaacaaccccaatgatcgcatgccccagagagagataacgttcgtcagctag

SEQ ID NO: 121672 - DNA, 869 bp, Homo sapiens
aaaccagaagactgttaccatggcagggaagcccaagcttcactacttcaatggacggggcagaatggagcccatccggtggctcttggctgcagctggagtagagtttgaagagaaatttataggatctgcagaagatttgggaaagttaagaaatgatggaagtttgatgttccagcaagtgccaatggttgagattgatgggatgaagttggtacagaccagagccattctcaactacattgccagcaaatacaacctctatgggaaagacataaaggagagagccctaattgatatgtatacagaaggtatggcagatttgaatgaaatgatccttcttctgcccttatgtccagctgaggaaaaagatgccaagattgccttgatcaaagagaaaataaaaagtcgctatttcccctgccttcgaaaaagtgttacagagccatggacaagactaccttgttggcaacaagctgagccgggctgacattagcctgggtggaacttctctactatgtggaagagcttgactccagccttatctcccaacttcccctctgctgaaggccctgaaaacccagaatccagcaaccctgccccacgggtgaagaagtttcctacagccctggcagcccaaggaagcctcccgcagatgcaaaagctttagaagaagccagaaagattttcaggttttaataaagcagccatggaggctaagaacatgcaagaccaatattctaaagttttgcaacaatgaagtgctttacttaagtgttgattgtgcctgttgtaaagctaatgaaccctttccaattatatgctaattaaataataaaaactcctatttgctaacttagttaaaaaaa

SEQ ID NO: 121673 - DNA, 1014 bp, Homo sapiens
ggcacgaggagctattgagaggaacaaagagcttataaatacattaggacctggaattcagttgtcgagccaggacggtgacagcgtttaacaaagcttagagaaacctccaggagactgctatcatggcagagaagcccaagctccactacttcaatgcacggggcagaatggagtccacccaggtggctcctggctgcagctggagtagagtttgaagagaaatttataaaatctgcagaagatttggacaagttaagaaatgatggatatttgatgttccagcaagtgccaatggttgagattgatgggatgaagctggtgcagaccaaagccattctcaacttacatttgccagcaaattacaaccttcttatggggaaagacattaaagggagagagccctgatttgattatgtattttaggaaggttttagccagattttggggttgaattgatcctcctttttgcccgtatgttccacctgagggaaaaagatgcccaagctttgcctttgatccaagagaaaacaaaaaatcgctacttccctgcctttgaaaaagtcttaaagagccatgggacaagactaccttgttgggccaacaagcttgagccggggctggacattcatctggtgggaacttctctactacgtcgagggagcttggactccacgtcttatctccagcttccctctgctgaaggccctgaaaaccagaatcagcaacctgcccacagtgaagaagtttctacagcctggcagcccaaggaagcctcccatggatgagaaatctttagaagaagcaaggaagattttcaggttttaataacgcagtcatggaggccaagaacttgcaataccaatgttctaaagttttgcaacaataaagtactttacctaagtgttgattgtgcctgttgtgaagctaatgaactctttcaaattatatgctaattaaataatacaactcctattcgctgacttagttaaaattgatttgttatcattagga

SEQ ID NO: 121674 - DNA, 2286 bp, Homo sapiens; identical to SEQ ID NO: 117722

SEQ ID NO: 121675 - DNA, 942 bp, Homo sapiens
  misc_feature (1)...(942): n = a,t,c or g
atgacagtggactattgtaagcttaaccaagtggtgattccaattgcagctgctgtatcagatgtggtttcattgcttgagcaaattaacacatctcctggtacctggtatgcagccattgacttggcaaatgcctttttctccattcctgtccataaggcccagcagaagcaatttgccttcagctggcaaggccagcaatatacctttactgtcctacctcagtggtatatcaactctccagctttgtgtcataatcttattcggagagaccttgattgcttttcgcttccactagatatcacactggtccattacattgatgacattatgctgattggatccaccataaagtgggttgtgcacagcagcattccatcatcaaatggaagtggtatgtacatgattgggctcgagcaggtcctgaaggcacaaccaatggtttggctggatgatcagggacttgcaagaagcatgagtggaaaactggtgacaaaggaattcggggaagaggctaagaagggagttacagtgttggctggggtgactgacctggactataaagatgaaatcactctcctactccataatggaggggtcttcacggctccttatgatgggcgctacctgatcacggccaccctcacccccgagagagacgcctacgtggaagcagtgctgtcggtctccaacgccagcgtggcccagctgcataccgctgggtacaggagagagttcctggaataccaccgccctccaggagctttgcatacctgcgggggcccgggggcattccacctcatcgtgcacctgaaggcgggagatgcagtcaacgnnttgaaaactatgcagatgtttttagacagagcaaaacacaacacagtacccaaaaacggaggcagcctgcatgctccaggtctacacgagcacctcacagcctga

SEQ ID NO: 121676 - DNA, 699 bp, Homo sapiens
atgactggacaatcatatttgagaatgatgtgcatagaattggatatgaccaaattgctccaacgatctcaggttgactttatggaaccaatacttacaaagtacttacaaccaatacttccctctcagaaaccaacctggtatctagctcagagtgtttccatcgttacaggagatgtatggccttttaccagagtgactatgcattggggaaagggaaataatcagacatttcagagactactggacactggctgtgagctgacattgattctggaagactcaaaacatcatcatggtcctccagttaaagtaggggcttatggagatcaggtaattgatggacttttagctcaggtccaacttacagtgggtccagagggtccccagactcatcctgtggtcatttccccagtgccagaatgcataattgtgatagacatacttagaagctggcagaacccctacattggctccctgactggtaggaagacagatggatcttggagaatgacagtggattattgtaagcttaaccaagtggtgactccaattgcagttgctgtaccagatgtggtttcattgcttaagcaaattaacacatctcctggtacctgttatgcagccattgacttggaaaatgcctttttctccattcctgtccataaggcccaccagaatcaatgtgccttcagctag

SEQ ID NO: 121677 - DNA, 1014 bp, Homo sapiens; identical to SEQ ID NO: 114150

SEQ ID NO: 121678 - DNA, 1141 bp, Homo sapiens
atgtcactgtggtcctccagtaaagtagaggcttacggaagtcaggtacttaaaggagttttagctcaggtccaacttacagtgggtccagtgggtcctcggactcatcctgtggtcattttcccagtgccagaatgcataattggcatagatatgcttagtagcaggcagaacccccacactggctccctgactggtagggtgtggactattatggtgagaaaggccaaatggaagccattagagctgcctctacctagaaaaatagtaaatcaaaaacagtatcacatccctgaagggattgtggagattagtgccaccatcaaggacttgaaggatgcaggggtggtgattcccaccacatccccattcaactctcccatctggcctgtgcagaagacagacggatcttggagaatgacagtgggttactgtaagcttaaccaagtggtgactccaattgcagctgctgtaccagatgtggtttcattgcttgagcaaattaacacacctcctggtacctggtatgcagccattgacttggcaaatgactttttccccattcctgtccataaggcccaccagaagcaatttgccttccgctggcaaggccggcaatacacctttactgtcctacctcaggggagatgggaaataaatatgactaaaattcagggaccttctacctcagtaaaatttctaggggtccagtggtgtggggcttgtcaagatattccttctaaggtgaaggataagttgctgcatttagtccctcctacaaccaagaaagagcacaatgcctatctggatttcggagggaacacattcctcatttgggtgtgttactccagcccatttatcgagtgagccgaaaggctgccaattttgagtggagtccagaacaggagaaggctctgcaacaggtccaggctgctgtgcaagctgcttggccacttgggccatacgacccagcagatccaatggtgcttgaggtgtcagtggcagatagggatgctgattggagctgttggcaggcctccataggtgaatcacagtggaggcctctagaacattggagcaaggccctgccctcttcttcagataactactctccttctgagagagagctcttgctcgtgcc

SEQ ID NO: 121679 - DNA, 2595 bp, Homo sapiens
atggtgagaaaagccaaatggaagccattacagctgcctctacctagaaaaatagtaaatcaaaaacagcatcgcatccctggagggactgtggagattagtgccatcaccaaggacttgaaagacgcaggggtggtgattcccaccacatccccgttcaactctcccatttggtctgtgcagaagacagatggatgttggagaatgacagtggattattgtaagcttacccaagtgatgactccaattgcagctgttgtaccagatgtggtttcattgcttaagcaaattaacacatatcctggtacctgtaaaatttctaggagtccagtggtgtggggcctgtcgagatattcctctaaggtgaaggataagttgctgcatttggcccctcctacaaccaagaaagaggcccaacacctagtgggcctatttggattttggagggaacacattcctcatttgggtgtgttactccagcccatgtatcaagtgacccgaaaggctgccagttttgagtggggtctggaacaggagaaggctctgcaacaggtccaggctgctgtgcaagctgctctgccatttgggccatatgactcggcagatccaacggtgcttgagatgtcagtggcagatagggttgctgtttggagcctttggcaggcccccataggtgaatcacaatggaggcctctaggactttggagcaaggcccttccattttctgcagataactactctccttttgagagacggctcttggcctgttactgggctttgatggaaactgaaggtttgactatgggtcatcaagtcaccatgcaacctgaactgcctatcatgaactgggtgctttctgacccatctagacataaagtgggtcatgcacaacagcattccatcatcaaattgaagtggtatatatgtgatcaggctcgagcagttcctgaaggcacttgtttaactaaacaaggaagtggctcaaatgcccatggcaccacccgaaagtggacagctgcagcactacaatccctttctgggatatccctgaaggatagcggtgaagggaaatcttcccagtggacagaacttcaagcagtgcacctggttgtgcactttgcatggaaggagaaatggccaggaacttggaagaagcatgattggaaaactggtgacaacgaaatctggggaagaggtatatggatggactgctctgagtggtcaaaaactgtgaagatatttgtatcccatgcccatgaaccaagtggccatggtggcagggatggaggttacgcatgggctcaggaacatgaactttcattcaccaaggctgacctggctacgggcattgttgagtgcccaatttgccagcagcagagaccaacactgagccctcgatacggcaccattcctcaggggcagacatttatcctcactggaataaacacttactccatatatgggtttgcctatcctgcacacaatgcttctgccaagattaccatccgtggactcacagaatgccttatccaccatcatggtattccacacagcatgtctctgactaaggcactcactttacggccaaagatgtgtgaaaccagaattcacaggcccaggaatcaaggggtggaagtggaagtggcaccactcaccatcacccgtagtgatacactagcaaaatttttgcttcctgttcccacgacattccgttctgctaacctagaagtcttacttctagagggaggaacactgccaccaggagacccaacaacaattccattaaactggaagttaagattgccacgtggacactttgggctccccctacctttaagtcaacaagctaagaagggagtttcagtgttggctggggtgactgacctggactatcaagatgaattcagtctactactccacaacagagtaactgctgcttttccttcccttctccacagtagctttgcatatttggataatatgattgaaaaagcaaacaaatgccatgttgagggtgtggaccatgtatcagatcctgctcaaaggagggagtgtgatcggcacacaggctccagctgtcacctccttcgtggtccacctcaattgcagagccagttggtctcaggcccaagatctcctaagtcagattctggtgaaagttgcctggcctgggacccaaccttcaaagctgaagtctcccctctggcacagggcagccccagaaattctgtccaagaaccaagtcctagaactgggagccccaaaagcctgcttggtgctcttatagccctgtggccaagctggtacctaagcagtgaccctgatcctcagggatccaattccagaaatctggagatttctgcttgtcagaagtacttaagcccagcttttggaaattcagattattctacagcagaagatttcaactctgactacactttaaaatcacctgaaaattctattggatatgctagactagagaagcacagaaggctgtatggtggtgatggtggtgatggtggtggtgatgatgttagaggcggaaaaagaggagatgattctgccagtagaaagggagtcactgaacgtgtttga

SEQ ID NO: 121680 - DNA, 423 bp, Homo sapiens
gtcactatcaagccattaagttttgtctgggttgctgtcagccccagttggcttcctggtcaacaaggacctcaagaactgcctgtggaccgaggccccctaccagtgcatgagacacacacctaccctccccagctttccaggaaccctactggctgccagactgatgggcgggctggtatgtgtggacatgtgttcactgtcattatgctgtggctccagctggggaggtagctgagaacttggcactgcgcacacatactaggttgaaagagagttgaggaaaccagaaggccaagtggatctgctggcaaaccctgaacctgtctcctgcgcttgctctacagttctgaagttgaaaatccttttcatgcctagcatctgcttgagttataaaccccaaggcagccatgtcatagaaaa

SEQ ID NO: 121681 - DNA, 380 bp, Homo sapiens
gaaacccagaaaacaaccgtagtttctttgggtggttttcaaaccacagctccattgagtctgacaagattgtggagataatcaacgaagaattgtggcccaatcccttgcagttctaccttttgagtgaaggggctcgtgtagagaaaggaaaggaaaaagaaggcaggcaaggtccaggaaagcagccaatggagactactcagcctggggtgagcaaatccaactgatcctgcacaagtctccctgctacctcctgctgggctgctcctggttgactacatatttggctctctgccttctcttcatgttggcctctgtgtactatagaccctttggactttagttacaagaatatggcatttatgatcaaaaaaaaa

SEQ ID NO: 121682 - DNA, 2687 bp, Homo sapiens
tttttttttttttttttttgacagagatacaggtttttatttttccatcatgcatgcaaacttacaactatttatactgtttaagaacacagaaataattgcgttattaacagggtgtcaaattaccaagtagaacaaccagttactaattattttggggaggttattttcacagaacacagcaacaatttccaaattattcttccaaaaccagagttatgagaccagtacaagctgataacaatgctaatggtcacacaagtttccatgttacacagaaaaaaagattgacattctggtgaagggtctcaagtaccttaccatatcagaatttttgaaagagttttacaacagaacagtctctctcttgttttgtagatgcaagggaaaggaagcatccctctcatttctttttgagactccttgttaattcttaaaacacatttctaaggcccatctctggaacttcattagttaacattaaaagcaaaaagcagacctgatgtgattatgatagtgcaccccatcactatcaccatcaaaagagactaccaatctcccaaagtagtcacggttgcattggcatagtgtcttggattttcaataaacaatacaggtgaaaagagagagatacagatgaaaccaggttgaccatagctgataagtgatgcagctaggtgatggacacatggggtccaaggaccatcctctccacttctgtgcatgtctgaaaatgtccataacacagagcaaaaaaaaaaataataacaaaaaacaaaaaagcagacttgcacatctgtatcttcccattagactaaaatggggaaagtcgtaagactttaaaggcaaaatgtgcagcatatagcattcttctgcatgtacaaagccacacctagaacaaaaaaataaagcatccaaagtaacattattccgtttctggtttgtctctgtggcttataaaatctactaatgataagattggacaaaactttgggaacatcctcaactaggcatcctatttgttcataaccccttcaattctcattttccaagctagggaggtccctcccatactctatcactgagagacaggcatgctccccctgcggcttctcaagccatttctgtctgattttgcaggcccactccataccagtatcatgcctactcgacggttttgctccaaatcccccacctagcacacccttgctacagctttaagccaaggactctcttgaggaacttagaatgaggcctccctaacaaaagagaaggtagggaagaacaggtgtagatacagtccttcttacccaccctcagggataagagagggaaaggcccagctctgcttttacacccactggaaataacccggagatccaaaacagattccgcccatcccaatccccatcccccaggagaagcttgagatgctccatattggagactaaagcccactcctggggctatttgaggtagaagcaaagagagcaaaggactgctgaaagtgggaaagctggggattgaggtccagatggccagaggctaccacaaaggaggaaacagcaggaggcacttgggtcttaggaagcattaaaacaaagtcaaaacaagagtaaacactagtctatgacatggctgccttggggtttataactcaagcagatgctaggcatgaaaacgattttcaacttcagaactgtagagcaagcgcaggagacaggttcagggtttgccagcagatccacttggccttctggtttcctcaactctctttcaacctagtatgtgtgcgcagtgccaagttctcagctacctccccagctgtatgtagaaaaatgtggtttttcagttgttttctctgtggtactatttaaacaaaataaaaaagaataaggaaagaaggaaggggaaggcagaaggggaggaaaggaggctaccaggaaagggagggaggaaagaagaatgagagggaggaaatgagggatgaaggcaggcaagcaaaataagaagtataagtgacctgaagtcaagcaagcagaggcccacaaatcagaaatacctcttcccagaacccctactatggcactctgctcacatcttagacgggaataagggaagttgacaatggtatctggattctatataggcccagtcctcaccctcacctggagccacagcataatgacagtgaacacatgtccacacataccagcccgcccatcagtctggcagccagtagggttcctggaaagctggggagggtaggtgtgtgtctcatgcactggtagggggcctcggtccacaggcagttcttgaggtccttgttgaccaggaagccaactggggctgacagcaacccagacaaaacttaatggcttgatagtgacacggcatggcgcagatcttgatgaaagttcaccagtagaagggcccagaaggaagaagagacacatgatggtacagaacacatggcatactgtttcttgcccttaacttcatgcatgcccagcagtcaagtgccattctgcagaacatcaaggaggatgggtatcacagaccacaggccaaagccagaaataaagcaggtgacatctcagctggtgaccccagacccacagaacaggaagttctggctgatgactaataccatgtgcactggcttcattctgcagtggcaatggaaa

SEQ ID NO: 121683 - DNA, 1807 bp, Homo sapiens
atgagcggccgaagtcggggtcgaaagtcctcccgcgccaaaaaccggggcaaaggccgcgccaaagcccgagtccgccctgctccggacgacgccccgcgcgacccggacccttcacagtaccagagtctcggggaagacacccaggcggcacaggtgcaggctggcgcggggtggggtggcctggaagccgctgcgtccgcgcagctcctccggctcggggaggaggccgcctgccggctccccctggactgtggcctcgcgctgcgggcccgagctgcgggggaccacgggcaggccgcggccaggcccggcccggggaaggccgcatctctctcggagcgcctggccgcagacagtgtcttcgtgggaacagcgggaaccgtgggaaggccgaaaaatgccccccgcgttggaaaccggcgtggccctgccgggaagaaggccccagaaacctgtagcaccgcggggagggggcctcaggtcatagctggtgggaggcagaagaaaggggcggcaggggagaatacctcggtgtcagctggggaggaaaagaaggaagagagggatgcagggtcggggcccccagcgacggaaggcagcatggatacgctggagaacgtgcagctgaagctggagaacatgaacgcccaggcggacagggcctaccttcggctctccaggaagtttgggcagttgcgactgcagcacttggagcgcaggaaccacctcatccaaaatattcccggtcttcagtgggcaagcattttagaaccatgtcctgttagcatcctttctgaatagccaagagaaagaggtactgagctacttaaacagcttggaagtggaagagctcggccttgccagattgggctacaaaatcaagttctacttcgatcgcaacccgtatttccaaaataaggtgctcatcaaggaatatgggtgtggtccttctggccaggtggtgtctcgttctactccaatccagtggctcccagggcatgatctccagtccctaagccagggaaacccagaaaacaaccgtagtttctttgggtggttttcaaaccacagctccattgagtctgacaagattgtggagataatcaacgaagaattgtggcccaatcccttgcagttctaccttttgagtgaaggggctcgtgtagagaaaggaaaggaaaaagaaggcaggcaaggtccaggaaagcagccaatggagactactcagcctgggccattaagttttgtctgggttgctgtcagccccagttggcttcctggtcaacaaggacctcaagaactgcctgtggaccgaggccccctaccagtgcatgagacacacacctaccctccccagctttccaggaaccctactggctgccagactgatgggcgggctggtctcccagttaccccttgtgacaagaaagctttaccttgtgctcagtgttttgtgtctcatctcctctattgcatggggctacagcccaggcaaaaggagaaaattaaccctgaagtgtcctctattaccaatgtggcccccaaagacatggagaaggttcatgcaggggccctcgataagccaatgtgtggcagacaaggcaaggaatcacagggagccacccaccatgcgaccccatctgccatatcgccagcccctagccatcctctaggttcctctgagactttagacattgatgggttggcccacttcttagaacactcacagatcaacccatctctgttgtcaagagtcttaatccagcgtcagcatctgcgtcatgtagcagtcaccaatggctaa

SEQ ID NO: 121684 - DNA, 413 bp, Homo sapiens
agcggccgccatgtgcttttccagctctgcctccaaatgcaacgtgtgctccctcacctggacagatgcacagacacgcacacgcatgcgccagcagcctctgctcaaagggcactcacctcagggagcaggctggccctgggataggtgaggcctctcgggagatccctgaggcccaccagctaccaaagccaacgagaaactagtccgcggcaagagaaccccttacggaaagtggcaggctgcacccgggcactcctggggactgacatgctcttagatttacttgcaaaagcaggtaccaagggtaccttctccagggctccctgtggcgtctgaagggggcagtggggccaccttgactgtgaaggccgtggcagaagccctgttcaccagggctgggcaggtctgca

SEQ ID NO: 121685 - DNA, 1994 bp, Homo sapiens
  misc_feature (1)...(1994): n = a,t,c or g
gcgtccaggccagccaggcggaggctgaccagcagcagacttgcctcaagcagctgcagttcgcatgctgtcgcgtctgtagaagcaggccatcgagctgagggaggccgtcgagcagcataaagtgaagaacaatgacctccgggagaagaactggaaggccatggaggcactggccacgggccgagcagggcctgcaaggagaagctgcactcctggacccagggccaaggaggaatcggaagaaaccagctctgtctgattgaggcgcagacccatggaggccctgctggctctgctccccagaactctctgtcttggcacaacagaatttacaccgagttggctgcaggatctcaaagagaaaggccccacgctgactgaagcacccgccagctcccgcggagccttccttcgggacctgggcctttcaagtttgaggggaggccgagggagacgcagagcaccatttgcagggccgagttttgaccagtaccgcagcatccttggcggagacggacgggcactgctcagagacctgcagaagagcgtggaggaggaggagcaggttttggaagggccaaggtgggcgccgcagaggaggagctccagaagtcccgggtcacagtgaagcatctcgaagagattgtagagaagctaaaaggagaacttgaaagtttcggacccaggtgagggagcacacgttgcatttggaggcagagctggaaaagcacatggcggccgccagcgccgagtgccagaactacgccttgtgaggtggcagggcgtgaggcaacttctcctagaattctcaatctcagcttcgattgccgcccaagaaccgaaacccccagaaaacagagccgatgagctttgcccttggtcaggcaagcagttgagtgaaattgaagagccacgtagaggattggtgacatagctggggccccagctttcttccccagaagcggctccccagccgagcagggacccccgttcagcttgaaggacgcagctggaattggaccagaagcccattccttggaggatgaggcagaccaccagccggcagaagcttcacgggccgagttttgagggaggcttcagaccttcgggcatgttcggtttacaaggaaggattttgggagaagcttccgcacagcgcggccccccctaggagttttttcagaaacaggagggaggccttcacagcttgaaggagagacttagaaaaaagaggaagaagtttaacaagtgaccctggggcgcgcccgcccacgaagactgcaggagctttctgaaagacggacccaggagcagcttggcaaggggagaaggacacgggtgaagaagctgcaggaaacagctgggaaaaggcagaggacggcagcagcttcaaaggagggcacctctgtcttgagtttcctctttgggaaaaagaagttactgtttcaactttaccaaaatgccttaacacattcctttacaattaaaccaaccaacctacacagcgtttatccagggcccaacttcccggtactccgagagaaagcccatgaagagacaagtctttttaggaggccacaggaagttaggacctttccaggaggccccattttgttaaatggaacctgtgtcaacatttgaataaaacacttatcccctggcgccagccccggcgccacccgccggagttggacggccaaagcctggggttggattcttggacaggcccctggggtgttgttgggggagggccggggcgttttgggggtnttgttttgttcagtggcattcgtttagtggttttttcagtggggcggggcgggaagcgggtggggaaaccgggcagccagttctcaaaggggctgtggggccgactggagggccacaagcccctcacccctagacgttgccaaccagaactgacgtgtgacctcctgggtgttgatgccattaaaaccaacgtttggttgcccggaaaaaaaaaaaaaaaa

SEQ ID NO: 121686 - DNA, 509 bp, Homo sapiens
gatttgaggatggatcagttctgaaacagtttctttctgaaacagagaaaatgtcccctgaagacagagcaaaatgctttgaaaagaatgaggccatacaggcagcccatgatgccgtggcacaggaaggccaatgtcgggtagatgacaaggtgaatttccattttattctgtttaacaacgtggatggccacctctatgaaaatatatacccccccatgcagtctaaaatgcttcagtacttgtgaaacacagctgtttttctgttctgcagacacgccttcccctcagccacacccaggcacttaagcacaagcagagtgcacagctgtccactgggccattgtggtgtgagcttcagatggtgaagcattctccccagtgtatgtcttgtatccgatatctaacgctttaaatggctactttggtttctgtctgtaagttaagcccttggatgtggtttaattgtttgtcctcaaaaggaataaaacttttcaactgataaaaaa

SEQ ID NO: 121687 - DNA, 888 bp, Homo sapiens
  misc_feature (1)...(888): n = a,t,c or g
aggggcaagagtttagtcctaaagtgtactcatnaaccagaccatgggaaattctgtggcccaatcggactattcaacgcagtggccaataatcaagacaaactgggatttgagtattggaccacttctgaaccagtttcttttctgaaacagataaaaatgtcctcctaaagacagggcaaaatgctttgaaagaatatgaggcaatacgggcagcccattgatgccgtggacaaggaaggcccaatgtcgggtagatgaccagggtgaatttccatttttattctgtttacaaaacgtggatgggccaccttctatgaacttggatggaccgaatgccttttccccgtggacccatggcccccagcttcaggaggacaccctgctgaaaggacgcttcccaaggtctgcaggaggaatctcaccggagccctgagcaacggagaaagtaccgcttcatctgcccgtggcttcttnggcaaaggcaagcctaaatgctctgtggggagggatttgctggattttcccctctttccctttcaaacatgaaaaatattataccccccccatgccagtctaaaatgcttcagtacttgtgaaacacaggctgttcttctgttctgccagacacgcccttcccctcagccacaccccaggcacttaagcacaatgcagagtgcacagctgtccactgggccgattgtggtgtgagcttcagatggtgaagcattctccccagtgtatgtcttgtatccgattatctaacgcctttaaatggctactttggtttctgtctgtaagttaagaccttggatgcgcgtttaattgtttgtcctcaaaaggaataaaactttttctgctgataagataaaaaaaaaaaaaaaaaaa

SEQ ID NO: 121688 - DNA, 3138 bp, Homo sapiens
atggcaggggatggcattatcttgattggcttggacctatcaggatccaacattcaagctgatgatgggtatgagtcaacaccacccaaacagaatggctactgcgtgttaggagagatgcaaccacggggcttacgaaaaaccagctttccatacttcccagtcagtctatatggcaagcagaagatggccatagtaatactcctgagtttacatctcctctgtgaagaggagacaaagccagaatctctggggccacctctcagttccagaagatcatctgaatggccccgctcagaccagacacccatccctgactgctgtgctagcaatcagcgagattccgtgggcgtaggaccctccgagccaggtgtgggatatagtctcgtggtgcgccgttttttaagcccgtcggaaaagcgcaatattcgggtgggagtgacccgattttccagggacatagatggagctggaagccattaccggcatcagcaaactaatgcaggaacagaaaaccaaacaccacatgttttcacttataattgggaactaaatgatcagagcacatgcacacatggaggggaaaaacacacgctggagcctgtctcagggggaaaaacctccctgctccccatcttgtcccctgaaatctaccctctccatggagcagccaaacccctgtccctgggatctgccaagggaagcagtcctgagaaaaggtggcatcgggtagtggtgagggacacagcttcacagcagcccccatttctgccattgaccatgggtactgcaggcaaggcactgaaccccccagtttcctcgtggtgttaccctgaatttagggaagaaaagaaaattgagagattccaagtattgagcgtagtactgaatgctttccatactttatgtaatttcatctccacaaaactaagtgaggtagatgcccgttttatagatgacgcaaagcggctgctggaagaactcaaatatagacacttcctcagaactgtgcaaggtgatagggaaacagatggaaaagacattctctttaaagagctcatgagctggagagaaaatgtgcaaatgcagtttcggatgctctgtgctggttatcctccacttgccaaccgcaccgtctgccatttctgccatgaggccgacctccaagcagagcagcaccagggttccctatccttcagctcccagatggatcagtcaatgccactggcagaagatccaaggcaagaggagaaagaagtgggtgtttctgccccacttactccagatttcagcactgaatttctggcagtgtctgcatccttctatggctacagctcctgccagcctacaacctcattatccacacatgggagcacaggcactcgcctccgggtactgtatgagtcggcttgcaaagaggaatgcctgggaggcagacaggatgctgaggcaaagctggcagccagcaggaggggccagccctcttccctgatgtcgtcacgtgaagggggctggggggagggctcgcagagcaggaactccagccatggagccctgaaagaagcccagttcataataaccaatgcagagaagtccttaaaggacctgatggagctgaaaaccatggcacaagaactacgtgacgaatgcacaagcctcagtagccgattcgatcaactggaagaaaaggtatcagtgatggaagatgaaattaatgaaatgaagcaagaagagaaggttagagaaaaaagaataaaaagaaatgaacaaagcctccaagaaatatgggactatgtgaaaagaccaaatctacatctgattggtgtacctgaaagtgacagggagaatggaaccaagttggaaaacactctgcaggatattatccaagagaacttccccaatctagcaaggcaggccaacattcaaattcaggaaatacagagaatgccacaaagatactcctcgagaagagcaactccaagacacataattgtcagattcaccaaagttgaaatgaaggaaaaaatgttaagggcagctagagagaaagaaatacaaactaccatcagagaatactataaacacctctacacaaataaactagaaaatctggaagaaatggataaattcctggacacatacagtctcccaagactaaaccaggaagaagttgaatctctgaagagaccaataacaggctctgaaattggggcaataattaatagcttaccaaccaaaaaaagtccaggaccagatggattcacagccgaattctaccagaggtacaagaaggagctggtaccattccttctgaaactattccaatcaacagaaaaagagagaatcctccctaactcattttatgaggccagcatcatcctgataccaaagcctggcagagacacaacaaaaaaagagaattttagaccaatatccctgatgaacatcaatgcaaaaatcctcaataaaatactggcaaaccaaatccagcagcacatcgaaaagcttatccaccatgatcaagtgggcttcatccctgggatgcaaggctggttcaacatacgcaaatcaataaacgtaatccagcatataaacagaaccaacgagaaaaaccacatgattatctcaatagatgcagaaaaggcctttgacaaaattcaacagcccttcatgctaaaaactctcaataaattaggtattgatgggacgtatctcaaaatagtaagagctatttatgacaaactcacagccaatatcatactgaatgggcaaaaattggaagcattccctttgaaaactggcacaagacagggatgccctctctcaccactcctattcaacatagtgttggaagttctggccagggcaatcaggcaagagaaagaaataaagggtattcaattaggaaaagagcaagtcaaattgtccctgtttgcagatgacatgattgtatatctagaaaaccccatcgtctcagcccaaaatctccttaagctgataagcaacttcagcaaagtctcaggatacaaaatcaatgtgcaaaaatcacaagcattcttatacaccaataacagacaaacagagagccaaatcatgagtgaactcccattcacaattgcttcaaagagaataaaatag

SEQ ID NO: 121689 - DNA, 594 bp, Homo sapiens
atggcgggcgcccctcccccagcctcgctgctgccttgcagtttgatctcagactgctgtgctagcaatcagcgagactccgtgggcgtaggaccctccgagccaggtgcgggacataatctcgtggtgcaccgtttttttaagcccgtcagaaaagcgcagtattcgggtgggagtgacccgattttccagggaaacaccagtctctgttaccaaacaaaaacagcattccttcagttcccctttccatataaggccaaggcattattctcaggatatgttttcagcatcgcaaccgcatcagactccggcatcgcaaactgcacccggtgccggcagccacatccagcgcaaaaaccttcgaactctcagcggtataccggcatacagcatgtgcatcgcataggaatggcggaacgtatgtggtgtgaccggaacagagaacgtcacaccgtcagcagcagcggcggcaaccgcctccccaatccaggtcctgaccgttctgtccgtcacttcccagatccgcgctttctctgtccttcctgtgcgacggttacgccgctccatgagcttatcgcgaataaatacctgtga

SEQ ID NO: 121690 - DNA, 744 bp, Homo sapiens
ttacattttggcatgattttgcagcggctggtaccggttgttcctttccatgtttagtgcttccttcaggagctcttttagggcaggcctggtggtgacaaaatctctcagcatttgcttgtctgtaaagtattttatttctccttcacttatgaagcttagtttggctggatatgaaattctgggttgaaaattcttttctttaagaatgttgaatattggcccccactctcttctggcttgtagggtttctgctgagagatccgctgttagtctgatgggcttccctttgagggtaacccgacctttctctctggctgcccttaacattttttccttcatttcaactttggtgaatctgacaattatgtgtcttggagttgctcttctcgaggagtatctttgtggcattccctgtatttccttaatctgaacgttggcctgccttgctagattggggaagttctcctggataatatcctgcagagtgttttccaacttggttccattctccccatcactttcaggtacaccaatcagacgtagatttggtctggaaaatcgggtcactgccacccgaatattgcgcttttcagaccggcttaaaaagcggcgcaccacaagattatatcccacacctggctcagagggtcctacgcccacggaatctcgctgactgctagcacagcagtctgagatcaaactgcaaggcggcagcgaggctgggggaggggcgcccgccat

SEQ ID NO: 121691 - DNA, 1080 bp, Homo sapiens
atggcgggcgcccctcccccagcctcgctgccgccttgcagtttgatctcagactgctgtgctagcaatcagcgagattccgtgggcgtaggaccctctgagccaggtgtgggatatagtctcgtggtacgccgtttcttaagccggtctgaaaagcgcaatattcgggtgggagtgacccgattttccagagaagaaggcttcagacgatccaattactgtgagctacgggaggacattcaaaccaaaggcaaagaagttgaaaactttgaaaaaaatttagaagaatgtataactagaataaccaatacagagaagtgcttaaaggagctgatggagctgaaaaccaaggctcgagaactacgtgaagaatgcagaagcctcaggagccgatgcgatcaactggaagaaagggtatcagcattggaagatgaaatgaatgaaatgaagcgagaagggaagtttagagaaaaaagaataaaaagaaatgagcaaagcctccaagaaatatgggactatgtgaaaagaccaaatctacgtctgattggtgtacctgaaagtgatgtggagaatggaaccaagttggaaaacactctgcaggatattatccaggagaacttccccaatctagcaaggcaggccaacgttcagattcaggaaatacagagaacgccacaaagatactcctcgagaagagcaactccaagacacataattgtcagattcaccaaagttgaaatgaaggaaaaaatgttaagggcagccagagagaaagctcgggttaccctcaaaggaaagcccatcagactaacagcggatctctcagcagaaatcctacaagccagaagagagtgggggccaatattcaacattcttaaagaaaagaattttcaacccagaatttcatatccagccaaactaagcttcataagtgaaggagaaataaaatactttatagacaagcaaatgctgagagattttgtcaccaccaggcctgccctaaaagagctcctgaaggaagcgctaaacatggaaaggaacaactggtaccagccgctgcaaaatcatgccaaaatgtaa

SEQ ID NO: 121692 - DNA, 351 bp, Homo sapiens
atggcgggcccccctcccacagcctcgctgccgccttgcagtttgatctcagactgctgtgctagcaatcagcgagattccgtgggcgttaggaccctccgagccagggattttgccgatttcggaaccaccatcaaacaggattttcgcctgctggggcaaaccagcgtggaccgcttgctgcaactctcacagggccaggcggtgaagggcaatcagctgttgcccgtctcactggtgaaaagaaaaaccaccctggcgcccaatacgcaaaccgcctctccccgcgcgttggccgattcattaatgcagctggcacgacaggtttcccgactggaaagcggacagtga

SEQ ID NO: 121693 - DNA, 834 bp, Homo sapiens
atggcgggcgcccctgccccagcctcgctgccgccttgcagtttgatctcagactgctgtgctagcaatcagcgagactccatgggcgtaggaccctctgagccaggtgcgggttataatctcgtgcccgtcggaaaagcgcagtattcgggtgggagtgaccggattttccaggtgctgtccgtcacccctttctttgactcggaaagggaactccctgaccccttgggcttctcaagtgaggcaatgcctcgccctgcttcagctcgcgcacggtcgggggtccccaaaccccagaccatgaaccagtaccaatcatggcctgaaccaggcctcacagcaggagtttcaggtcttacatttaagtctttgatccatcttcagttgattgttgcatatgatgtgttcagagtttcttctttctggtgggttcgtggtctcgctggctcgggagtgaagctgcagaccttcgcagtgagtgttacagctcttaaggcagcacgtctggagttgttcgttcctcctgatgggctcgtggtcttgctgggctcaggagtgaagctgcagatcttcgcagtgagtgttacagctcataaaagcagcgtggacccagagacccttgagtggtcgatgggactgggcaccgtggagcagggggctgcgctcgtcggggatgctcgggctgcacaggaacccacggaatgggtgggaggcgcaggcatggcgggctgcaggtcccgagccctgccctgcgggaaggcagctaaggttcggtgccagtaccagaaaactagagacaattcctacaccccagagcccactgaaattatttaa

SEQ ID NO: 121694 - DNA, 480 bp, Homo sapiens
atggcgggcgcccctcccccagcctcgctgccgccttgcagtttgatctcagactgctgtgctagcaatcagcgagactctgtgggcgcaggaccctccgagccagaaagacaaactaccatcagagaatactataaacacctctatgaaaataaactagaaaatctagaagaaatggataaattcctggacacatacaccctctcaagactaaaccaggaagaagttgaatctctgaatagacgaataacagggtctgaaattgaggcagtaattaatagcctaccaaccaaaataagcccaggactacatggattcacagctgaattctaccagaggtacaaagaagagctgctagggccggttgtaggggagtggggttatccacataggctcaatgccggtccccacgagaacggcgggtccccttccatttttcgccggcccatgccgctgattccccgggaaattgactcttag

SEQ ID NO: 121695 - DNA, 504 bp, Homo sapiens
ttaggctgctcgggggtcaggggtcagggacccgcttgaggaggcagtctgcccgttctcagatctgcagctgcgtgctgggagaaccactgctctcttcaaagatgatctgtcaggcggaaccgggtttaataccgaaactaaaatgccccgatctccatcaacagactctggggcgatttgtcttccgggacgaactcggacttgaatgcctcgactggggactctagaaaatccccacccgcttgaggaggcagtctgcccgttctcagatctccagctgcgtgctgggagaccacagctctcttcaaagctggaaaatcgggtcactcccacctgaatattgcgcttttcagaccggcttaagaaacggcgcaccacgagactatatcccacacctggctcacagggtcctacgcccagggaatcgcgctgattgctagcacagcagtctgagatcaaactgcaaggcggcaacgaggctgggggaggggcgcccgccat

SEQ ID NO: 121696 - DNA, 627 bp, Homo sapiens
atggcgggcgcccctcccccagcctcgctgccgccttgcagtttgatctcagactgctgtgctagcaatcagcgagactccgtgggcgtaggaccctccgagccaggtgccggatataatctcgtggtgcgccgttttttaagcccgtcggaaaagcgcagtattcgggtgggagtgacccgattttccaggtggctgccctcacccctttctttggctcagaaagggaactccctgaacccttgcacttcccaagtcctgactccagcacctgaaaagcaaccagacaacaaattgccactgcccagaagaggctccagggacccaacagaatactttcatgggcaggaggtacgggacaagtcagatgaacacgtggatcatgtgtctcagatccatagtttcagagatgaagttaaaagacttggagctgaagattccagcaatgcagaaacgccaacagaactccatgagttcaacactggaggtgtctatcggcccccaaactcaacatctgtaattcagcctctagatcagggtgtcataaggacctttaagccttgttacacaaagtactctttggaaaagattgtcagtgccgtggaagagaaccctgatagaacatga

SEQ ID NO: 121697 - DNA, 519 bp, Homo sapiens
tcactgcccgctttccagtcgggaaacctgtcgtgccagctgcattaatgaatcggccaacgcgcggggagaggcggtttgcgtattgggcgccagggtggtttttcttttcaccagtgagacgggcaacagctgattgcccttcaccgcctggccctgagagagttgcagcaagcggtccacgctggtttgccccagcaggcgaaaatcctgtttgatggtggttccgaaatcggcaaaatccattaattgcgttgcgctcactgcccgctttccagtcgggaaacctgtcgtgccagctgcattaatgaatcggccacgcgcggggagaggccgtttgcgtattgggcgccagggtggtttttctttcaccagtgagaccggcaacaactgattgcccttcacggctggccctggctcggagggtcctacgccaacggagtctggctgattgctagcacagcagtctgagatcaaactgcaaggcggcagcgaggctgggggaggggcgcccaccat

SEQ ID NO: 121698 - DNA, 479 bp, Homo sapiens
aaaccagctttccatacttcccagtcagtctatatggcaagcagaagatggccatagtaatactcctgagtttacatctcctctgtgaagaggagacaaagccagaatctctggggccacctctcagttccagaagatcatctgaatggccccgctcagaccagacacccatccctgactgctgtgctagcaatcagcgagattccgtgggcgtaggaccctccgagccaggtgtgggatatagtctcgtggtgcgccgttttttaagcccgtcggaaaagcgcaatattcgggtgggagtgacccgattttccagggacatagatggagctggaagccattaccggcatcagcaaactaatgcaggaacagaaaaccaaacaccacatgttttcacttataattgggaactaaatgatcagagcacatgcacacatggaggggaaaaacacacgctggagcctgtctcagggggaaaa

SEQ ID NO: 121699 - DNA, 1572 bp, Homo sapiens
atggcgggcgcccctcccccagcctcgctgctgccttgcagtttgatctcagactgctgtgctagcaatcagcgagactccgtgggcgtaggaccctccgagccaggtgcgggacataatctcgtggtgcaccgtttttttaagcccgtcagaaaagcgcagtattcgggtgggagtgacccgattttccagggaaacaccagtctctgttaccaaacaaaaacagcattccttcagttcccctttccatataaggccaaggcattattctcaggataattgtttcagcatcgcaaccgcatcagactccggcatcgcaaactgcacccggtgccgggcagccacatccagcgcaaaaaccttcgtgtagacttccgttgaactgatggacttatgtcccatcaggctttgcagaactttcagcggtataccggcatacagcatgtgcatcgcataggaatggcggaacgtatgtggtgtgaccggaacagagaacgtcacaccgtcagcagcagcggcggcaaccgcctccccaatccaggtcctgaccgttctgtccgtcacttcccagatccgcgctttctctgtccttcctgtgcgacggttacgccgctccatgagcttatcgcgaataaatacctgtgacggaagatcacttcgcagaataaataaatcctggtgtccctgttgataccgggaagccctgggccaacttttggcgaaaatgagacgttgatcggcacgtaagaggttccaactttcaccataatgaaataagatcaccagctgaaaacataagcgagctttcccagtggctcctgtctgtaaagccagcatctccaaacgggagctcattcctgcttcagtgccactaggagtggaggaagcttgcagggcagtgtgtaacagcccaggcacggagcgggttcgggacagtgtgcaggccagagtcccacagccacggccgctggcttggccttggataggccaagcacccagaggagcagggggaggcctccgcggcgcccagcggggtccgggacccggagataaggatctgatttccagcgcctttgaagttagacaggcttctcctccttccccttccccaacccaaatgggtctcagcttcctctctggcccaatttgaaatttacttctccttgtgtccgagctctgggatagtctcaatttgtcccgggcacgacccgagcttggcgcagtagagatgaccgttgctgaagccacggcgctgccagcggcaccagcgctcttatttgaaaagtgcaggggaggagccaagatggccgaataggaacagctccggtctacagctcccagcgtcagcaacgcagaagacgggtgatttctgcatttccatctggaaaatccggtcactcccacccgaatactgcgcttttccgacgggcttaaaaaacggtgcaccacgagattataacccgcacctggctcggagggtcctacacccacggagtctcgatgattgctagcacagcagtctgagatcaaactgcaaggcggcagcaaggctgggggaggggcacccgccat

SEQ ID NO: 121700 - DNA, 2074 bp, Homo sapiens
aagccagtaggagactgagagattagaagaacagggcagtagaggatgaatttgcagtgaggttaaaggaacaatttattgggagaagggaatgtaggagggtagaagactttaaaattgaaaagaaataaaaggaggcagggatgtaaaacgagccataagtacaatgacaaatgggcattaaggaggaaaaagactatgtagaagaatctggtaaatatggatattaacagcaataagctcctttttaacgatttaattctaccaagtaaatatttgggattactcgctttttgccttttatttaccaaaaaattcatatattttcaaaggaacagctaccggacctgcatagccatttttctgatctgaacctggaagctcatatgtatgcatcccagtggtttctcactctttttactgccaagttcccactctgcatggtgttccacatcattgacttactgctttgtgagggtttgaacataatctttcatgtagctttggctctcctaaagacctcaaaggaagaccttctgcaggctgattttgaaggtgctttaaagttctttagagttcagcttccaaagagatacagggcagaggaaaatgcaagaagactgatggagcaggcttgcaatattaaagtaccaaccaagaagctgaagaaatatgagaaagaatatcagacaatgcgagagagtcagctgcaacaggaagacccaatggatagatacaagagggagaaccgaagattacaggaggccagcatgaggttggaacaagagaatgatgaccttgcccatgaactagtaacaagcaaaattgctctacggaatgacttggatcaggcagaagacaaggcagatgtgttgaataaagagctccttttgaccaaacagaggctggtggagactgaagaggagaagaggaagcaagaggaagagactgcccagctaaaagaagtcttcaggaaacagctagagaaggcagaatatgaaataaagaagactacagctatcattgctgagtataaacagatctgttcgcagttgagtaccaggctggagaaacagcaagcagccagcaaggaggagctggaagtggtaaagggtaagatgatggcatgcaaacactgcagtgacattttcagcaaggagggtgctttgaaactagcagccacaggcagagaggaccagggaattgaaacagatgatgagaaggactcacttaagaagcagctgagagagatggaactggaactggcacaaaccaaactgcagttggtggaggccaagtgtaaaattcaggaacttgaacatcagagaggagcccttatgaatgaaatccaagctgcgaaaaactcttggtttagcaaaaccctgaactctatcaaaacggccacgggcacccagccattgcagccagcaccggtcacccagccacccaaggagagcacatagttccagccttacccaagcacaagagcacaatgttcaaaccaatggaaatctgggaggattcttcctggtgtccctttgaaggaaagtcaaggaggccagaaaacaagccagaatttttcagtagctctcactctttcttgtatgacacttttcaaagggatgctatttaaactgacctgttctatgttgaatacctattttccagcttctggaaggccatgttcagatccatcatagtattacacattattttgtttgcctgatgtttagttggaaataagtaattcagaactaaatgcttttttatttagaattattcataattatttttatcttacataaaaatggagacatctgttattccaaggttgaagtgataagaagatctttgtcacaggaaaaaaaaaaaaaaattgaaccctaaacttcttaattttccaggatttatccaaataaagcacactgtggggccaggcatgaccactctcaggtttcctcctgaagcctgattcccaggggaagtgttaatcctgtccaaagggaaaagaaccaaatcagcgatcattgggttttactttccattttctgttccgggtacatcctgggaaaat

SEQ ID NO: 121701 - DNA, 2103 bp, Homo sapiens
tatgtagaagaatctggtaaatatggatattaacagcaataagctcctttttaacgatttaattctaccaagtaaatatttgggattactcgctttttgccttttatttaccaaaaaattcatatattttcaaaggaacagctaccggacctgcatagccatttttctgatctgaacctggaagctcatatgtatgcatcccagtggtttctcactctttttactgccaagttcccactctgcatggtgttccacatcattgacttactgctttgtgagggtttgaacataatctttcatgtagctttggctctcctaaagacctcaaaggaagaccttctgcaggctgattttgaaggtgctttaaagttctttagagttcagcttccaaagagatacagggcagaggaaaatgcaagaagactgatggagcaggcttgcaatattaaagtgggtgtgtacactggcactgagctgcagtaggatttttccttggatagtctggtctggagctgggacagcagctgctgctgtggaaaggccagctggcaagatgatggaagaaatctccattatggtagcctatgacgcccatgttttcagccagctgcacgatgaagacttcctcactagtctggtggccatcagcaagcccaggtctatggtaccaaccaagaagctgaagaaatatgagaaagaatatcagacaatgcgagagagtcagctgcaacaggaagacccaatggatagatacaagtttgtatatttgtaggtaactccagctgttgcatttatactgggaatcttcataagaagctgagagaaagagaggggaaaaagaaagtggctttctactttcaaaaatgaaacaaaaaggaaaaatggcaaagtactgttttagctgtgcatgtcatatccacaaagacttttagcaggtgaactgttccaagactgacacaaggatgtttcaaacttgcctctgtctgtagaaaatgttaaaaataccaactcacttggaaggaaaaataaaaatcacaaagagggagaaccgaagattacaggaggccagcatgaggttggaacaagagaatgatgaccttgcccatgaactagtaacaagcaaaattgctctacggaatgacttggatcaggcagaagacaaggcagatgtgttgaataaagagctccttttgaccaaacagaggctggtggagactgaagaggagaagaggaagcaagaggaagagactgcccagctaaaagaagtcttcaggaaacagctagagaaggcagaatatgaaataaagaagactacagctatcattgctgagtataaacagatctgttcgcagttgagtaccaggctggagaaacagcaagcagccagcaaggaggagctggaagtggtaaagggtaagatgatggcatgcaaacactgcagtgacattttcagcaaggagggtgctttgaaactagcagccacaggcagagaggaccagggaattgaaacagatgatgagaaggactcacttaagaagcagctgagagagatggaactggaactggcacaaaccaaactgcagttggtggaggccaagtgtaaaattcaggaacttgaacatcagagaggagcccttatgaatgaaatccaagctgcgaaaaactcttggtttagcaaaaccctgaactctatcaaaacggccacgggcacccagccattgcagccagcaccagtcacccagccacccaaggagagcacatagttccagccttacccaagcacaagagcacaatgttcaaaccaatggaaatctgggaggattcttcctggtgtccctttgaaggaaagtcaaggaggccagaaaacaagccagaatttttcagtagctctcactctttcttgtatgacacttttcaaagggatgctatttaaactgacctgttctatgttgaatacctattttccagcttctggaaggccatgttcagatccatcatagtattacacattattttgtttgcctgatgtttagttggaaataagtaattcagaactaaatgcttttttatttagaattattcataattatttttatcttacat

SEQ ID NO: 121702 - DNA, 618 bp, Homo sapiens
atgaagaccatcaacattcagaagaaagccaaaacccaatccaaggaagctaaggaatacaataaaaagatacgggacataatagatgaaatggccattttaagaaagaaccaaactgatctaatagagctcaaaaacccacttcaggaatttcataatacaatcacaagcgttagcagcagaatagaccaaactgaggaaagaatctctgagcttgaagactgtttgatctcagactgctgtgctagcaatcagcgagattccgtgggcgtaggaccctctgagccaggtgtgggatatagtctcgtggtgcgccgtttcttaagccggtctgaaaagcgcaatattcaggtgggagtgacccgattttccagggattttgccgatttcggaaccaccatcaaacaggattttcgcctgctggggcaaaccagcgtggaccgcttgctgcaactctctcagggccaggcggtgaagggcaatcagctgttgcccgtctcactggtgaaaagaaaaaccaccctggcgcccaatacgcaaaccgcctctccccgcgcgttggccgattcattaatgcagctggcacgacaggtttcccgactggaaagcgggcagtga

SEQ ID NO: 121703 - DNA, 3404 bp, Homo sapiens
atggcgggcgcccctcccccagcctcgctgccgccttgcagtttgatctcagactgctgtgctattaatcagcgagactccgtgggcgtaagaccctccaagccaggtgcgggatataatctcgtggtgcgccgttttttaagcctgttggaaaagcgcagtattccggtgggagtgacccgattttccaggtgccgtccgtcacccctttctttgactcggaaagggaactccctgaccccttgtgcttcccgaataatcaatatgcatttccaagccttttggctatgtttgggtcttctgttcatctcaattaatgcagaatttatggatgatgatgttgagacggaagactttgaagaaaattcagaagaaattgatgttaatgaaagtgaactttcctcagagattaaatataagacacctcaacctataggagaagtatattttgcagaaacttttgatagtggaaggttggctggatgggtcttatcaaaagcaaagaaagatgacatggatgaggaaatttcaatatacgatggaagatgggaaattgaagagttgaaagaaaaccaggtacctggtgacagaggactggtattaaaatctagagcaaagcatcatgcaatatctgctgtattagcaaaaccattcatttttgctgataaacccttgatagttcaatatgaagtaaattttcaagatggtattgattgtggaggtgcatacattaaactcctagcagacactgatgatttgattctggaaaacttttatgataaaacatcctatatcattatgtttggaccagataaatgtggagaagattataaacttcattttatcttcagacataaacatcccaaaactggagttttcgaagagaaacatgccaaacctccagatgtagaccttaaaaagttctttacagacaggaagactcatctttatacccttgtgatgaatccagatgacacatttgaggtgttagttgatcaaacagttgtaaacaaaggaagcctcctagaggatgtggttcctcctatcaaacctcccaaagaaattgaagatcccaatgataaaaaacctgaggaatgggatgaaagagcaaaaattcctgatccttctgccgtcaaaccagaagactgtgctcttggtttagagctttggtctatgacctctgatatctactttgataattttattatctgttcggaaaaggaagtagcagatcactgggctgcagatggttggagatggaaaataatgatagcaaatgctaataagaaaaaacataaagatacagagtataaaaaaaccgacatatgtataccacaaacaaaaggagtactagagcaagaagaaaaggaagagaaagcagccctggaaaaaccaatggacctggaagaggaaaaaaagcaaaatgatggtgaaatgcttgaaaaagaagaggaaagtgaacctgaggaaaagagtgaagaagaaattgaaatcatagaagggcaagaagaaagtaatcaatcaaataagtctgggtcagaggatgaggctctcgcagagcagccacgggaaggtccaggcgtgccaggtcccattccacccaaacgcccctcccgcagtccaattccagagccgagagctgcaaagcggctcccgacccaggagctgcggggagaaagctacacgatgtctgcgtcagggaccgcgagaggtccctctcccaaagaacgcctgggcctgacaacgaaaacaggagaaaaagaggtcgcgcaagggttctgccgggagccaggcctccgccgcccaccaaatgcccaggcccgagaccgctcctcccgggcccccgcaacccacagaaaggaactgaagcctgagcgtgaacacatttcttgctcaaggtcacatatacggtatcaagagtggagtgttcttcgtgacaccgttcatcgtaatctagtacttgacacaaagcggcatcctgctttaatactcgttgagtacaaggaacgcacctcctcaccagcaacagaacaaagctgcatggagaatgactttgatgagttgagagaagaaggcttcagacgatcggtaataacaaacttctccgagctaaaggaggatgttcaaacccatcacaaagaagctaaaaaccttgaaaaaagattagacaaatggctaactagaataaacagtgtagagaagtccttaaatgactggatggagctgaaaaccaaggctcgagaactacgtgaagaatgcagaagcctcaggagccgatgcgatcaacgtggaagaaagggaatcagcagtggaagatgaaatgaatgaaatgaagcgagaagggaagtttagagaaaaaagaataaaaagaaatgagcaaagcctccaagaaatatgggactatgtgaaaagaccaaatctacgtctgattggtgtacctgaaagtgatggggagaatggaaccaagttggaaaacactctgcaggatattatccaggagaacttctccaatctagcaaggcaggccaacgttcagattcaggaaatacacagaacgccacaaagatactcctcgagaagagcaactccaagacacataattgtcagattcaccaaagttgaaatgataggaaaaaatgttaagggcagccagagagaaagaggtctttgttccagagggaggaaccctgccacgaggaaacacaacaatgattccattaaactggaagttaagattgccacctggactctttgggctcctcctagctttaaggcaacaggctaagaatggagttacagtattggctggggtggttgacccggactatcaagatgaaatcagtctactactacacaacagagaaatcctcaatgttagtacattacagcaaagctatagttctggggaaaagcaggtatcttttttgatctcagactgctgtgctagcaatcagcgagattccgtgggcgtaggaccctccgagccaggtgtgggatatagtctcatggtgcaccgttttttaagtctgtctgaaaagcgcagtattcgggtgggagtgacccgattttccaggtgcgtccgtcacccctttcttcgactcagaaagggaactcctgaccccttgcgcttcccaaaaattcagaagctgctcaaactccagtgcagtcatggagcctccattacctgggaggcagcctccaagcagcatgcagccttgtcagaaactgcaccgccaagggtgagaatggcattagaagcaaagaggaaagattcaaacaggaacgagaatttggacaagcgaacactctgtgctgctcaagggaagagcacagtggaagtccaagggcgagtgtgtgcccagggcagggcaactgggctatgggctgattcccgggatgcatga

SEQ ID NO: 121704 - DNA, 5548 bp, Homo sapiens
atggcgggcgcccctcccccagcctcgctgccgccttgcagtttgatctcagactgctgtgctagtaatcagcgagactctgtgggcgtaggaccctccgagccaggtgcgggatataatctcgtggtgtgccgttttttaagccggtccgaaaagcgcaatatttgggtgggagtgacccgattttccagggcctttgaagatgtcaaggtcttttggcgagtcacacttaacaaaacagtcgtcgtgctccagaaggatggggtaaacctgatggaggaacttcagtctgtgtcagggaccacaacctgtacaatgggtcaaacaaaatgctttatcagcattgaactcaaaccagaaaaggtaccacaggttgaagtgtatttttttgtggaactatatgaagctactgctggagcagcaataaacaacagtgccagattcgcacagattaaaatcttagaaagtgatgaatctcaaagccttgtgtatttttctgtgggttctcggctggcagtggctcacaagaaggccactttaatcagtctgcaggtggccagagattctgggacaggactaatgatgtctgttaactttagtacccaggtcttcctatcactgggctctaatttcactttgcaactggtgactgtgatgcttgtcggtggacgtttctatggaatgccaacaattcttcaggaagcaaaatctgctgtccttccagtctctgagaaagctgccaattctcaggtcggatttgaatccactgcttttcaactcatgaacatcactgctggcacaagccacgttatgatttctaggagaggcacatatggagctctctcggttgcctggaccactggatatgctcctgggttagaaattcctgaattcattgttgttggcaacatgaccccaacactggggagcctttcattttcccacggtgaacaaaggaaaggagttttcctgtggacgtttcctagccctggttggccagaggcctttgttcttcacctatcaggagtgccagagcagtgctcctggcggagctcaactccgtggatttttcaccattgctgatggagagagtgaagctagctttgatgttcatttgctaccagatgaggtacctgagatagaggaagattatgtgatccagcttgtttctgtagagggaggagccgaactggatctggagaagagtatcacatggttctctgtttatgcaaatgatgacccacatggagtatttgccctgtattcggatcgccagtcaatacttattgggcagaaccttattagatccatccaaattaacataacccggcttgctggaacatttggagatgtggctgttgggcttcgaatatcatcggatcataaagaacagccgattgttaccgaaaatgcagagaggcagctggtggtcaaagatggtgccacatataaagtggacgtggtgccaataaagaatcaggctgacagacaactcatacaggagagctctggctggcatctggcaggtgccccgctgggtcgaagcttccagaggaaagaacaggcagcaatctttgctgttctgcagcctctgctggtgatatccaggcaaacagggtctggagtggacctccagcaaactccagcagacctgcagcagagggacctgactgttagaaggaaaactaacagaaaggagcagcacatccacaccgaaaacgcatctgtacatcaccatcatcaaagaccaaaagtagataaaaccacaaagatggggaaaaaacagaacagaaaaactggaaactctaaaacgcagagcacctctcctcctccaaaggaacgcagttcctcaccagcaacggaccaaagctggatggagaatgattttgacgagctgagagaagaaggcttcagacgctcaaattactctgagctacgggaggacattcaaaccaaaggcaaagaagttgaaaactttgaaaaaaatttagaagaatgtataactagaataaccaatacagagaagtgcttaaaggagctgatggagctgaaaaccaaggctcgagaactacgtgaagaatgcagaagcctcaggagccaatgcgatcaactggaagaaagggtatcagcaatggaagatgaaatgaatgaaatgaagcaagaagggaagtttagagaaaaaagaataaaaagaaacgagcaaagcctccaagaaatatgggactatgtgaaaagaccaaatctacgtctgattggtgtacctgaaagtgatgcggagaatggaaccaagttggaaaacactctgcaggatattatccaggagactttccccaatctagcaaggcaggccaacgttcagattcaggaaatacagagaacgccacaaagatactcctcgagaagagcaactccaagacacataattgtcagattcaccaaagttgaaatgaaggaaaaaatgttaagggcagccagagagaaaggtcgagttaccctcaaagggaagcccatcagactaacagcggatctctcggcagaaaccctacaagccagaagagagtgggggccaatattgaacattcttaaagaaaagaattttcaacccagaatttcatatccagccaaactaagcttcataagtgaaggagaaataaaatactttacagacaagcaaatgctgaccgattttgtcaccagcaggcctgccctaaaagagctcctgaaggaagcgctaaacatggaaaggaacaaccggtaccagccactgcaaaatcatgccaaaatgtaaagaccatcgagactaggaagaaactgcatcaactaacgagcaaaatcaccagctaacatcataatgacaggatcaaattcacacataacaatattaactttaaatgtaaatggactaaattctccaattaaaagacacagactggcaagttggataaagagtcaagacccatcagtgtgctgtattcaggaaacccatctcatgtgcagagacacacataggctcaaaataaaaggatggaggaagatctaccaagcaaatggaaaacaaaaaaaggcaggggttgcaatcctagtctctgataaaacagactttaaaccaacaaagatcaaaagagacaaagaaggccattacatgatggtaaagggatcaattcaacaagaggagctaactatcctaaatatgtatgcacccaatacaggagcacccagattcataaagcaagtcctgagtgacctacaaagagacttagactcccacacattaataatgggagactttaacaccccactgtcaacattagacagatcaacgagacagaaagtcaacaaggatacccaggaattgaactcagctctgcaccaagcagacctaatagacatctacagaactctccaccccaaatcaacagaatatacatttttttcagcaccacaccacagctattccaaaattgaccacatacttggaagtgaagctctcctcagcaaatgtaaaagaacagaaattataacaaactatctctcagaccacagtgcaatcaaactagaactcaggattaagaatctcactcaaagccgctcaactacatggaaactgaacaacctgctcctgaatgactactgggtacataacgaaatgaaggcagaaataaagatgttctttgaaaccaacgagaacaaagacacaacataccagaatctctaggacgcattcaaagcagtgtgtagagggaaatttatagcactaaatgcccacaagagaaagcaggaaagatccaaaattgacaccctaacatcacaattaaaagaactagaaaagcaagagcaaacacattcaaaagctagcagaaggcaagaaataactaaaatcagagcagaactgaaggaaatagagacacaaaaaacccttcaaaaaatcaatgaatccaggagctggttttttgaaaggatcaacaaaattgatagaccgctagcaagactaataaagaaaaaaagagagaagaatcaaatagacacaataaaaaatgataaaggggatatcaccaccgatcccacagaaatacaaactaccatcagagaatactacaaacacctctacgcaaataaactagaaaatctagaagaaatggatacattccttgacacatacactctcccaagactaaaccaggaagaagttgaatctctgaatagaccaataacaggagctgaaattgtggcaataatcaatagtttatcaaccaaaaagagtccaggaccagatggattcacagccgaattctaccagaggtacaaggaggaactggtaccattctttctgaaactattccaatcaatagaaaaagagggaatcctccctaactcattttatgaggccagcatcattctgataccaaagccgggcagagacacaaccaaaaaagagaattttagaccaatatccttgatgaacattgatgcaaaaatcctcaataaaatactggcaaaccaaatccagcagcacatcaaaaagcttatccaccatgatcaagtgggcttcatccctgggatgcaaggctggttcaatatacgcaaatcaataaatgtaatccagcatataaacagagccaaagacaaaaaccacatgattgtctcaatagatgcagaaaaagcctttgacaaaattcaacaacccttcatgctaaaaactatcaataaaataggtattgatgggatgtatttcaaaataataagagctatctatgacaaaaccacagccaatatcatactgaatgggcaaaaactggaagcattccctttgaaaaccggcacaagacagggatgccctctctcaccgctcctattcaacatagtgttggaagttctggccagggcaattaggcaggagaaggaaataaagggtattcaattaggaaaagaggaagtcaaattgtccctgtttgcagacgacatgattgtgtatgtagaaaaccccattgtctcagcccaaaatctccttaagctgataagcaacttcagcaaagtctcaggatacaaaatcaatgtacaaaaatcacaagcattcttatacaccaacaacagacaaacagagagccaaatcatgagtgaactcccattcacaattgcttcaaagagaataaaatacctaggaatccaacttacaagggatatgaaggacctcttcaaggagaactacaaaccactgctcaaggaaataaaagaggatacaaacaaatggaagaacattccatgctcatgggtaggaagaatcaatatcgtgaaaatggccatacagcccaaggtaatttacagattcaatgccatccccatcaagctaccaatgactttcttcacagaattggaaaaaactactttaaagttcatatggaaccaaaaaagagcctgcatcgccaagtcaaacttaagccagaagaacaaagctggagacatcacactaccgaattccaccacagtgctgggggtgcacatctgccaattgaccggttcgggaattctcctgtggcttatcttccgctga

SEQ ID NO: 121705 - DNA, 2424 bp, Homo sapiens
atggcgggcgcccctcccccagccttgctgccgccttgcagtttgatctcagactgctgtgctagcaatcagcgagattccgttggcgtaggaccctccaagccaggtgtgggatatagtctcgtggtgcgcccttttttaagccggtctgaaaagcgcaatattcgggtgggagtgacccgattttccagaattatagaccaatccagcaatgtggagatagcatcttttccaatctataaggtgttattctgtgcacgtggacatgacggaacaacagagagcaattgctttgcatttacagagagttcccatggttcggaagaatttcagatacatgttttctcctgtgaaattaaagaggcagtaagcagaattttgtacagtttctgtacagcattcaaacgttcttccagacaagtgtctgatgttaaagactcagttattcctacccccgacagtgatgtgtttaccttcagtgtctccttggaggtaaaagaagacgatggaaaaggaaactttagccctgtgcctaaggatagagataaattttatttcaaattaaagcaaggaatagagaagaaggttgtgattacagtgcagcaactttctaacaaagaattagctattgaaagatgttttggaatgttattaagcccaggtcgaaacgtgaagaacagtgacatgcatttactggatatggaatccatgggaaagagctatgatgggagagcttatgtcatcactggcatgtggaaccccaatgcaccagtatttctggcacttaacgaggaaaccccaaaagataagcaagtatacatgactgtggcagtggatatggtagtcacagaggtggtggagcctgttcgctttctcctggagacagtagtccgtgtgtaccctgcaaatgagcgattttggtatttcagcagaaagactttcacagagactttcttcatgagattgaaacagtctgagggaaaaggccataccaatgctggagatgcaatatatgaggtggtgagtctacagcgagagtctgacaaggaggaaccagtcactcctactagtggagggggtccaatgtcaccccaggatgatgaagcagaagaggagagtgataatgaactctcaagtggaacaggtgatgtgtctaaagattggtcctgagaagatcctgtattcttggggagagttgctaggaaaatggcacagtaaccttggtgcacgaccgaaagggctgtctactctggtgaagagtggcgtccctgacagcattgagggcagaggtatggcagttattggcaggctgccatgacaaccaggcaatgctggatagataccgaattcttatcacaaaggactcagcccaggagagagctattactcgagatattcatcgtacatttcccgcacatgattactttaaagatactggaggagatgggcaagaatcgctctataagatctgcaaggcctactctgtgtatgatgaagacattgggtactgtcaagggcagtcttttcttgctgctggattactgctgcatatgccagaggaacaagcattctgtgttttggtgaaaatcatgtacgactatggtttgagagacctctacagaaacaacttcgaagatcttcattgcaaattctaccagttggagagactaatgcaggaacagctaccggacctgcatagccatttttctgatctgaacctggaagctcatatgtatgcatcccagtggttttctcactctttttactgccaagttcccactctgcatggtgttccacatcattgacttactgctttgtgagggtttgaacataatctttcatgtagctttggctctcctaaagacctcaaaggaagacgcttctgcagggctgattttgaaggtgctttaaagttctttagagttcagcttccaaagagaatacgggccaaaggaaaatgcaaagaggcctgatgaagcaggccttgcaatattaaagtaccaaccaagaagcttgaagaaatatgagaaagaatatccagacaatgccgagagagtcagctgcaacaggaagaccccaatggatagatacaagtttgtatatttgtaggtaactccagctgttgcatttatactgggaatcttcataagaagctgagagaacagagaggggaaaaagaaagtggctttctactttcaaaaatgaaacaaaaaggaaaaattggcaaagtactgttttagctgtgcatgtcatatccacaaagacttttagcaggtgaactgttccaagactgacacaaggatgtttcaaacttgcctctgtctgtagaaaatgttaaaaataccaactcacttggaaggaaaaataaaaatcacaaaggtatattgagcgcaaaaaaaaaaaaaaaaaaaaaagtcgtatcga

SEQ ID NO: 121706 - DNA, 752 bp, Homo sapiens
tttgcaactccagttaattcgagtcccacttttgaaatgcatcatgattagaaagtgtctgtagtttgaaaattagtccaaatttctcctgttctgagtgtatttagaagtagataccaaaatggaagcttgacacccctgttagctcagcaagcagagacgatcactctatatatattgttgtatggccttccagggtttttctatgcacatagatatagtgcctggcacacagtagacactcaataaatatctccggaaataaagggaaaggtggcaaaaggcgatgtggaggtgtccgcccttccggggtttataccctcggcagttagatgtcctatgtgtcaaggtatggctgcggaggccggaaaaatgtggccaccgtcagtaagggttgggcagggagcttggcgtggcctggcggatttccgaggaaggtgaagggcggaggctcctggcgaccttctggcggagtggcgtggccgccccagtccgcgctcgcctggctctcctcctttccgggccgattgcatcagaatctcccctcaccaccaacccccactcacactctgctcgccggcctcgcacttacatcgacatgcaccggcgctgagggtcacgaatcggagtcattctcctactgggggacgcgtggcccttccgcaaccatggcttgtgatggtttaacgcggacaggccattcctccccgtcccgcgcgcggtctcctcccctcctgtgcgcccgctcttta

SEQ ID NO: 121707 - DNA, 564 bp, Homo sapiens
cggccgctacccagccggccgcacgcagcaccccccggacatcacacgatctcctctgggccttgcggacacaggaaattttcaccaaaggccggggattcaaacactcccagaacacggtcgcgccctcgggtcagctgcgctctccctccagacgtgcgtggttcctggctctcgtaaaaatggaaccagatctggtaccacactctgccacagccacaggaaaacacaccaaagtcacaggaaaacaaaccaaaaagtaagccacagcccacgcaaaggtgaactcgggggccctggcgcttcctcccgctgccgcgtgcgttcgggaagcacaggagacctggacttttcctctcctaaaagcaacatccgaaagcatcgggcacagccgagctctctctgctttcacgcccgcagagatgatttctacgttacctcctcctccgacatctaaatctccccttgccgctcgcgcagcccctcccgggaacggataatcaccttacctccggaaataaagggaaaggtggcaaaaggcgatgtggaggtgtccgcccttcc

SEQ ID NO: 121708 - DNA, 1626 bp, Homo sapiens
atgcaggacacttgttctgagataatctcaccagctgactttcctactttttcatcatcgttaaaaatcagattttccactgatagtccttcacagatttttaaaaaacactgtattcagaaaatagttttgatcttattacccaaaaattcttatacaagaagactgctggtatcaaaccagatgtatttggaaagctttgaacaccagtgcaggaaaacacatattctctgtaagcgcacagctggtagtggccccttctgcagctgtcctactgggcaacccagacacaactcctctgcaagcaagtgcccagccagtgaaagggggctgtgtctgaaacaaagagtaagcgggaaaaaagggaaccaggcccagttgcccctgctcccctccatgccgctccctcgtcccccggacttggagcgccccagctccgttaacctggacgcaccaggtccttcggtcgggaccacgtggggtctccaggccctccaagagctggcccccggctctttgcgcctaggccggtgctttctcggtgctcagcaaatccttctggttcacctcacacccagtccccaaagcagagctccacagggcagatctcaggaagggctgaccaggtctgcgggtgctggatccggaagaggggagtcccaggcgctgcccgcggctctccgggctgcgctcggacctgccactcccgcggccatcctcatgctgcgcccttcccacaatgcaactccctcgctccttcggccccggcggggctctggcgtacccaaaatgcaggccccagcggaacgcacagccctcctgtcctccgccggtgcccctttagccgccccacccccatccctaagggctctcattctccagctgcagccgcagctgggttccgaacacgccgccgggccccgggagggagaggggcaggtgccagggcggcgcgcagcctctgctcccggtgccagcttcagtgcgccgggcacacgcgcgccccgcaacccctccctcaccctttccccgttgctcaatctccgccagccgcggtcgctgcatcgtcagagagctgcaagagggaggcagcaagaaggtcgccaggagcctccgcccttcaccttcctccgaaatccgccaggccacgccaagctccctgcccaacccttactgacgggggccacattttcccggcctccgcagccagaccttgacacaaaggacatcaaactgccgagggtaaaaaccccggaagggcggacacctccacatcgccttttgccacctttccctttatttccggaggagaggaaaagtccaggtctcctgtgcttcccgaacgcacgcggcagcgggaggaagcgccagggcccccgagttcacctttgcgtgggctgtggcttactttttggtttgttttcctgtgactttggtgtgttttcctgtggctgtggcagagtgtggtaccagatctggttccatttttacgagagccaggaaccacgcacgtctggagggagagcgcagctgacccgagggcgcgaccgtgttctgggagtgtttgaatccccggcctttggtgaaaatttcctgtgtccgcaaggcccagaggagatcgtgtga

SEQ ID NO: 121709 - DNA, 612 bp, Homo sapiens
atggaagattcgatggacatggacatgagccccctgaggccccagaactatcttttcggttgtgaactaaaggccgacaaagatgatcactttaaggtggataatgatgaaaatgagcgccagttatccttaagaacggccagtttagggctgcggtctgcccctggaggtggtagcaaggttccacagaaaaaagtaaaacttgctgctgatgaagatgatgacgatgatgatgaagaggatgatgatgaagatgatgatgatgatgattttgatgatgaggaagctgaagaaaaagcgccagtgaagaaatctatacgagatactccagccaaaaatgcacaaaagtcaaatcagaatggaaaagactcaaaaccatcaacaccaagatcaaaaggacaagaatccttcaaaaaacaggaaaaaactcctaaaacaccaaaaggacctagttctgtagaagacattaaagcaaaaatgcaagcaagtatagaaaaaggtggttctcttcccaaagtggaagccaaattcatcaattatgtgaagaattgcttccggatgactaaccaagaggctattcaagatctctggcagtggaggaagtctctttaa

SEQ ID NO: 121710 - DNA, 968 bp, Homo sapiens
gtgcaaaggatggttgcacattgtggagcaggggcatgacattcgaggccgttcaattaagataacactgccaccttgaaaatgtctttcagccaacgttttccctgggggctttgaaatacaaccaacagtggtctaaggattgaagtgtgtttcagggccgtgccatattagtggacagcacttagtagctgtgaggaagatgcggagtcagaagatgaagaggaggagaatgtgaaactcttaagtatatctgaaaggcggtctgcccctggggtggttagcatggttccacagaaaaaagttaaaacttgctgctgatgaagatgatgacgatgatgatgaagaggatgatgatgaagatgatgatgatgatgattttgatgatgaggaagctgaagaaaaagcgccagtgaagaaatctatacgagatactccagccaaaaatgcacaaaagtcaaatcagaatgggaaagaactcaaacccttattcacacccaagatcacagggaccaggatcccttcaggaaacaggaaaaaacctcctaaaacaccaaaaggaccttagttctgtagaagacattaaagcaaaaatgcaagcaagtataggaaaaaagcgcattgaaccagtcctgggcacttacatgtaaaattaagcccaaagatggggagaaaggaaaaggagagacaaatatagtccatactgagtgtcatcaacaatcccagactgaaggcttctattttaattctcatccccctttcttgattggccacccatgcctcttcaggctggaaacaatctcttggttccctaaagcactttcttctgactgctgtgattcagtgaaccttgccctttgctttctattacttggtgcatttgcctcacctgacaatgttttaaatcgcctttgtatctccttagctgctcaattaaatatttgaatgcatcaaaaaaaaaaaaaaaa

SEQ ID NO: 121711 - DNA, 1342 bp, Homo sapiens
ccctggtgtgattccgtcctgcgcggttgttctctggagcagcgttcttttatctccgtccgccttctctcctacctaagtgcgtgccgccacccgatggaagattcgatggacatggacatgagccccctgaggccccagaactatcttttcggttgtgaactaaaggccgacaaagattatcactttaaggtggataatgatgaaaatgagcaccagttatctttaagaacggtcagtttaggggctggtgcaaaggatgagttgcacattgttgaagcagaggcaatgaattacgaaggcagtccaattaaagtaacactcggcaactttgaaaatgtctgtacagccaaccggtttcccttgggggcatttgaaataacaccaccagtggtcgttaaggttgaagtgtggttcagggccagtgcatattagtggacagcacttagtagctgtcggaggaagatgcagagtcagaagatgaagaggaggaggatgtgaaacctcttaagtatatctggaaagcggtctgccccctggaggtgggtagcaaggttccacagaaaaaaagtaaaacttgcatgctgatgaaagatgatgacgatcgatgatgaagaggattgatgatgaagatgattgatgatgatgatttttgatgatgaggagagctgaagaaaaagcgcccagtgaaagaaatctataccgagatactcccagccaaaaaatgcacaaaagtcaaatcagaatgggaaaagacttcaaaaccatcatcaacaccaagattcaaaagggacaagaatcccttcaaagaaacaggaaaaaactcctaaaacccccaaaaggacctagttctgtagaagacattaaagcaaaaatgcaagcaagtatagagaaaaggtggttctcttcccaaagtggaaaccaagttcatcaattatgtgaagaatttgctcccggatgactggaccaagaggctatttcaagatctctgggcagtgggaggaagtctctttaagaaaatagtttaaacaatttggtaagagaatttaccgtcttatttcatttctgtaacagttgatatctggctgtcctttttataattgcagagtgagaactttccctaccgtgtttgataaatgttgtccaggttctatttgccaaggaattgtgttgtcccaaaatgcctgtttaagtttttaaagatggaacttcacccctttgcttggttttaagtatgtatgggatgctatgataggacatagtagtagcagtggtcagacatggaaatggtgtgggagacacagatatacatgtgaaataaaactccggattttaataaagt

SEQ ID NO: 121712 - DNA, 618 bp, Homo sapiens
atgaatgagggcgagtttgtaaagctctttggcacagtgactggcacacagcgagggtcctatgcattaactctacgaccacgatcactgcctcctgcaatccacccacactgcacgcagatctctaacaacccccacttgaatgtgcaggttggagaattggacgaagaatttgttattcaatggccctgttccagtattggttatgagtcttctgttcatcgcttctgtatttatgttgcacatttggggcaagtacactcgttcgtagattcagttacatccatctgtcatctgaagaaagaggaaaaaacccaacatttcttggaccaaaagtatagtgactatctgttcatgagagaaattttctgtgccagtgtccccacagaaagaattgaaaaggatgttttgaaatcatgcaaatgttggcatcaagttaaaatagatgaaaatgcctacaaagctggattcattcaacagaaaatactgtcaagcatgtggagctcctatgtgcagggagccatgctcttgattcccataaagctgccccttggtagctccagagggggtgtccctctcttcaaatgccggaggagggccaggaccaagtttgtttga

SEQ ID NO: 121713 - DNA, 603 bp, Homo sapiens
gtctcgccagctgccggtctttcgggggctccgtaactttctatccgtccgcgtcagcgccttgcgcaccctcatctccaatatgcctggtccgacccccagtggcactaacgtgggatcctcagggcgctctcccagcaaagcagtggccgcccgggcggcgggatccactgtccggcagaggaaaaatgccagctgtgggaccaaggagtgcaggccgcaccaaccgtcggcaggcacccgggcgggatgtggcgattctacacacgaagtatatcacctgggcgtcaaaagttggcccctgtgtccagtatctggttatgaagtcttctgttcatcgcttcctgtatttatgttgctacatttggggcaaagtacactccgttcgtagaattcagttacatccatcttgtcatcttgaagaaggaggaaaaaaccccaacatttcttggaccaaaagtatagtgactatctgtttcatgagagaaatttttctgtaagctttgctgtttttacaggggatttatcaataattgactttgaggaatcagtttttttctatggctaataaactttttaattcacttaaaaaaaagtcgacgc

SEQ ID NO: 121714 - DNA, 291 bp, Homo sapiens
ttaagcaacgccttctcccccttcccctccaggcgcccgacgtagaggccggagcttcttggaccgcggcgtgagcggttgcttgggccagaaggttctctggtggaggcgctcttcctggtgtcccgcccagtaggttcgttcgcaccgcttcttccacactctttctccctccttctcctcgccccgccttccctccctcctcaatccctctagttccttccccgcctcgccactgtgcacgatctcgcgagacttggcccagaacattgcggatcgggtcggcgccat

SEQ ID NO: 121715 - DNA, 661 bp, Homo sapiens
ttggctttgcaattctctttcctccaaaatcgccaaggcctcaatttactcattgctgaaaaaggacgactctgtatatttttaaatgaagagtgttgtttttacctaaatcaatctggcctggtatatgacaacataaaaaaactcaaggatagagtccaaaaacttgccaaccaagcaaataattatgctgaacccccttgggcactctcttaattggatgtcctgggtcctcccaattcttagtcctttaatacctgtttttctccttctcttattcggaccgtgtgtcttctgtttagtttctcaattcatacaaaaccgtattcaggccatcgccaataattctatatgacaaatgctccttctaacaaccccacagtatcagcccttaccccaaaatctttcttcagttgaatctctcccactgtaggttcccaggccgcccctaatcccgctcgaagcagccctgagaaacatcgcccattatctctccatatcacccccacaaattttcgccaccccaacactttaccaatattttgttttatttttcttattggcataagaagacagaaatgtcgggcctctgagtccctgttaagccatcatttcccagtgacctgcccgtccacatccagatggcctgcacccagtgaag

SEQ ID NO: 121716 - DNA, 3447 bp, Homo sapiens
tttttttttttttttttttcagcattattaacaaatttattgaacaactagaacttgacaagcacatgccaggtagaggggatacagtggagagcaataataatgatgataatgaggagtagttttttccctagcaggcagcagttgaaaggaatattggtttaacatccaccaatgagcaggggtggatagacccctctcctgggggacagagtccataacgggattaaaaatatccctgtaagccgggtcacccggtgggctcaagcctgtaatcccaggcactttggggagaccccgggtggggtgggatcatgaggtcaagagatcgagaccatcctggccaacatagtgaaccctcatctgtactaaaagtacaaaaatttgttgggtgtggtggcgtgcacctatatttcccagtactccgggaggctgaggcaggagaattgtttgaacccaggaggtggaggttgcagggagctgagatcgcaccactgcactccagcctagcaacagagtaagactccatcttaaaaaaaaaaaaaaatccctgtatttcttctagctcccttcatccaaatttcctatatcacagaaaatctctagggtatttgctctgcctggaaaccttgattgaaggaaggctggctctggctgcatgatcacttatcacatttgttgggtgggaacacatctgttccccatgatttatcaagtgtggcctctagtctctttccaaatcacgtgtcatgtgggtacggtgaggttattctctcaaccaagacactctgcaaagctaatccaaggcgtgctgggtctaaggctctgacaatcagctgggaaggagtcaacaggggtgtcaactccacaaccacctacagtgatccttatcctggagccatcctgggaaaagaacctcagggctacaggtgggttcttcctatgggggaagaaacagggtggaaaagaacggccatagggccggggactgaagctgaacatctcccaactgcagaaattactgcatgagttatgtaagttgcttaatgttgccctgcctcaacttccatacttgctaaatgagactacccgacagggtgttgcgaggattaaaggagtgacatccaccaaagctcataacacagcactcagagcattttaagttctccattaatgttagttattgctgtttagatcccagctgtgttgttaactagtcatgtctactttgtagtcaattcacttttctgcaccccagtttccttatctgtataaggggaaaataagatggtaccaaactcaaacaactgtcatatgaataattgaatgagtatcagtaaagtgcttcagtgcgtgcttgtagctttatggttgtgattggttgctgtggagggggaggccctcagctctgagctgggcagggagaagcagagaaaagttacttcagcctgaggctccccactttcgttagctaagcccggggttactggtgtctctagggaatgatcagcactcggtcagaattggaggaactctcttcttcttttcacgctggacaaatactcagggccgtgggctccaaggtcaaaattctgaaaacaggatatagagcctcagagaaggagacgtccaggaaagtatgaatatgcgatccatccacagcattgtagaatgagatatctccagtctcatagtccaggaagacccccactttcttagggggcttaggaagtttcaggttggttctgggctcagttagagtccgatacttattcccatcagtcagccccatagtccagaatccattctcaggtgtcattttgacccagccttttctctgcacattcttactgcacacccctatatgccactctttcctgtcccctacctccacctcccagtaatgtctccctgatatgaagctctcacagccgagaacacaataatgccaattaaatctctcagggttgtctggcagatcctggggctccttggcacgctgcacactcctctggtcctcagaaacaaggaggatggggtttgctgtttttggatccagaatcacatccgcaggcttgaagagggcctttttccattcattataggctgaatgtctctctccccgagatgcatactggatacttctccatctgagttcctccaggagcttcactcttgtgctttgttcttgcttcattgtgctccatgccatttctctcaactcttgctctctctttttctttctgaactgagtctttttttcctcctgctgttgccacaggaagtaaccggctcccccaagaagcagcagcaagacaggcagggtccgtgccagggcggcgatccacctctgggcgctcctgaagaaggggtctgcgatggaaatgctggctgtcttttccaggccgaggagggaacttctgatggtacaggatacaccctccccagagctgcctctcatgatcacagatgctgctactgcatacaggcccactccgtctgcaaccacaggtgcttccacagtcgggatgttctctcccttgttgttgctccactgtatttggggttgggggtaccagccagtggacctgcactccagatggatccctccatccttgtaacccttcacatcaacgtgaagatcagaacccagtgctgcaaccttcagctccaccagggctttttcatagaagtcaccatcttggaaataacacaagtactttccactgtcagaggctgtgacgttgtgtattcggagagcagccttccctgcagtgatgccatcccgcagaatcgaagttctccctcgatacggtgcactctgcctgtcttccacttcctttccatctgcatacacgttcaccacctgccttaggctggaactcacccacttcagctccatggtctctgcactcatggtcgggaacaggtgacagggcagatcagcgtcttcacccaccatggccaggatgggcccagagggtccaagcacagaaaactgagctgagtgaggcatgagcagctgaagcaaaaggaggcagacacgaaagttgagcagaaggaaggccaggaaacttgccattttcattcatgctgcatatcaggagatactggaaggtggggggcagacactatgacctggaagaagctatagaattccaaatggaaacctccacttccctagagctaactcaagtatggtgaccgaagaagatctttcctctgccaaaaattctgtccttcagtgtcttcacctttgagtcccaacattgaaaatcacctcttagcattcccctctgaaaatcacagcccacagaaggaaggcagttaatagttctccattctttctactatggttaaatctccttctggaagaaaggaaaaacccacgcgtccgcccacgcgtccgcggacgcgtgggtcgacctgcaggcatgcaagcttcag

SEQ ID NO: 121717 - DNA, 1555 bp, Homo sapiens
  misc_feature (1)...(1555): n = a,t,c or g
tggaagtcccaggngannnnncattgataacgtttgacctgcctacgccaagcttggcacgagggaagctgagatggacctgggaactccaacatatgatgaaaaccccatgaaggcctcgaaaaagcccaagacagcagaagcagacacctccagtgaactagcaaagaaaagcaaagaagtattcagaaaagagatgtcccagttcatcgtccagtgcctgaacccttaccggaaacctgactgcaaagtgggaagaattaccacaactgaagactttaaacatctggctcgcaaggtactccccttgcttttggtagcccaccaggcaatgttctgggcaaactgtgtaccttctaagaagcccttttcatcatagaaagtattttttttttttcttgtcagatgtcagagctggggacccaggaacggggagggaaggtttggggagggatgcgtaccttacatgacagcagtagttctctaagaaattttcagagctcagcttgtcctttctggtgatcatagcaccagcctgccccaacatctacccccttattaacttcctgtcttggtgagaagggccctgaagcagcaggctggattaccacccctgtcctccccctcatataatttctgctctgattggtggctgtggtctctcttcctgtgccctggacagctgactcacggtgttatgaataaggagctgaagtactgtaagaatcctgagggacctggagtgcaatgagaatgtgaaacacaaaaccaaggagtacattaagaagtacatgcagaagtttggggctgtttacaaacccaaagaggacactgaatttagagtgactgttgggccagggtgggaggatgggtggtcaggtaagacagactctagggagaggaaatcctgtgggcctttctgtcccacccctgtcagcactgtgctactgatgatacatcaccctggggaattcaaccctgcagatgtcaactgaaggccacaaaaatgaactccatctacaaagtggattaccctagttgtgagctgttggcatgtgggttagaagccattcagagggtgcaagggcttagaaaaagacccctggccagacctgactcccactctttaaaccctggggtcttcctcccttggccggtgcctgtcagcgcacagaccccatgcgcaacccccaccccacaacccccttacccctgatgatctgtattatattttaatggtatatgtgaatatattgaaaaataatttgtttttttcctggtttttgttttgtttttcgttttgcttttagcctcctacatgctaggatcacaggaagacttttgtaaggacagtttaagttctcctgcaaggtttaatttgttatcgatgtaaatattccaaagcaggctgccttgtggttttggccagccttgtgctatgttgataagattgatttactgcttaaaatcactttacgtttatccaattttttactgaactttttatgtaaaaaaaataaaatcaattaaagaacttggaaaaaaaaaaaaaaaa

SEQ ID NO: 121718 - DNA, 935 bp, Homo sapiens
  misc_feature (1)...(935): n = a,t,c or g
atgaactgtggaccagaggcccaaggaagagacaaaatggaagttctaagccactatggctactatatggggaaagtggagcccagaaaagtgtggtcgaggtcacaaagccaagactcctttggccacaatggatccagcatagagcccggcgtccatgcctgcagcaggctccatgctccagcaggccccatgctccagcctctgctgcctccctcctcctctcctactgcaagggacacaaagcacagggcccaagtgaaaaccacagactctggagccagaaggagggatgggcgtgttttgggcgtgctagaggtgtcacgctccattgcggacggtcagtacaagcgctgcagntgtcacctctgtgcccgaccatcagacgctgcccagctgaccccccaatgaccaggttccattttgttggcctgtgatgggctcttccaaggtctttaccccagaagaagccgtgaacttcatcttggtcctgtctcgaggatgaaaagatccagacccgggaagggaagtccgcagccgacgtccgcttacgaagcagccctgcaacatgctggccaacaaggcggttgcagccggggctcggccggacaacgtcactgtgattggtggtgcgggatagggcactgaggggtggcgcgcggccaggagcacgcatgggtatttgacttaaaaaggttcattttgtgtgtgtgcacattgtgtgttttgtgtactccctgtgggacgtcccatggttgtaaataaaggtttctctttttaaaaaaaaaaaaaaaaaaaaaaaaaggggggcccgttttaaagaacccttggggggcccaaattttacccgggcttgcaacgtaaaactttttccccttatggggggccgttttaaaacctaggccttggcccgggttttaaaaaggtcgggagtg

SEQ ID NO: 121719 - DNA, 1302 bp, Homo sapiens
atggtgtacatgaggaaaggccaggagctttatgtcgctggagcacaaaacagtattcatggaatgctgtggaaagtggggcagacaaatcagtgccagcctcccaaagggtaccgagctcgaataaccgtagctacagctttgattggacaagagactgatttcagtacctttctcctggcttgtctacggccatacgacctgaatgtgcctgatctcatccgaaatattaaggttccacttcaagctgtatctgcattaggaggcatgccaagcccagtaacactgtggttcttacaaacttgtagaggtatcgccttggtagtcttggataagatccggaagaattctctggactaccaggcagaggagtctctccccatgtctaccaccaccacaggcccacagggagtactgtcagtgaacaactgctgttcagttaaggcccaagggccgtttactccgcttatgatgaatgctgccaagcctgggactcacccttcaggacaggtatgtccagagatgccatctaagagccaaggcctgctactggggacccataaatcccacgtggtgctctcccccactgtgaccgagctgcaaaaggagtctcttcttgtagccaccacagctttgaatatgcaggtcacacctgaaaccagcatgtctcaagtctcacccaaggcctatggtgtgtattacctggttaccgctactgattattcagggcccaagggctctttggctccctctactgccccctatcggcagagcctagcacgtcgccagcaagcaaagggaaacgggttttgcagggtctgggaccggccccatcatgacaaagccaagtatagcattagtttggatgaattcaagtcattttgccattttacaacccacttggaagactttgctattgccatgcagatgttcagtttagctcatcgtcctgtcagactagcggagtttaagagagctgtgaaagtagcaacaggacaagaactctcaaacaatattttggacactgtctttaagatctttgatttggatggtgatgaatgtcttagtcatgaagagtttcttggggtgttaaaaaacagaatgcatcgagagcagagagcccagtgccaaacatttcataattaccgcttcaaagattctgcatcacacgcacgtcagcgatgttccaggggcagagaaaggaagcgtgcactggaggtgtcaccgggcttcattaccgccatcataaagattgagtacttacctgccaggtcgcagtgttcagtgctggagcgcgtgtga

SEQ ID NO: 121720 - DNA, 1902 bp, Homo sapiens
gtagctgcgcgcgggtggcggcctggggcggaaaactgcgacgggggctcgctgtcagccgacaggctgtgcggagtcccggccccttggcagcggcagtggccggcgcggccctggcaggagcaggagcggcctggcaccacagccgcgtcagtgttgcggcgcgggatggcagttttacagtctccgcacagaaaaatgttgaacatggaataatatatattgggaaaccgtctcttcgtaagcagcgcttcatgcagttttcttcactcgaacatgaaggagaatattatatgacaccacgagacgttcctcttctcagtgatgtttgagcaaatggaacgtaaaacttcagtcaagaagctgacaaaaaaggttcatcgaggatacactgtcagggatcccaacagctggctgtggatcatctttttttcagagaccttgggcgattaaagggctaattttcatataaccgagttatctttttttttgctttacaatcctcactaaaccccattcctggatttcatgttgcttttaaaatgctggatacagatggtaatgagatgattgaaaaaaagggaattttttaagctgcagaagatcataagtaaacaagatgacttgattgacagtgaaaactaatgaaacctggatatcaggaagcaataagtgaaagaacctgaaattaacacaactcttcagatgcgtttctttggaaaaagaggaccaagaaaacttcattataaagaatttcgaagatttatgggaaaatttacaaacagagattcaaggaaatgggaattccttcagttttctaaaggtttgagtttcatgaggaaaaggaggactttgcagagtggctactttttttccactaacactgaaaataaagatatttattggaaaaatgtgagagagaagttgtcagcaggagagagcattagtttggatgaagtcaaggcattttgtcattgtacaaggcagattggaacactttgctatttgccatgcagatgttcacgttagctcatcgtcctgtcagactagcggagtttaagagagctgtgaaagtagcaacaggacaagaactctcaaacaatattttggacactgtctttaagatctttgatttggatggtgatgaatgtcttagtcatgaagagtttcttggggtgttaaaaaacagaatgcatcgaggtttagtgggtaccacaacatcagagtatacaagaatactggaagtgtgtgaagaaagaaagcattaaagggagtaaaagaagtctggaaacaagctgggaaaaggtcttttttaataaaagatataatagtatggcaattatattgttccaaatgtcaaaatttgtgattttttagaagtacttgctatttatcttcttaagtcttcattgatattctgtgtgaaataagcatgtcttgtacttgctttctgatttcataattttatgaaagaacttagttagaaagaaaagtaagtataaaaataagatattggattctgtccagaaggccccagatttggaaataatgttttggtacttcgggtaagatgggaaaacctagtgattcccctgatttccttagacactctaatatgatatgcctttctgggaagggataaaacgaaatacatatggggaaaaagtacttgagaccaaggccagcatcaattcccagacatcttcatgttcctaataggctaaatgaagttaaaaacttatttcagatttttctcatctgtaccttatatctcataaatttattggcatattttatgtcagtagcttagctgtttattgtctttaaaataacatgtaaacttcaatgttaatatctggaagcagaataaaatatttacatagatacaaaaaataaaaaaaa

SEQ ID NO: 121721 - DNA, 696 bp, Homo sapiens
tcagaaccggggcccaggccgcacctgagattttctaccaaattcattggagagaagatcctgtccttctgcaattgctccctgggctccataggtgccctgggccctgcctgctgccgtgtcctcagtgagctctctgaagagcaggtcttccacgtcaattacctggatgttgaggagctgagcctgagtagactctgccagtgtctggtggaactgtccttccagctggccactgcatatcatggctctgcaaccaccagggaggcagcccgtggtgaggctgcttgccgtgcccatttgatgttttggtgcctttgcatctggcagttctgcaggctttaaagtaaacatggtgccggcatctgcttgggcttttagggaggccccaggaagcttacagtcacagtggaaggtgaagggggaacaggccattgtaggagcatggttagtttgtttggtgtggtcatgtcttcctgggtagtcttgatgcttgtgggtgttctttggtttctggtgttctattctactgtgcctgagctggacccaagccacaagacaaagttcttcccactcttctctcttttttccacaagcagtgaagtctcttcctatggctaccacaactgggaatttgttgaagccagcacatctgtgagtctcacccaaggcccatggcaagtactgcctgggcat

SEQ ID NO: 121722 - DNA, 1444 bp, Homo sapiens
gtaggctgtgtattggggcgcgtggaggctgcagtcacggtggcgcccgcggggacggaggagggaatgagtgaagaggagcaaggctccggcactaccacgggctgcgggctgcctagtatagagcaaatgctggccgccaacccaggcaagaccccgatcagccttctgcaggagtatgggaccagaatagggaagacgcctgtgtacgaccttctcaaagccgagggccaagcccaccagcctaatttcaccttccgggtcaccgttggcgacaccagctgcactggtcagggccccagcaagaaggcagccaagcacaaggcagctgaggtggccctcaaacacctcaaaggggggagcatgctggagccggccctggaggacagcagttctttttctcccctagactcttcactgcctgaggacattccggtttttactgctgcagcagctgctaccccagttccatctgtagtcctaaccaggagccccgccatggaactgcagccccctgtctcccctcagcagtctgagtgcaaccccgttggtgctctgcaggagctggtggtgcagaaaggctggcggttgccggagtacacagtgacccaggagtctgggccagcccaccgcaaagaattcaccatgacctgtcgagtggagcgtttcattgagattgggagtggcacttccaaaaaattggcaaagcggaatgcggcggccaaaatgctgcttcgagtgcacacggtgcctctggatgcccgggatggcaatgaggtggagcctgatgatgaccacttctccattggtgtgggcttccgcctggaatgttcttcaaaaccggggcccaggttgcacctgggattctctacgaaattcagtaggagagaagatcctgtccctccgcagttgctccctgggctccctgggtgccctgggccctgcctgctgccgtgtcctcagtgagctctctgaggagcaggcctttcacgtcagctacctggatattgaggagctgagcctgagtggactctgccagtgcctggtggaactgtccacccagccggccactgtgtgtcatggctctgcaaccaccagggaggcagcccgtggtgaggctgcccgccgtgccctgcagtacctcaagatcatggcaggcagcaagtgaagccccagctggactcatggatgtgcaccctttgctccctgctctttctgcctctgggctcatgtatctgcgcagctctggtaccctctgtgggtgccatctctacctctgacacagactgcctgccttgaagctgagaaggcacagggcaaggagccaaggaccacagagcctcagccagcccaggatccgtcctcattttattggtgatgatgaatgggaatgaaatcagggggctgtctactagagcctggaataaatatgctgctttgtgga

SEQ ID NO: 121723 - DNA, 495 bp, Homo sapiens
gaaggtcctggaaatggagcacacccagcaaatgaagctgaaggagcggcagaagttttttgaggaagccttccagcaggacatggagcagtacctgtccactggctacctgcagattgcagagcggcgagagcccataggcagcatgtcatccatggaagtgaacgtggacatgctggagcagatggacctgatggacatatcggaccaggaggccctggacgtcttcctgaactctggaggagaagagaacactgtgctgtcccccgccttagggcctgaatccagagaggccactccggatggtggtgaggacagcgactcttaaattgggacatgggcgttgtctggccacactggaatccagtttggctgtatgcggaattccacctggaaagccaggttgttttatagaggttcttgatttttacataattgccaataatgtgtgagaaacttaaagaacagctaacaataaagtgtgaggacggtaaa

SEQ ID NO: 121724 - DNA, 1273 bp, Homo sapiens
ctgagagcttgcattttgcttttatagaggcagtagattccaatgtatatctgcttaagccatcagcaaaaaactaataggcttactacaatttcttcggaaaaacctgcttctggcttcagcctcacttccttgtgttctacatcccagaagatgcacgtgagggcagctgcctggtaactggaggcttcacttgaccagcactgagcttctgttcactcattcaggtctcacatccatgtcatctccaggactcaccgaaaatagtcagagggatccctctgaactagatgcagagcacgcccagaaggtcctggaaatggagcacacccagcaaatgaagctgaaggagcggcagaagttttttgaggaagccttccagcaggacatggagcagcagtacctgtccactggctacctgcagattgcagagcggcgaggcgagtgggggctggggctgctggtgtggggactcaccggctgtgcgggttgccatgactcttcttggggtcttgtccgttggtataagtgttacagtttcaagtttgttgacgaaccttgtctacagtttgagcggaattgcaagcccataggcagcatgtcatccatggaagtgaacgtggacatgctggagcagatggacctgatggacatatcggaccaggaggccctggacgtcttcctgaactctggaggagaagagaacactgtgctgtcccccgccttaggtagggttgacaaacttgcattagctgaaccagggcagtatcgatgccactcccctccaaagctgcaacagtggtgtggttccgtcatgaattcttctcaaagatttgacatgctccactccggtaactttgaaatccatttgagtctgctccttgtggttaaggactggcgtttgcagggaggtgcggactctcctgcggggctcacgggaaactcttccctcttcgtgcgacaggcatttaggggcgtgcctgccatgggcaaagccatgggcagttcccaagttctgcaggccccagggcctgaatccagtacctgtcagaatgagattaccctccaggttccaaatccctcagaattaagagccaagccaccttcttcttcctccacctgcaccgactcggccacccgggacatcagtgagggtggggagtcccccgttgttcagtccgatgaggaggaagttcaggtggacactgccctggccacatcacacactgacagagaggccactccggatggtggtgaggacagcgactcttaa

SEQ ID NO: 121725 - DNA, 1409 bp, Homo sapiens
  misc_feature (1)...(1409): n = a,t,c or g
tggtgtgacttcgctgtcgagattcgttgccggtagtgggagtgcggttcgcgcggtgacagcgcggggttggcggcgtgggacccagggggcgacagaggcagcagcagcccgaggcctgaggagaggagaccggcggcggcggcaatgctggagacccttcgcgagcggctgctgagcgtgcagcaggatttcacctccgggctgaagactttaagtgacaagtcaagagaagcaaaagtgaaaagcaaacccaggactgttccatttttgccaaagtactctgctggattagaattacttagcaggtatgaggatacatgggctgcacttcacagaagagccaaagactgtgcaagtgctggagagctggtggatagcgaggtggtcatgctttctgcgcactgggagaagaaaaagacaagcctcgtggagctgcaagagcagctccagcagctcccagctttaatcgcagacttagaatccatgacagcaaatctgactcatttagaggcgagttttgaggaggtagagaacaacctgctgcatctggaagacttatgtgggcagtgtgaattaaaaagatgcaaacatatgcagtcccagcaactggagaattacaagaaaaataagaggaaggaacttgaaaccttcaaagctgaactagatgcagagcacgcccagaaggtcctggaaatggagcacacccagcaaatgaagctgaaggagcggcagaagttttttgaggaagccttccagcaggacatggagcagtacctgtccactggctacctgcagattgcagagcggcgagagcccataggcagcatgtcatccatggaagtgaacgtggacatgctggagcagatggacctgatggacatatcggaccaggaggccctggacggtcttcctgaactctggaggagaagagaacactgtgctgtcccccgccttagggcctgaatccagtacctgtcagaatgagaattaccctccaggttcccaaatccttcggaattaggagccaagccacctttcttcttttcctccacctgcaccgactcggccacccggggacattcagtgagggtggggagtcccccgttgttcagtccgatgaggaggaagtttcaggtggacactgccctggccacatcacacactgacagagaggccactccggatggtggtgaggacaacgacttttaaattgggacatgggcgttgtctggccacactggaatcccagttttggctgnattcgggaattccccctggaaagccaggttgttttataaaggttcttgatttttacataattgccaataatgtgtgagaaacttaaagaacagctaacaataaagtgtgaggacggtaaactgagaaaaaaaaaaaaaaaaaaaaca

SEQ ID NO: 121726 - DNA, 355 bp, Homo sapiens
agggtgattatgagaatagtgaatgagttggctattttagactggaacgaccaaagtgctagaataacaggtgtgagccaccatgcccagcctggttattgtattttgatattgggattttgctagctctctaaagtaaataggataactgtatatctttttctgtgcattaagcagttataacatgggaatgatttgttcatgaaaggttgaaagtctgtacttacagaacttttgagttcacagtgctttctggaaataatttctttataactgtcagtttcttttgtgactattatgttacctatttttaaatttaagcaactttaaattaaaaaaattgtttttaaaatat

SEQ ID NO: 121727 - DNA, 4148 bp, Homo sapiens
  misc_feature (1)...(4148): n = a,t,c or g
caggtttatattcttccctggcggggccgctacacacggccaatcctgtctagtaaaaaggacagtattggaatcacttgaaaagagggctcgagataaacaggggttcacatgacgacagaagccaagagggctgcaaagatggaaaagaagatgaaaattttgcttggggggttaccagtctcgtgctatggggctcatgaaacagttgaatgacttatgggaccaaattgaaccaggctcactggaggttacgcactttggaaggactccaggaaccatgaagattttggtttttccccgggggctagagtgtctaaaagaaggacgttcagcgacaacaaggaaagagaaaagggaactttcaacatagatatgctgatttgctgctggagaaagaggctttaaagtccaaaattctgaagtaccagtttatanccctgtcacagggattaatttaattgcccggttttcatactctagaaggctgaaactgatgtttatcctccattgaacaaatttacccccacccatcctgtggtttttccagttgtttattttaaatgatatcgatccttacacattcctgtgtataaagaccttaactccacaggacgggacattttagagtttaaattattaaggctatcattcttttagtaatgtcatatttgcaaacttttttagttttggcctttaatttaaaaagcctaattttaaagtgctgcctgtgagtaactcttgaataaaaacaaaatataaaaaattgagaatgtagccttttgtttgaagtaattagatacttaagagtgcctgcaaaccagcagctatgtactctgtgtcatatttaatgagtaactcttgggtaatcaaaatggtgatgcagtatcttaaacacttaagaggcagttctttgtggctttgttagtttcagcaaagagtggtcatttctgtatacactgacaagttagattaactttttagtacctcaaattttttttttgttaatatcactttaaagaaggtctcttgtctgccagctacttaaataatttatgggtcagggcttaaaagatttaacttccttgccccattattttcttataagtattttttgacaaaggcattttaaaagttaatttcaagaaggccatcaaacttaaagctctatgtttagcctaagaagtcagttacatcagtgtagaatttggggaatggatagaggtggagatatttaattttatataattcatataaattgatttagttacagtatcagttggctacaagctcattatagactagcaatgttttgacatcaccaaaaacgtttgcccagtcttagaatactagggactataggaagggaagggattcattcattcattcgatattgaatgtataccctgtgccagagtcttagagagagaacaacaaacaaaataggcctagttcttgtttagtagagcttatagtcttttgagaatgacagacaattaaaatccaaatgtttatttggtgattcttatgtgtcagacacttaagtgttgggagataagcagttattaagacagagttcttgctctcatggaggtgacattagtggggaggagatactaagtatgtccagggaaagtatcagaccatgagttttagattctgtggaggaaattaaagtagggtgattatgagatagtgaatgagtggctattttagactggacgatcaaagagacctcttggaaggcagctatgctcaccactataccactgcactgtgccgcaccgtaccactataagctgcacggccaaagagacctcttaaagaagtaacatttaagataacatgtgattgacattttagaatgggctatccttgtgagattcaaggaaagaacatcctaggtggagtgaatagcaaacataaagcctcttttgtatgtttgaggaacaaaaaggacaatgcagctagagtgtcaagaatggcatttctgtatataagacctcgttgtatagagccacataaataaggctataataaggaatttggatcttactttaaatatgataagaatcgatgagaagatctaagcaaaggaatgacatgatcagatttggttttagaaacatcactatctccttagtgtgtaaaatctcaccaggctggagatagggaagccagtccaattaggagcctgatgcagtgatccagacaaaaaaataatagtgattctaactagagtccaggtaatagtagtggagatatgtggagagacatgataggtatatacttaatagtcttatcagacgataaattgatattttcctggtgtgtagtcacttaattcaaatacttttttcagtaagttctgggttttctaggaaaaacttcagtatcatcagtgaataatgatagtgtttcttctgatagttttatttcacttttattgcatgttttgttatctgaaatgtttaggacaatgttaacaataatgatgttagacatttttttttcttattttaatgggaatgtccatagttttaagtttgctgttgggagttagatagtctttatctgaaagacagtgtctctcttttagtttttaaagagtttgaattagaaatggctctggaactttaaacagtataccatttgggcatctattaaagcattcatataattgttctcatttgatgttttgatgaggtatattaatagattttcccacattaaatcatctttgcactcctggaatcaggtagattaatttttaaaagaaattttaaaggatttatagtttatttgcactttttgtagacttgaattatatggatttaaaagttgatctaatattaataaaggctcactttgttttcaaaatttgaagtaattcacatacttatagcctaaaatcggcaggaattacaaaatttcaaaactggcacattgtaaactgcatatgcatttgccaggtagtggtgccacttgaaatggtgaacagacacactgttatcctttgtcagtatcctgtaaagcccaggattctttaccagcaccatacagcgattttggtgactattttaacattcacactgaggccaggggtggtgagtcatgcctgtaatcctagcactttgggaggccaaggtgggaggatcatttgagctcaggagttcaagattagcctgggtaacatagtgagaccctgtctctattaaaaaataataataaaaataacattcacattggtattgttcactaaggtattggttgttaaggcattcattaaggtattgttaaaacttgtgttaagcatgttaaagtctcagtaactttgggatagaaataaaatgtgataaaaagctgaaagaaaccaccacaagggagagtcctttttgaaatattagagacataatgctgtctaataaaaaacgacatcaaagaaaaactacactacagtgactgcagacttaatgttggccaaccatgcatcctccctagaaatgcatttgaatttgatttactaatcttttatttaggaaatttacatttttacattagtgagattggtcttttgggctattgtactttttttttttttttttttgagatggagtcttgctctctcacccaggctggagtgcagtagtgcaatcttggcccactgcaacctctgcctcctgggctcgagtgattctctgcctcagccttccaagtagctgggactacaggcatgtgccaccgcactggctaatttttgtgtttttagtagagatggggttttgctatgttggccaggctggtcttgaattcctgacctcaggtgatccacctacctcggcctcccaaagtgctagaattacaggtgtgagccaccatgcccagcctggttattgtattttgatattgggattttgctagctctctaaagtaaataggataactgtatatctttttctgtgcattaagcagttataacatgggaatgatttgttcatgaaaggttgaaagtctgtacttacagaacttttgagttcacagtgctttctggagataatttctttataactgtcagtttcttttgtgactattatgttacctatttttaaatttaagcaactttaaattaaaaaaattgtttttaaaat

SEQ ID NO: 121728 - DNA, 387 bp, Homo sapiens
attttacttggaagaagagaaatgtctgagacttctgaactttggcagataaagttggtgttagagtttttcagctcccgaagccatcaggagcggctgcagaaccaccctaagcgggggctctttatgaactcggaattcctccctgttgtgaagtgcaccattgataataccctggaccagtggctacaagttctgtcatcagttggttccgttccatttgtttctctcacagtcgggggtgatatgtgtgtgcacgcctacctcagcgggcagcccttggaggaatcacagctgagcatgctggcctgcttcctcgtctaccactctgtgccagctccacagcacctgccacctataggactagaagggagcacaagctttgcc

SEQ ID NO: 121729 - DNA, 2310 bp, Homo sapiens
  misc_feature (1)...(2310): n = a,t,c or g
atgaaaaaggtaggaggaagagttttctgggccaaggaaagggcaagtgcagaggccctgaggcacgaactagctgggctcctgaagaaatgcaaaggtagtgcagccgatgctgatcaaggaggtctaggccaaggctgcagacgccatagcaagcgatgggaaggatttacccgaggggcctcccgcgccgcccgcttggggaacgaggagcaggacgcggcctcggcggggcccgggccgaacggctgcggacacctgggcgccgaggagccgagcgccgccgcctccggcatggatcagtgcgtgacggtggagcgcgagctggagaaggtgctgcacaagttctcgggctacgggcagctgtgcgagcgcggcctggaggagctcatcgactacaccggcggtctcaagcacgagatcctgcagagccacgaaacttgtctgagcgtggtgctgctgtctctccccatggtcatggctggctcaggaaacctaaaggttttgcagctttgtcgcttcttacacatgaaaacgggtggtgaaatgaactatggttttcacttagcccaccacatgggcccttgggacttctatttttggggaggagggaaggtactctttgaggcacatcaaattcttccattgccgctcttctctgtgccctttatccgcacttcccaggcttcacagcactggacaaccggtatcatctccagggctctccgggcacctctatgtgctgggccgcggagcccagggctttcttagtgcctgtgggatgtgggacacaaacacggccctgctatggncctcttaggaagtttaccttacaagggcactcagtggtattgaacaaaccaaagaaggatttgatggctcctacccttcttccagaactccatcttttaaagcagattaaagtaaaaggcccaagatactgggaactgctcatagatttaagcaaaggaacacaacacttgaagtccatcctttccaaggagtggggttttatatgttaaactccgggcgggtcagctctcctacaaagaagatccaatgggatggcaaagtttgttggctcagactgttgctaacaggaactctgaagcccgggctttcaagccagaaacaatctcagcattcacttctgatccagcacttctgtcatttgctgaatatttctggcaagccaactgtgaacatgggtcagaaacaggaaaattctggatctcttttctttcagtactctatgaatgtgtttaccccagggagacccccagagatgttggcctgcatacatagcaatggatcagcttataagaagactgggagaaagagaaatgtctgagacttctgaactttggccagataaagttggtgttagagtttttcagctcccgaagccatcaggagcggctgcagaacccacccctaaagcggggggctcttttaatggaactcgggaattcccccccgttttgtaagtgcaccaattaataataccctgagacacatggcatacaagtccggggtgatatttgtgttaacgcctacctcaccgggcagcctctgagaggaatcacagcttgagcatgctggcctgcttcctcgttttccactttgtgcccagttcaacagcactgcccaccctataggactagaaagggagcacaagctttgcctgaactgctcttcaaatttaaagccagcctaaaaatgcccagtgccgagctttgcctgagattggctcctttgccttccttggaaatcccacagcccaatggtgatgtgaccgtgtctggcggtgaacctacccctgaaacgtgacttctgcacaacaaacgtgaccaaacatcaaagctaaagcaatgtttataaagttttattggtataactagggggaaatgagcctgcacaaacctcaatgtattttaaatctgttgctgtcatcattaacccggtattggacatataaaagcaagctaacactttacttttgtaaataaagtttttggtttgtttccaaaactcttgatgattgctttagttttggacttagagaatagagcaggggttgctggagtgaatattgatttttaaagtctttgaactgtggtgggtataggtgaagtgactatgcccaaaaatgccaagttttaaaagaagctatgtcataaagttttactttctgtgggcaaaagagcgctttagccatttcctcagatgtcacagttgtccccgtctaaaataagtttgtacttctgggtgaccatgccagacactcttatggaggtgatcccccttaac

SEQ ID NO: 121730 - DNA, 602 bp, Homo sapiens
  misc_feature (1)...(602): n = a,t,c or g
ttttattatttgatttggtatttaataacagttataagtacaatggtagacactgaaaaagaaaacccttaatagaaaagaaaaagacaatttaaaattagattttgttgaggggtgttataagtgcaactttatccatatgcattccttttaaggcattttcattgtccaaatatctcaacatgtacatcaaggtttatattataaaatgggctccttttgtattcattcaagacttaaagaaaaaatacatctcaggactaagtgtagcacttggcccacatgtcatgtagtgggtaatagaattaggagctttgttgctccctagacctgctttttgaatttctgctttcttgtactttgtccacattagatgctgcagtggtgttgctgtcagcagcagctggttggtgaatcaactgatataggcagtctactgtccttggtcaaaaaatcatggatgcttgtccttcgtgtagttccttcggcagttgagatcacgctgcttgcacgaggtaaagttgcataagggttactatcttttgattgtcgtgacagagaagattcttttactaattntatttttccttgagtgcctggtg

SEQ ID NO: 121731 - DNA, 1638 bp, Homo sapiens
atggaaaatatcttatttacgtttgtgcccctggaccaagaagtagagtgctcagggattaaatgcatcttggaaaggcttccgaacgcacaatgcgataacactcccacagagccgcttgccctgatacgaatcggctcgtccccggagcttctagatagcactacttgcatcgatgtcgctctcgacactcttcgtcgacataggaaaaaatataattcgctgagagccggtgcagttaataaccaaagcaggccacaaagccacagcagtggagaatttagcctgcttcatgaccatgaggcttggtccagcagtggtagcagtccaatccagtacttgaaaagacagaccagatcaagcccagtgctccagcacaaaatatctgaaacactggagagtcgacatcacaagatcaaaactggttcccctggaagtgaagttgttactctacaacagtttttggaagaaagcaataagcttacctcagtacagataaagtcctcaagtcaagagaatcttttagatgaagtaatgaaaagttttgtctgtctcttctgactttttgggaaaagacaaaccagttagctgtggtctggccaggtcagtaagtggaaaaaccccaggggacttctatgatagacggacaactaagcctgagtttttgagacctggtcctcgaaaaactgaagatacctacttcattagttctgcgggaaaacctacaccaggcactcaaggaaaaataaaattagtaaaagaatcttctctgtcacgacaatcaaaagatagtaacccttatgcaactttacctcgtgcaagcagcgtgatctcaactgccgaaggaactacacgaaggacaagcatccatgattttttgaccaaggacagtagactgcctatatcagttgattcaccaccagctgctgctgacagcaacaccactgcagcatctagtgagtaccatttacaccagtggtcctctcatatacttgacatcccaacacatactataggttcttgtgcccaaaatgatttagctatagacatgcctgagcctctatatgcccaggctagaaactcaagaacaggaaggtcacattttctaaaccaaacttttgccactattaggatgcctagtgatgcattcggaatgttggcaaaagataagcataggaccatttactgtggcccattcatctcagccattcttatccctgaatacagaattagttagtaacataagtgggttacctcctaggccagtcatcagaataactgaccaggcttctgcctctttggataaacctgcacagaaagaaaatgaacagttttctgatcatcagaaccctagtaacagtaacctacagttttctataaatagcaacaatcttgtcacttctgcatgcctctatcctgatgacacagaagctgcattgttggtttctgaggataatcaaactgtttggtatgaatatggttgtatatgatcaaaactgcacaatataatatattgatgttatttgatatacactgcttctctaatatgatttgaaaagttgctgttaacaaaatatcatttggctaggtttttattttttatttaaaattgttgcacagtgaatcagctgtacaaca

SEQ ID NO: 121732 - DNA, 1974 bp, Homo sapiens; identical to SEQ ID NO: 120738

SEQ ID NO: 121733 - DNA, 1713 bp, Homo sapiens
atggcagttggagttttaacccagactgtgcggctctggccaaggccagtggcctatctctcaaaacaactagatggggtttccaaaggctggcccccatgtctaagggccctggcagcaatggccctgttagcacaagaagcagataaactaacccttgggcaaaacctgaatataaaggccttccatactgtggtaactttgatgaataccaaaggacatcattggctaacaaatgctagattaaccaagtaccaaagcttgctatgtgaaaatccccgcataatcactgacgtctgtaacaccctaaatcccgccaccctgctcccagtatcagagagcctggtcaagcataactgtgtagacatgttggactcagtttattctagcagacctgaccttcgggaccagccatgggcatcagcagactgggagttatacatggacgggagcaacttcatcaatccacatggagaaagatgtgcaggatatgcggtggtaactttgaacgctgtcattgaagccaaaccattgccacagggcacttcagcccagaaggctgagctcattgctttaactcgggctctagaactcagtgaagtgcatggagcattatataaggaaaagggcctgttaaactctaggggaaaggacataaaatatcaacaagaaattctacaattattagaggcagtgtggaaacctcagaaggtggcagtcatgcactgcaggggacaccagcgagcctccacctcagtggccttaggaaactcccaaactgactcagaagctcgaaaagcagcatctaccccttactgtgcatcagtagcagcccccttactccctcaaacacctgacctggtacctacctattctaaggaagaaaaagactttttccacacagaagtggggcaagtaataaaagaaggatggatcagactgccagatgggaaggtagctgtgccacagttgctgagagccacagtcgtactggccatgcatgaaaccactcttctaggtcaagagtcacttgaaaagttgttaggccggtacttctacatctcacacttgccagcccttgccaaagcagtagcacaatgcatacaagcttatggagcggctccttttgagggtcttcaggtggatttcacagaaatgccaaaatgtgaaggtaacaagtatttgctggttcttgtgtgtacttactctgggtgggtggaggcttatccaacacaaactgaaaaggcctacgaagtaacccgtgtgcttctccgagatcttattcctaggtttggactgcccttacgaattggctcacataacgggccggtgtttgtggctgacttggactgtgtggaaatcaatgtggatactggtgtcatttgggccacttggataaaaaatgaaaaggatccagtgcagcttcagaaaggaaaaagtggcccttcctgtactaagggacaatgtaaccccttagagctagtaataaccaatccccttgatcctcgctggaaaaaaggggagcgtgtgaccttaggaatcaatggggctggactggatcctcgagtaaatatcttagttcgaggagaagtttacaaacactctcctgagccagtgcttcaaactttctatgatgaactaaatgtgccagtaccagaaattccaggaaaaacaagaaatttgtttttgcaattagccaagcatgtagcctag

SEQ ID NO: 121734 - DNA, 564 bp, Homo sapiens
aaactgtataatggtaccaaaaaaacagtcacttgttggagttcaaatcacacagagaggaatccatttagtaaattcccaaagttgcaaaccgtatggacccacctggagtcccaccgggactggacagcccccactggattatactggcccataaaaacaggtgaactcctgggcttccctgtctatgcgtcccacaaaaagggaagcatagctatagaaaattggaaagatgatgaatggccccctgagagactcatacaatattatggggctgctacttgggcacaagatggctcatggggatactggacccccatttacaagatcaaccaaatcatacggttacaagctgtcttagaaataatcactaataaaactggcagagccttgactgttctggcctggcaagaaactcagatgagaaatgctatctaccaaaatagattggctcttgaatacttgctagcagctgaaggaggggtctgcaggaaatttaaccttactaattgctgtctacacatagatgttcaagggcaagtagttgaagacatagagatatga

SEQ ID NO: 121735 - DNA, 642 bp, Homo sapiens
atgctaagtattcagtctacacatgcagagaaagaattagagaactttttccaaaacactgaagactggtatttccacacttcacatcaccttgccacttggataaaacaaaaaagtgaaaaggatccagtccaccttcagaaaggaaaaaatggcccctcctgtaccaaaggacaatgtaaccccttagagctagtaataaccaatccccttgatccttgctggaaaaaagaggagcgtgtgaccttaggaattgatggggctggactggatcctcaagtacatatcttagttcgaggagaagtttacaaacactctcctgagccagtgtttcaaactttctgtgatgaactaaatgtgccagtaccagaaattccaggaaaaacaagaaatttgtttttgcaattagcctggcatgtagcccagtgtctcaatgtcacttcatgttatgtatgtggaagaactataataggagatcaatggccacaggaagcccaagaattagtacctacagacccagttcctgatgaattcctggctcaaaagaatcaccctgataatttctgggtcctaaaaccctcaattattggacaatattgcatagctagagaaggaaaagaattcactcaccccataggatga

SEQ ID NO: 121736 - DNA, 613 bp, Homo sapiens
catacaagcttatggagcggctccttttgagggtcttcaggtggatttcacagaaatgccaaaatgtgaaggtaacaagtatttgctggttcttgtgtgtacttactctgggtgggtggaggcttatccaacacaaactgaaaaggcctacgaagtaacccgtgtgcttctccgagatcttattcctaggtttggactgcccttacgaattggctcacataacgggccggtgtttgtggctgacttggactgtgtggaaatcaatgtggatactggtgtcatttgggccacttggataaaaaatgaaaaggatccagtgcagcttcagaaaggaaaaagtggcccttcctgtactaagggacaatgtaaccccttagagctagtaataaccaatccccttgatcctcgctggaaaaaaggggagcgtgtgaccttaggaatcaatggggctggactggatcctcgagtaaatatcttagttcgaggagaagtttacaaacactctcctgagccagtgcttcaaactttctatgatgaactaaatgtgccagtaccagaaattccaggaaaaacaagaaatttgtttttgcaattagccaagcatgtagcctag

SEQ ID NO: 121737 - DNA, 1720 bp, Homo sapiens
atgctaagtattcagtctacacatgcagagaaagaattagagaactttttccaaaacactgaagactggtatttccacacttcacatcacctttcttccctaagatttttctctgcgagggaatcaaactgctctatgaagctctatgaagaggcttatatggaaagatacagagactttctgccagcaaccatgtggtcagcccacacagaagtggatgttccaggccaggccacttggataaaacaaaaaagtgaaaaggatccagtccaccttcagaaaggaaaaaatggcccctcctgtaccaaaggacaatgtaaccccttagagctagtaataaccaatccccttgatccttgctggaaaaaagaggagcgtgtgaccttaggaattgatggggctggactggatcctcaagtacatatcttagttcgaggagaagtttacaaacactctcctgagccagtgtttcaaactttctgtgatgaactaaatgtgccagtaccagaaattccaggaaaaacaagaaatttgtttttgcaattagcctggcatgtagcccagtgtctcaatgtcacttcatgttatgtatgtggaagaactataataggagatcaatggccacaggaagcccaagaattagtacctacagacccagttcctgatgaattcctggctcaaaagaatcaccctgataatttctgggtcctaaaagccctcaattattggacaatattgcatagctagagaaggaaaagaattcactcaccccataggatgacttagttgtcggagacagaaactgtataatggtaccacaaaaacaatcacttggtgggagttcaaatcacacagagaggaatccatttagtaaattcccaaagttgcaaaccgtatggacccacctgggagtcccaccgggcttgggaacagcccccactgggatttttactgggatatgttagggcttggagcttattgacaggtttactggaccattgggcaggtagttgttgtttattgggcactatttaaaccatctttcttccctactgccccataaaaacagggcaaactccttggcttccctgtctacgcttcccgtgaaaagagaatcatagctatagaaaattggaaagatgatgaatggccgccccctgagagaatcatacaatattatgggcctgttacttgggcacaagacggcttgtggggataccagacccccatttacgtgctcaaccgaatcatacggttacaagctgccttagaaataatcactgataaaatcagcagagccttgactattctggcctggcaagaaactcagatgagaaatgctatctctcaaaatagattggctctcgactacttgctagcagctgaaggaggggtctatgggaaatttaaccttactaattgctgtctacacgtagatgatcaaggacaagtagttgaagatatagttagagataggacaaaactggcacatgtgcccgtgcaagtgtggcatgaatttgatcctggggccatgtttggaaaatggttcccagcactaggaggatttaaaactcttataataggagttttaatagtaataggaacctgcttactgctcccttgtttgctacctgtacttcttcaaatgataaaaagcttcatcgctaccttagttcaccaaaatgcttcagcccaagtgtactatgtgaatcactattga

SEQ ID NO: 121738 - DNA, 406 bp, Homo sapiens
gaacgctgattagttttatttacccagcccaaaatccagagttgctaaataaactttcccaaagaaaaactacagttctggcaatggaccaggttccaagagtcacaattgctcagggatatgatgcgctaagctccatggccaacattgcgggattctgatagttggtggtggtgttgctgggcttgcttctgcaggcgcagcaaagtcgatgggtgcaattgttcgaggatttgacacaagagctgcagctttggaacagttcaagtctcttggtgctgagcccttggaggtggacttgaaggaatctggtgagggacaaggaggatatgcaaaagagatgtccaaagagttcattgaagctgaaatgaaactctttgctcaacaatgcaaggaggtagacatc

SEQ ID NO: 121739 - DNA, 446 bp, Homo sapiens
cctcccggcccagtgatttgccttcaaggaaactggggagtcagaaaattgggaactcatatcaacatggcaaacctattgaaaacagtggtgactggctgctcgtgtcctctacttagcaatttggggtcctgtaagggtctacgtgtgaagaaggattttttacgaacattttatactcaccaagaactgtggtgtaaagcgcctgtaaaaccaggtaaagtctcacttcagtgattgtaaatgaaaccttcaagtcataggaactaatagatctgatgattgataaaaggaaaagccatgtagttttatggcctggtgcttgtgagtgatcattttaaacaaacaacaagtaagtgctatcttgtattttccatgtactatagacgttcctgatttccagcgctaacagagaagacaaggtaatagaaaaaaaaaaaaaaaaa

SEQ ID NO: 121740 - DNA, 981 bp, Homo sapiens
atgtggaaacaactttggaactgggtaacaggcagaggctggaacagtttagagggctcagaagaagacaggaaaacgtgggaaagtttggaactccctagagacttgttgaacagctttgatcaaaatgctgataacgttatggacaatgaaatccaggctgaggtggtctcagatggagatgaggaacttgttgggaactggggcaaaggtgactcttgttatgtcttagcaaagagaatgacggcattttaccccaccctagaggtgcgagcccctatggttaatccaacattaggtgttcatgaagctgaccttttaaagacatcaggaacgctgattagttttatttacccagcccaaaatccagagttgctaaataaactttcccaaagaaaaactacagttctggcaatggaccaggttccaagagtcacaattgctcagggatatgatgcgctaagctccatggccaacattgcgggttataaggctgttgtcctagcagcaaatcattttggacgtttttttactggtcagatcacagctgctggaaaagttcctccagctaagattctgatagttggtggtggtgttgctgggcttgcttctgcaggcgcagcaaagtcgatgggtgcaattgttcgaggatttgacacaaggctgattccacttgtggttgcaactttacctccagggggcaatctgggctaccagattccttgctcaagccagcagagggagaacctcttgctcaaccatggactagctgcagctttggaacagttcaagtctcttggtgctgagcccttggaggtggacttgaaggaatctggtgagggacaaggaggatatgcaaaagagatgtccaaagagttcattgaagctgaaatgaaactctttgctcaacaatgcaaggaggtagacatccttatcagcacagcacttattccaggaaattcaaactgtggtgataaataa

SEQ ID NO: 121741 - DNA, 547 bp, Homo sapiens
  misc_feature (1)...(547): n = a,t,c or g
ctcttgtgtcaaatcctcgaacaattgcacccatcgactttgctgcgcctgcagatagcaagcccagcaacaccaccaccaactatcagaatctagaagacagacccagttatgtgttaaggctcattatcaactaataatgaaaaatcatcagctaacaattattggtgcctagtataagtttagcatcaataaatggcggtgcagatggtgataatgatgatcagcccttagtaactgtatgggagtacataggactattctttaactggaaccaccactggatcttggaaatttttattcaaggaaacaactggctaggccaaaggccaacaacaattcactaaaaataggcctaataattcaggaatatccgtgttaaaacttaccttaaggcatgatncagcattacgtatgttggagggtttaacaggttcttttccactgtcttaaaagttccttcttacttaaagtcccgtgtgggccttcttaactacctttaccctatccaattntaggggtttttctttggttcctccaacctctt

SEQ ID NO: 121742 - DNA, 408 bp, Homo sapiens
tttcgtccgccccagctttcttcccgccaggtccccttcacccgatcgccgcgcgctctccgaaccaaaaggcgacctcacgaaatgcccctttgagctcaaaggctagttacccccaggggcccttccactctcggggacaggcgaaacctctttgtctctgcctcggcctgcggcccccagcccagcctccgcgctttccctccgccagtccttgtcaatcaaacctggtgccaaacgcggcagctgaagttttcagggacacatttgcttctccccttgaagaaccagttacaaagcgtgatgtcctctctggggtcccatcagaacaaagaaacagggaagcagcggaatacaagagactgaactgtatctgcctctgtttccaaaagattcacgttcaacttt

SEQ ID NO: 121743 - DNA, 2572 bp, Homo sapiens
atggccaagtccaagaaccacactacacacaaccagtcccgaaaatggcacagaaatggtatcaagaaaccccgatcacaaagatacgaatctcttaagggggtggaccccaagttcctgaggaacatgcactttgccaagaagcacaacaagaagggcctaaagaagatgcaggccaacaatgccaaggccatgagtgcacgtgcccaggctatcaaggccctcgtaaagcccaaggaggttaagcccaagatcccaaagggtgtcagccgcaagctcgatccacttgcctacattgcccaccccaagcttgggaagcgtgtttgtgcctgtattgccaaggggcccaggctgtgctggccaaaggccaaggccaaggatcaaaccaaggcccaggctgcagctccagcttcagttccagctcaggctcccaaaggtaaaaaagctccagttttatttaataaagaaatgattgagtcaatgaaggaaggttcagttgttgtggatttagctgctgaggctggtggaaactttgaaaccactaagccaggagaactctacattcataagggaattactcacataggctacacagacctgcccagccgaatggccactcaggccagcaccctatattccaacaacatcaccaaactcctgaaggccatcagcccggacaaagataatttttattttgatgtgaaagatgactttgactttggtacgatgggtcatgtcattagaggaactgtagtgatgaaagatggtaaagtagattttcccagctcccacaccgaaaaatattcctcaaggtgccccagtaaaacagaagacagtggctgagctggaagctgaaaaagcagctaccattacacccttcaggaagacaatgtcaacggcttctgcatatacagcaggtctcacagggatactgggtttgggcattgcggctcccaatctagccttttctcagatggtgaccacttttggcttggctggcattgtggggtatcataccgtctggggagtgacccctgctctccactcaccactgatgtctgtgacaaatgcaatctcagggctgactgcagttggtgggttggcactgatgggaggacatttgtatccttccacaacttctcagggccttgctgctcttgctgcattcatatcctctgtcaacattgcaggtggctttctggtgactcagagaatgctggacatgttcaagcgtcccactgaccccccagaatacaactacctgtacctgctccctgccggcacctttgttggtggatatttagctgccctctacagtggttataacattgaacagggaacagcacgtcttggcaatgcactgggcatgattggggttgctggaggactggcagccaccctcggagtcctaaaaccgggcccagaattactagctcagatgtctggagcgatggctttgggtggtaccattggattgacaattgccaaacgcatccagatttctgatttacctcaattagttgctgcttttcacagtttagtgggtttggcagctgtacttacttgcatagctgagtacattatagaatatccacattttgctacggatgcagcagcaaatctcaccaagattgtggcctacctcggcacttacattggtggcgtcacctttagtgggtctctcattgcctatggaaaattgcagggtctcctgaaatctgcccctctcctactgcctggaaggcacttactcaatgcaggcttactggctgctagtgtgggcgggataatcccattcatggtggacccaagctttactactggcatcacctgtctgggttcagtgtctgctctctctgctgtcatgggtgtgactttgacagctgctattgggggtgctgacatgcccgtcgttatcactgtgctgaacagctactcaggctgggccctgtgtgcagagggcttcctgctcaacaacaatctgctgaccatcgtgggtgcactcataggctcgtctggtgctatcctgtcatacatcatgtgtgtggaaaacttcagaacaatttctgctctgagggtcattcaagagtcagatacatcatcaggggacccaggcaaaggctcaggacataaaccagtaaagatttcacaaacactatcctgggtccggggtttgtctgatctgcatgcacctccagaaaccaaccacaggcctcattcctacacttacagatgctcccattgcctgagccctgccgaaacccccatatcagactcctacctgtctgcttcatctagccgctctggggggatgcggttatctggagagacgagctcacctatcacctgggttaacagaggacagaaagaaaaacacatttggaaggcttgttttccccaacaagctcacagatctgatgccaatcaattctttgtccttgggtttatattagccaggttttttgttgtgggggaagctactggaggagagtttctcctctttcatagcctcatgacaaagcaaattctaattctccacagcacctcagagaaagtgaggctccttcactag

SEQ ID NO: 121744 - DNA, 4651 bp, Homo sapiens
ggcgcatcgccgcggtgcccaagcccgggtctgccagctctgacgtcctctcgcggccctcatggcacagcccaaggctgtcatcctcccggcccagtgatttgcctttaaggaaactggggagccagaaaattgggaactcatatcaacatggcaaacctattgaaaacagtggcgactggctgctcgtgtcctttacttaacaatttggggtcctgtaagggtctacgtgtgaagaaggattttttacgaacattttatactcaccaagaactgtggtgtaaagcgcctgttaaaccaggaattccatataagcaactgactgttggagtccccaaagagatattccaaaatgagaagcgagtggcattgtctcctgctggtgttcagaacttggtcaagcagggttttaatgttgtcgtggaatcgggtgcgggcgaagcttccaagttctcagatgatcactatagagtggcaggtgcccaaatccaaggggcaaaggaagtgctggcttctgatttggtggtcaaagtgcgagcccctatggttaatccaacattaggtgttcatgaagctgaccttttaaagacatcaggaacgctgattagttttatttacccagcccaaaatccagagttgctaaataaactttcccaaagaaaaactacagttctggcaatggaccaggttccaagagtcacaattgctcagggatatgatgcgctaagctccatggccaacattgcgggttataaggctgttgtcctagcagcaaatcattttggacgtttttttactggtcagatcacagctgctggaaaagttcctccagctaagattctgatagttggtggtggtgttgctgggcttgcttctgcaggcgcagcaaagtcgatgggtgcaattgttcgaggatttgacacaagagctgcagctttggaacagttcaagtctcttggtgctgagcccttggaggtggacttgaaggaatctggtgagggacaaggaggatatgcaaaagagatgtccaaagagttcattgaagctgaaatgaaactctttgctcaacaatgcaaggaggtagacatccttatcagcacagcacttattccaggtaaaaaagctccagttttatttaataaagaaatgattgagtcaatgaaggaaggttcagttgttgtggatttagctgctgaggctggtggaaactttgaaaccactaagccaggagaactctacattcataagggaattactcacataggctacacagacctgcccagccgaatggccactcaggccagcaccctatattccaacaacatcaccaaactcctgaaggccatcagcccggacaaagataatttttattttgatgtgaaagatgactttgactttggtacgatgggtcatgtcattagaggaactgtagtgatgaaagatggtaaagtgattttcccagctcccacaccgaaaaatattcctcaaggtgccccagtaaaacagaagacagtggctgagctggaagctgaaaaagcagctaccattacacccttcaggaagacaatgtcaacggcttctgcatatacagcaggtctcacagggatactgggtttgggcattgcggctcccaatctagccttttctcagatggtgaccacttttggcttggctggcattgtggggtatcataccgtctggggagtgacccctgctctccactcaccactgatgtctgtgacaaatgcaatctcagggctgactgcagttggtgggttggcactgatgggaggacatttgtatccttccacaacttctcagggccttgctgctcttgctgcattcatatcctctgtcaacattgcaggtggctttctggtgactcagagaatgctggacatgttcaagcgtcccactgaccccccagaatacaactacctgtacctgctccctgccggcacctttgttggtggatatttagacgaccctctgacagtggttataacattgaacagatcatgttacctaggctcgggtttgtgctgtgtcggtgccttggctggcctctccacccagggaacagcacgtcttgggcaatgcactgggcatgattggggttgctggaggactggcagccaccctcggagtcctaaaaccgggcccagaattactagctcagatgtctgggagcgatggctttggggtgggtaccattgggatttgacaatttgccaaacgcatccagattttcttgattttacctcaattagtttgctgctttttcacagtttagtggggttttggcagctgttacttaactttgcatagctgagttacattatagaatatccacattttgctacggatgcagcagcaaatctcaccaagattgtggcctacctcggcacttacattggtggcgtcacctttagtgggtctctcattgcctatggaaaattgcagggtctcctgaaatctgcccctctcctactgcctggaaggcacttactcaatgcaggcttactggctgctagtgtgggcgggataatcccattcatggtggacccaagctttactactggcatcacctgtctgggttcagtgtctgctctctctgctgtcatgggtgtgactttgacagctgctattggggggtgctgacatgcccgtcgttatcactgtgctgaacagctactcaggctgggccctgtgtgcagagggcttcctgctcaacaacaatctgctgaccatcgtgggtgcactcataggctcgtctggtgctatcctgtcatacatcatgtgtgtggcagggaatcgctccctggctaatgtgattcttggaggctatcgcaccacttcaacagctggtggaaaacccatggaaatttctggcacacatacggaaatcaaccttgacaatgcaattgacatgattcgagaagctaatagcattattattacaccaggctatggtctctgtgcagccaaagctcaataccccattgctgatttggtaaagatgctcactgagcaaggcaaaaaagtcaggtttggaattcacccagttgcgggccgaatgcctggtcagcttaatgtgctgctggctgaggctggtgtgccatatgacattgtgttggaaatggatgagatcaaccatgattttccagatactgatttggtccttgtaattggagctaaggacactgctaattacaacagctcaaggaagatcccaactctatttattggcagggcatgccagtccttggaggtctgaaaatcaaagcaggtgattgttatgaagaggtctttgggtgttggctatgctggcagtgggacaatcccaatcttctacaaacctaacacggccatgcttcttaggtgatgccaagaaaacatgtgacgcgctccggggaaaagtttaggagaatcctttcagaagttaattttaagggttcaagctgtttagctaattattgccacctttgcagttttgggaacaggcaaataaagtatcagtatacatgggtgatgtacatctgtagcaaaagctcttggagcaaaatgaagacttgaagaaagcaaagcaaaaactgtatagagagatttttcaaaagcagtaatccctcaatttttaaaaaaaggattgaaaattctaaatgtctttcctgtgcatattttttgtgttaggaatcaaaagtattttataaaaggagaaagaacagcctcattttagatgtagtcctgttggattttttatgcctcctcagtaaccagaaatgttttaaaaaactaagtgtttaggatttcaagacaacattatacatggctctgaaatatctgacacaatgtaaacattgcaggcacctgcattttatgttttttttttccaacaaatgtgactaatttgaaacttttatggaacttctgaggctgtccccttggcaattgcaacccgcagtttgaatttaatcatatcaaatcagttttaattttttaaattgtaccttccagagtcctatatttccaagggcacattttcttcactactaattttaaatacattaaaggcctaaataatctttcagagatgctggaaacaaatccatttgcctttatatgtttcattagaataccaatgaaacatacaacctggaaaattagtaaatagtatttttgaagatccccatttcctaattggagatctcctttaatttcgatcaacttataatgtgtagtacctatattaagtgcacttgagtggaattcaacatttgacctaataaaatgagttcatcatgttggccaagtgatgtggcaattatctctggtgacaaaagagtaaaatcaaatatttcctgccctgttaccaaatatccaaggaagaccctgctactatgaaatagatgacattaatctgtcttcactgtttataatacggatggattttttttcaaatccagtgtgtgttttgaggtcttatgtaattgatgacatttgagagaaatggtggttttttttagctaccctctttgttcatttaagcaccagtaaagatcatgtctttttatagaagggtagattttctttgtgactttgctatcgtgcctaaagctctaaatataggtgaatgtgtgatgaatactcaaaa

SEQ ID NO: 121745 - DNA, 378 bp, Homo sapiens
  misc_feature (1)...(378): n = a,t,c or g
ggaattccccgccaccatccaatcaaatcgggcgaggggcgcgaagcccgggagacgcgtagaccgcggcccccaggcccggtgttttgacgtcggcggctgcccgcgttccgcgccgagtaacggtcttcggaattcagagccttcgccttagggaaggtgggacggtcgccagtttctccagcactttcttcgtccagggacgtcaacctcccttgcatgctgtcctcagggactgacagcggggcctgctcagaagttctcgtcgggactctctacaggcctttgtgattaagtgctaggggtgaggagagacgtggcttatttatgtgtttttcagtttgttatgannnnnnnnnnnnaattttacttcccccg

SEQ ID NO: 121746 - DNA, 522 bp, Homo sapiens
tcattcacagtgtctggaatatgttaagctccggatgtaaggctggtaagtagcgcttccacatgagctccctttctgcctctccaccaccgagacgcttatggacccagatgaacacgcaatgccttgtcttttccgcttctcatctccccagatgtcaagagatgttgttccagggaacagtctgagaaaagccccattctcctcgctgcttctcacctgccaagaagccccggcccgcaggtgcccctgctgcttcgcacaaatgcaggtgaccccatgaccagggcctccctcggagcccacagttcttctgacaaagccccgcttgttggaaacgctgagtctcagagagtcgccagtccttctggccccccagctccctgctctccagttgtgctggccaggaacatacaaggccattcccgcctctgggactgttgctcctactcctctgtctgctgggaccactgacatgacaaggctctgcccactctccctggagtttctgctcaatgacat

SEQ ID NO: 121747 - DNA, 1101 bp, Homo sapiens
  misc_feature (1)...(1101): n = a,t,c or g
ctagggctggggccgggcggagtgagcgggccgtcgcagaggagagctgaggcggcctgagcggcagctgcggccggcacaaccccgggcagtcgcggctccagaggcgtccttctcaggatgttgaacttgaagactgttgccgcggttgttgaagcggaagcctttggcttcggacgttgcgcccgaagagacccgcccccttcggcggcttctcagttccggcttcttccgcggcttcaattccgaccggaagcgcggttgttcagcccgggccccttccgggcccaacgggcaaaagcccacccgtttttgcagggtccggcccttccagcaatccccaaccggctttttcccaatatgcggacgcgcgacggttcgaagcccggttccgcccctttgcccccttgacgcctccgttggaacccccggccggccttcgcgccccttcttcgggggtctccccgcttcttcccgccaccatccaatcaaatcgggcgagggcgcgaagcccgggagacgcgtaggccgcgcctcccaggcccggtgttttgacgtcggcggtgccgcttccgcgccgagtaacggtcttcggaattcangagccttcgcccctgctgttcgcacaaatgcagtgaccccatgaccagggcctccctcggagcccacagttcttctgacaaagccccgcttgttggaaacgctgagtctcagagagtcgccagtcccatggtgggtgaaatttgaacccatgtcgttgagagacacggcggcttttaaggcaaggataacctggaaatcagccgccaatatttcgaagccatcggccgtatccaagagccgcctcgcgagtggagcgctaggattcaggtccagatctgactgggaagttccgcagggaattccgccccggacccctggagacccacatcgtccggtgtgttttcctttcacaacacttcccacagccactggattctcaggctccgcactcaggaaaggttcagcgaggtttgtgttcagggaacttagggaagaaagggccactgtcccacctcttttcttagggaatttccggggggaaagattttcatcctccat

SEQ ID NO: 121748 - DNA, 237 bp, Homo sapiens
cccccaaaaagtctcgtgtgaggttcagtaatatcatggagattcgacagcttccgtcaagtcatgcattggaagcaaagttgtctcgcatgtcatatcctgtgaaagaacaagaatccatactgaaaactgtggggaaacttactgcaactcaatggtttttggcaaatttgtcatatcaagaagcactttcagacacacaagttgctatagttaatattttatcttcaacttccg

SEQ ID NO: 121749 - DNA, 186 bp, Homo sapiens
cacaaccacaggaactctgagagtactgttccaataaggccattaatgataatgcacattaatactactttattgggaaactcgaagtcctcaaatccagtataatgaagtaaaaagaaacctactgtgtctcttccagcaggtttttcagaccctgccaggtttaccagtacaacgcctccaatg

SEQ ID NO: 121750 - DNA, 2375 bp, Homo sapiens
  misc_feature (1)...(2375): n = a,t,c or g
caagaatccatactgaaaactgtggggaaacttactgcaactcaagtagcgaaaattagcnnnnnnnnnngctttggggggtttttggcaaatttgtcatatcaagaagcactttcagacacacaagttgctatagttaatattttatcttcaacttccggactttttaccttaatccttgctgcagtatttccaagtaacagtggagatagatttaccctttcgtgagaactattagctgtgattttaagcattggaggcgttggactggtaaacctggcagggtctgaaaaacctgctggaagagacacagtaggttccatttggtctcttgctggagccatgctctatgctgtctatattgttatgattaagagaaaagtagatagagaagacaagttggatattccaatgttcctttggttttgcaggtttgtttaatctgctgctcttatggccaggtttctttttacttcattatactggatttgaggacttcgagtttcccaataaagtagtattaatgtgcattatcattaatggccttattggaacagtactctcagaggttcctgtggttgtggggctgctttcttacctcatcattgataggcacacttgcactaagccttacaatacctctgtccataatagctgacatgtgtatgcaaaaggtgcagttttcttggttattttttgcaggagctatccctgtatttttttcattttttattgtaactctcctatgccattataataattgggatcctgtgatggtgggaatcagaagaatatttgcttttatatgcagaaaacatcgaattcagagagttccagaagacagcgaacagtgtgagagtctcatttctatgcacagtgtttctcaggaggatggagctagttagctgtctgttgtctgtagcccagcttgataatggaactatacagccgaagagacaatctctggcaagtttttgtagaaaaaatgtttcagtgcctagtctgaaaaataacagtttgagttctttgaaactctaaaatatatttttctcatacctgttttcttcattttcataatgaagcactttgctatgtagctgtgtacatatcactacagttataggaagtttcagtctacagtccatccaaaggaccaacctgccttacacatctcaagggattcagcttgttgaaatcatttgaactaatcaaggaataaatcctaatgttctggggactttattttcacatgttaaatgctgggaatatattatggaaaatgtttttcaaggaaatcacttaagtgttcataggaccagtatttctggacaggtaaaatgctaaaataagctacctgtaataagtgtggattatatttttgggttttgtagaatattgcaaattaacccaccaccaaaaaaatgtttaatttatgccaaccaaggcatggtttggtgcaaaatttccatgggacttttaaaaaaggaataagtatttgagaaatattctgggttccctcacactacatttacctgtattattcctttatagcattagggtgccctgtattttaaaatcctgtgacaaaccatggcaaatttttaaaggggaagtattattataaaatgaagaaatatgtatttctaaaggctatattgctgtaaacttaattgataaagctctgtttaatttagagttttgaagaaatagtctcccttcaattaagaaattttcataatggaatgatttaaattgaagtgacaaagagtattattaaaatacaatgtttatacgtctatttgtgtactgtagatgtatcaagtgatttctaatttttttcacatatgaatgtgccagattactctagaactagatgtctcttctttaaataattttagttttcctggaataaatttgtaatggttaaagtaccaagtaagtaaggcgagaagggattctgtttttaaaatcacatcagaacttttcctctactaagattataaattaaatgtaaaatactcctaattgcaattcttaaacttaggccttacatgtacttattatgcaactgcttctggactttatttcaccatagatatcagtaaacgtatgtcccaggattcacaggcttttgattaatcaatattcttttcaagtttgctgtgaagagtttagttctcttcaaaatttcttaactaatctgatttttaggaattctctttgcagtgtttagcttcctattcacattcttaaaattgctttggtgttaccatgagtctaaaatgaagtttagccttccttttgtttcattctgagaacttctatattatattacctttaaaaattgtttatgatattaaatttaaaatacaaac

SEQ ID NO: 121751 - DNA, 422 bp, Homo sapiens
ttcctagcgctgctggcaggcgcacatgcagagttcccaggctgcaagatccgcgtcacctccaaggcgctggagctggtgaagcaggaggggctgcgctttctggagcaagagctggagactatcaccattccggacctgcggggcaaagaaggccacttctactacaacatctctgaggtgaaggtcacagagctgcccccacaccgtccacagcagctgtctgagccctcaatccccaagctggcagctgtcattcaggaccccaacccctctcagcccctcttttcccacattcatagcctgtagtgccccctctaacccccagtgccacagagaagacgggatttgaagctgtacccaatttaattccataatcaatctatcaattacagtccgtccaccaccaaaaaaaaaaaaaa

SEQ ID NO: 121752 - DNA, 500 bp, Homo sapiens
agttcccaggctgcaagatccgcgtcacctccaaggcgctggagctggtgaagcaggaggggctgcgctttctggagcaagagctggagactatcaccattccggacctgcggggcaaagaaggccacttctactacaacatctctgaggtgaaggtcacagagctgcaactgacatcttccgagctcgatttccagccacagcaggagctgatgcttcaaatcaccaatgcctccttggggctgcgcttccgaagaaccggcctgctgatgtcagggcgtccactgcccccacaccgtccacagcagctgtctgagccctcaatccccaagctggcagctgtcattcaggaccccaacccctctcagcccctcttttcccacattcatagcctgtagtgccccctctaacccccagtgccacagagaagacgggatttgaagctgtacccaatttaattccataatcaatctatcaattacagtccgtccaccaccaaa

SEQ ID NO: 121753 - DNA, 963 bp, Homo sapiens
atgagtgaggccacgtcagtggttgatgtcgaccctggccctaggcccattgatatgactggtcatgtgtctgcagaacggagccccccacctgatgggcagtggggcagtcagctcctggcgcggcagctgcaagatttctggaagaagtcccggaacaccttggcaccccagcggctgctcttcgaagtgaccagcgctaacgttgtcaaggacccgccctccaatacgtggtttgtcgatagcaccgtaatgttgaataccacagacgatcgtttaaggagcaatcttagactcaagtacagaagccatctgacaggaaatagactacagtcgcagaagtgtgaccgccgggggcgatggcgctcccggctcctgcaccggctgcggcacgccttggccggcgacggccccggggaggcggcggccagtccagaggccgagcagtttccggagagctcagagctggaggacgacgacgccgagggcctgtcctcccgactcagcggcaccctcagcttcaccagcgccgaggacgacgaggacgacgaggacgaggacgacgaggaggctggccctgaccagctgcccctcggggatgggacatggaggaagggggccatgacccaagttattaaaaattttaagacagtgacggcagagccttacaccaagctcatggctttcctgaatgtggggggctgtgcagccgtgcagggggccttcttccccctgactgagaggaactggagcctggggaaccgggcagtggagccccagctgcaggaggaagagcggatggtgtatgtggccttctctgagttcttcttcgactctgccatggagagctacttccgggcgggggccctgcagctgttgctggtgggggacaaggtgccccacgacctggacatgctgctgagggccacctactttgggagcattgtcctgctgctgctgtga

SEQ ID NO: 121754 - DNA, 1497 bp, Homo sapiens
gcaagatccgcgtcacctccaaggcgctggagctgggtaaggcgcaggggcagacagggacggacgggagcggacggggttggggtcgccccaacagtgggggcaaagaaggccacttctactacaacatctctgagtaagtggggggcggggcctcgcgatccggggcggggcctcggcggtggaggcggggcccgagaatgcttcaaatcaccaatgcctccttggggctgcgcttccggagacagctgctctactggttcttgtaaggacccagcaccctcaggggagtggagagtgggtcaggagggctggaggtgctgtggggctcccgggatcccgctggacggatgaaagtgtccaatgtctcctgccaggcctctgtctccagaatgcacgcggccttcgggggaaccttcaagtaagccccagccccaaccccagctcacccttttcgagccccacagctcatctgcctagcgcaagtgtgggcagcgacaggtcgcagggtggcaagggtgggcatgctctcactttgagaaggccctggtgagttggtggcgggtgagtctgggtgtgcagctgtcatgcagcacctcagagcaggccccttccgagccctgctgttcaccagcaacctggacatggacttccgggtgagctgcttgggctggtgtatgacctctgacttcctaacaagacctctttctctgctaagtttgcaggaggaagagcggatggtgtatgtggccttctctgagttcttcttcgactctgccatggagagctacttccgggcgggggccctgcagctgttgctggtgggggacaaggtatgtcatggcctgtttgtgggatgggcaagagaaggtctgtgacagagctcactccctcactgtgctggcgggggcagggatagggccacctgcacaccagtgagaccaaggaggggtgcagccatcaagccctctggcaccaccatctctgtcactgctagcgtcaccattgccctggtcccaccagaccagcctgaggtccagctgtccagcatgactatggtacgggtcccagagtgggggctgctggctgggggtcagggaaaaatgggctgtgggttactgagcaggtaggcaggcgcacttccctgcacctcagtgattggaggacaatcacacctgtccacagggatgggctgggctgggttcgtgagatcctgaccctcaccatccccccgtaaggctggggtgtgaggatggaggaagaaaggaggggtgaactgggcgggcccagactgagcgacgaaccatgcggtgagtgggggcaggatggggaaggagggagggccttcccctctctctatagctccccagtgccaccggcctgctgatgtcagggcgtccactgcccccacaccgtccacagcagctgtctgagccctcaatccccaagctggcagctgtcattcaggaccccaacccctctcagcccctcttttcc

SEQ ID NO: 121755 - DNA, 725 bp, Homo sapiens
gatggctctccgggggaaggccctgcgcacgacatcggacctgcgcaggttccgaatctattccaaccattctgcaacttggaagtcgctggcttctgaatcccattacaggcccctctgaaaaaccatgctgccagaattggggtgaatgccccaatgctcaaatgagcggaccctggcgtgggggtgcaagatccccactaccctgagggcatcaaactttgtgccatgaaggtggtgacgaacccatgcgggattccctcacccatcggggcttgatctcccacttttgccaaagggctgcgagaggtgattgagaagaaccggcctcgctgatgtcagggcgtcccactgcccccacaccgtcccacagcagctgtctgagcccttaatccccaagctgggcagctgttcatttcagggaccccaacccctcttcagcccctcttttcccacatttcatagcctgttagttgccccctctaaacccccagtgccacagagaagacgggatttgaaagctgtacccaattttaattccataatcaatctatcaattacaagtccgtccaccacctccctgtgggctgtcctgagctctgttgggtttcctgggatggaatcagtgcatcataaagggcattctttaagcagagaaggggccaggccaccccattcaggaactgctgcgggaataaagtgctaacttgcccccaggaaacaaa

SEQ ID NO: 121756 - DNA, 189 bp, Homo sapiens
tcaccacgatccctgctctggtggagcccccgtgcggaacacaggatccgaagatggcagcggaagctccgcagcggccccaaaagcgacactccaatctctccggtcttccaaggccttgctcagtcgtcctgccgggcgggccctgaggatgcaagggacggaggaagtttcgtgcgtgcgcccttc

SEQ ID NO: 121757 - DNA, 1599 bp, Homo sapiens
catctctgtatcttcagaattggaagaagaatgtgaggctgtactgtgggcccgttcttttgccatgtgcgagtcatggtttgactccaccactattccttctttagaatctggaggggtgtcaagtggatcagccagggaggaaacaatagggattttcttagcttggaaataatcataggccttctttccacagactagaagtgtgacattcttcccactgctctggattctatccaccaccttctcatagggttcatctagcacattcaccccattcacttcaatgatgacatcctcatcctctagcccagccaagtcagcaggaccgcccttctgtacctctttgatgaatgagcctggcagaccccgaatcgcatttaagtgaaagccatagccattttcacctttagccagcctgcagagtttaggcttatgatctacttcctctgtagtatctggtggacttgagacttccagagaagtgggagtaggagctggagcctccttgacagagccattgggcagttcttgactttgatagtagagaaatggagaaaaatgagccagtctgtacatgttgtccgtctctttgtctaccaccaacagtgaagtctgatctccaccctttctaatcatttctaccacactgtcatgatccagggtttccacagactcgccgttgacagcaactaccagatcattgttcttcaagccagcctcctctgctggacttccagaatctatgtccttgatgatttgacctttctgttctgagcctgccctcagatagaaaccatagccattgcttcctttcttcatctccacaattcggggctggtggggtaacagtttcaaactggctgtttctcttttgaattgtatcttctgctcaacatgacgcttgtcagtttctttgtccaccagcaggaacatgacacggcttcctgacttcttcaccttttcaaccactttctcatggctggcatcctctacattctctccattcacttcaatcaagtgatcatcagccagaactccagctctcatagccacaccttgaggtgtaatatcagtcatgtacaccccctttttaccttggacagttttcagagagaagccatagctgcctccttccttcacgagatagcagagccggggctgggtccaagtttgcacacctccattcatcacaggggaaagtatattatcactcaaaccttgctccttctgactttgacccaactctttcaagtccacccgtgttttcactgctttctcataggaatccccatccagaactagtaaagtcactgaattcccactctttctgaccagatccacaacctgcatatgttcttctttgtccacaaagacaccattgatcctaagaactctgtctccatcttgaaggccagccttctctgctgggctacacttctcaaccacccggaccaggtggccctcggtgtccttctcaattcgcaggaagaagccatagttttgcccttcttgcttggacagtttacattctcgggggttgaaggtggaggtcatttctggagatggaagaggacctgctctgttcgttcactcagg

SEQ ID NO: 121758 - DNA, 780 bp, Homo sapiens
ctcctagcttggcacgaggggcaaaggcctctttctgctgagacaaagtgatttggagagtcacctggcccctgaagggggagtggtaggatccagccacccagtgtgcagtgaattggagcagggatctcagcacacagggaggtggggaggctccccctaacctcgggcacctgttgctcctccagactgcagcgcatgctcttagctcatcctcttaactggctctcaccgtgctcctggctttggtcaccacgtagctctcactccagcttcaggtagccatcagtaggacctggcaatatacactgatttggtttgttttatgtttgtctgcaggtgaaatccctaagggctctgccgtgtactccagccttgtgacccttgccttccaggaaccatgcaagaagcgcagccaccagaagtccttaaaacagcaggaaagaactacaagtttataggacatggatttcagtgccctcatctggccaagcatcttcagctgccaatgcccaagtgtcttcctggtagtacacatgaagatgtcccgctctcccctgctcaaggagagagtgcctgacctgagctgggcccatcagatccagtacttacctggaataggaaaacgatggggagggtgaccaaagattgcaaaaatctttgaagcttatctacttgagagagagtccctgaagatactggcctctcattcctgctatgtatatccaatgtgactgaactctgaataaaatatacaagttctaaaaaaaaaaaaaaaaa

SEQ ID NO: 121759 - DNA, 1246 bp, Homo sapiens
tcctcagggccctcccagcaggacgactgagcaaggccttggaagaccggagagattggagcggtaagtcgcgctggtcacgttggacacctgcgcgttgggagattctggagccagaaggatagccgaatggccttcgcccgccctgcccctcgcctgcttcagaaacccccggaaacgccccggtctgcgacccgggttcgagcagccagggggctcaagggaagctgaacgcctggtgggctcccgggatggctcttcccgttctttgcacagccttcacccagtgagggagcctgtgccctccctgcccagtcgcttttggggccgctgcggagcttccgctgccatctttcggatcctgtgttccgcacgggggctccaccagggcagggatcgtggcaatataaagtcctggttcacgctcaggaacgagagctgacccagttaagggagaagttgcgggaagggagagatgcctcccgctcattgaatgagcatctccaggccctcctcactccggatgagccggacaagtcccaggggcaggacctccaagaacagctggctgaggggtgtagactggcacagcaccttgtccaaaagctcagcccagaaaatgacaacgatgacgatgaagatgttcaagttgagttggctgagaaagtgcagaaatcgtctgcccccagggagatgcagaaggctgaagaaaaggaagtccctgaggactcacaggaggaatgtgccatcacttattcaaatagccatggcccttatgactccaaccagccacataggaaaaccaaaatcacatttgaggaagacaaagtcgactcaactctgattggctcatcctctcatgttgaatgggaggatgctgtacacattattccagaaaatgaaagtgatgatgaggaagaggaagaaaaagggccagtgtctcccagaagcccgaggaaacgccctcgtccgcgacccgagccgccgcctcgaggctcaggggaagctgaacgctcggtgggctcctgggatgcatcttcgcgttctttgcgccgccttcacccactgagggagcctgtgcccaccctgcccagtcgctttcggggccgctgcggagcttccgctgccatcttcggatcctgtgtcccgcacgggggctccaccagggcagggatgatgggtagcaaggaagtcggcaaaggcggcgaccctggcgaggaaacttccccagtagctttgttcagcg

SEQ ID NO: 121760 - DNA, 6697 bp, Homo sapiens
tgttgcttgagaaacttcgccagcgaatacatgataaagctgttgctctggagcgggctatagatgaaaaattctctgctctagaagagaaagaaaaagaactgcgccagcttcgtcttgctgtgagagagcgagatcatgacttagagagactgcgcgatgtcctctcctccaatgaagctactatgcaaagtatggagagtctcctgagggccaaaggcctggaagtggaacagttatctactacctgtcaaaacctccagtggctgaaagaagaaatggaaaccaaatttagccgttggcagaaggaacaagagagtatcattcagcagttacagacgtctcttcatgataggaacaaagaagtggaggatcttagtgcaacactgctctgcaaacttggaccagggcagagtgagatagcagaggagctgtgccagcgtctacagcgaaaggaaaggatgctgcaggaccttctaagtgatcgaaataaacaagtgctggaacatgaaatggagattcaaggcctgcttcagtctgtgagcaccagggagcaggaaagccaagctgctgcagagaagttggtgcaagccttaatggaaagaaattcagaattacaggccctgcgccaatatttaggagggagagactccctgatgtcccaagcacccatctctaaccaacaagctgaagttacccccactggccgtcttggaaaacagactgatcaaggttcaatgcagataccttccagagatgatagcacttcattgactgccaaagaggatgtcagcatacccagatccacattaggagacttggacacagttgcagggctggaaaaagaactgagtaatgccaaagaggaacttgaactcatggctaaaaaagaaagagaaagtcagatggaactttctgctctacagtccatgatggctgtgcaggaagaagagctgcaggtgcaggctgctgatatggagtctctgaccaggaacatacagattaaagaagatctcataaaggacctgcaaatgcaactggttgatcctgaagacataccagctatggaacgcctgacccaggaagtcttacttcttcgggaaaaagttgcttcagtagaatcccagggtcaagaaatttcaggaaaccgaagacaacagttgctgctgatgctagaaggactagtagatgaacggagtcggctcaatgaggccttacaagcagagagacagctctatagcagtctggtgaagttccatgcccatccagagagctctgagagagaccgaactctgcaggtggaactggaaggggctcaggtgttacgcagtcggctagaagaagttcttggaagaagcttggagcgcttaaacaggctggagaccctggccgccattggaggtgcagctgcaggggatgacaccgaagatacaagcactgagttcactgacagtattgaggaggaggctgcacaccatagtcaccagcaacttgtcaaggtggctttggagaaaagtctggcaactgtggagacccagaacccatctttttcccctccttctccgatgggaggggacagtaacaggtgtcttcaggaagaaatgctccacctgagggctgagttccaccagcacttagaagagaagaggaaagctgaggaggaactgaaggagctaaaggctcaaattgaggaagcaggattctcctcagtgtcccacatcaggaacaccatgctgagcctttgccttgagaatgcggagctgaaagagcagatgggagaagcaatgtctgatggatgggagatcgaggaagacaaggagaagggcgaggtgatggttgagactgtggtaaccaaagagggtctgagtgagagtagccttcaggctgagttcagaaagctccagggaaaactgaagaatgcccacaatatcatcaacctcctcaaagaacaacttgtgctgagtagcaaggaagggaatagtaaacttactccagagctccttgtgcatctgaccagcaccattgaaagaataaacacagaactggttggttcccctgggaagcaccaacaccaagaggaggggaatgtgactgtgaggcctttccccagaccccagagccttgaccttggggctaccttcacagtggatgcccaccaattggataaccagtcccagcctcgtgaccctgggcctcagtcagcgtttagcctaccagggtccacccagcacctgcgctcccagctgtcacaatgcaaacaacgctatcaagatctccaggagaagctgctgctatcagaagccactgtctttgctcaggctaacgagctggagaaatacagagttatgcttacaggtgaatccttggtgaagcaggacagcaagcagatccaggtggacctccaggacctgggctatgagacttgtggccgaagcgagaatgaggctgaacgggaggaaaccaccagtcctgagtgtgaggagcacaacagcctcaaggaaatggtcctgatggaggggctgtgctctgagcagggacgccggggctcaacactggctagttcctctgagaggaagcccttggagaaccagctagggaagcaggaagagttccgggtatatggaaagtcagaaaacatcttggtcctacgaaaggacatcaaagatctgaaggcccagctgcagaatgccaacaaggtcattcaaaacctcaagagccgggtccggtccctctcagttacaagtgattattcgtctagtctggaaagaccccggaagctgagagctgttggcaccttggaggggtcttcacctcatagtgtccctgatgaggatgaggggtggctgtctgatggcactggggctttctactctccagggcttcaggccaaaaaggacctggagagtctcatccagagagtatcccagctggaggcccagctcccaaaaaatggactagaagagaagctggctgaggagctgagatcagcctcgtggcctgggaaatatgattccctgattcaggatcaggcccgggaactgtcttacctacggcaaaaaatacgagaagggagaggtatttgttatcttatcacccggcatgcaaaagatacagtaaaatcttttgaggatctcctaaggagcaatgacattgactactacctgggacagagcttccgggagcaactcgcccagggaagccagctgacagagaggctcaccagcaaactcagcaccaaggatcataaaagtgagaaagatcaagctggacttgagccactggccctcaggctcagcagggagctgcaggagaaggagaaagtgattgaagtcctgcaggccaagctggatgctcggtccctcacaccctccagcagccatgccttgtctgactcccaccgctctcccagcagcacctctttcctgtctgatgaactggaagcctgctctgacatggacatagtcagcgagtacacacactatgaagagaagaaagcttctcccagtcactcagattccatccatcattcgagtcattctgctgtgttgtcttctaaaccatcatcaaccagtgcatctcagggggctaaggccgaatccaacagcaaccccatcagcttgccaactccccagaatacccccaaggaggccaaccaggcccattcaggctttcattttcactccatacccaagctggctagccttcctcaggcaccattgccctcagctccatccagcttcctgcctttcagccccactggccctctcctccttggctgctgtgagacaccagtggtctccttggctgaggctcagcaggagctacagatgctgcagaagcagttgggagaaagtgccagcactgttcctcctgcttccacagctacattgctgagcaacgacttggaagccgactcttcctactacctcaactctgcccagcctcactctcctccaaggggcaccatagaactgggaagaatcctagagcctgggtacctgggcagcagtggcaagtgggatgtgatgaggcctcagaaagggagtgtatctggggacctatcctcaggctcctctgtgtaccagcttaactccaaacccacaggggctgacctgctggaagagcatcttggtgaaatccggaacctgcgccagcgcctggaggagtccatctgcatcaatgaccgcctacgggagcaactggaacaccggctgacctctactgctcgtggaaggggatccacttctaacttctacagtcagggcctggagtccatacctcagctctgcaatgagaacagagtcctcagggaagacaatcgaagacttcaggctcaactgagtcatgtttccagagagcactcccaggaaacagaaagcctgagggaggctctgctgtcctctcgatcccaccttcaagagctggaaaaggagctggagcaccagaaggtggaaaggcagcagcttttggaagacttgagggagaagcagcaagaggtcttgcatttcagggaggaacgtctttccctccaggaaaacgactccagtgggccttgcctctccctggtcagactgcagcacaagctggttctcctgcagcaacagtgtgaagagaaacagcagctctttgagtccctccagtcagagctacaaatctacgaggcactttatggcaattccaagaaggggctgaaagcttacagcctggatgcctgtcaccaaatccctttgagcagtgacctgagccacctggtggcagaggtacgagctctgagagggcagctggagcagagcattcaggggaacaattgtctgcgactgcagctgcaacagcagctggagagcggtgctggcaaagccagcctcagcccctcctccattaaccagaacttcccagccagcactgaccctggaaacaagcagctgctcctccaagattcagctgtgtcccctccagtccgggatgttggtatgaattccccagctctggtcttccccagctctgcttcctctactcctggctcagaaacgcccatatttcaacagagcaaatggcttgggtttggatacttctccagtaatgaagacccctcccaagctagagggtgatgctactgatggctcctttgccaataagcatggccgccatgtcattggccacattgatgactacagtgccctaaggacagcagattgcgggagggcaagctcgctggtcaaaaaagatagtgtctcttgtgagatcagcgtgcagctttcccgggccttgaagcccaaggcacagaggtgcttagggcaggcaaaggtatttcatgagctttcgggaggcaggcaccagttgcccttgcaccatgccctagaggagtcggcttccctcctcaccatgttctggagagcagccctgccaagcacccacatccctgtgctgcctggcaaagtgggagaatcaacagaaagggaacttctggaactgagaaccaaagtatccaaacaggagcggctccttcagagcacaactgagcatctgaagaacgccaaccagcagaaggagagcatggagcagttcatcgtcagccagctaaccagaacacatgatgttttaaagaaggcaaggactaacttagaggtgaaatccctaagggctctgccatgtactccagccttgtgacccttgccttccaggaaccatgcaagaagcgcagccaccagaagtccttaaaacagcaggaaaggtgggcctgtcccccttttgtgcagctacctatctgctgaggagcatctgggcctcattcctccaagtccacgggagggtccagaagagggagtcagagatgtatcctggtggagctgggagaaaggcagaaagcctttctgacagctatggaatacgattagccaaggtccacttggcccagcactaagaaaaagatgcgtagtttgcacagaaggttttgtgatcctgcctctcaacagccccagcagcttgggaactagcaagagcacatttcttgcctcatcagctgtcctgagatggaaaactcagtggatataggaccctgattccgatgaaaggggcacgtggtcccaatgctggagctcctctggcaggttctaaaagcacactactgagcagcggtgccctgccggacactgctggcgggggctcagtgagcactactcacagatccacacctgaccctgttgggtcgagtcaggctgggccttggtctgcactgtagcacctgtgttctttgagttcacatcatgaatgtggtgacttcccagataccatctcaggcttaacctagcacatcctatttcttttcttctatgatatccaaattggactgacctcacttcaaagttgctgtcccattttgtcaccctatcttatctcggggaaattgcagactgatggccagaccaactctgttgaaattcttgcatagagcaaacctgtgctcatttttaagtggcatgggagaggcccccagcctagtaaagcctagtctgtgtcttcacagtgctggtagaatgtgtttgtgtgtataaatatatgatatagatttatatatgttgctaacgccatatattgaaggccaacataactggtggacagggtgggtgacagaaaatgaaagcctttttggtgattgttaaagcaagatgtgtataaagaaataaatagtttttctttc

SEQ ID NO: 121761 - DNA, 1098 bp, Homo sapiens
atgaagaaaggaagcaatggctatggtttctatctgagggcaggctcagaacagaaaggcttgggtttggatacttctccagtaatgaaggcccctcccaagctggagggtgatgctactgatggctcctttgccaataagcatggccgccatgtcattggccacattgatgactacagtgccctaagacagcagattgtggagggcaagctgctggtcaaaaagatagtgtctcttgttgtggatctggtcagaaagagtgggaattcagtgactttactagttctggatggggattcctatgagaaaagcatgaaaacacgggtggacttgaaagagttgggtcaaagtcaagaagagcagagactagggctcagcagggagctgctggatgagaaagagcctgaagtcttgcaagactcactggatagatgttattcaactccttcagtttatcttggactgactgactcatgccagccctacagaagtgccttttacgtattggagcaacagcgtattggcttggctgttgacatggatggtgaaatccctaagggctctgccatgtactccagccttgtgacccttgccttccaggaaccatgcaagaagcgcagccaccggaagtccttaaaacagcaggaaaggctggggggcaagaaccaggttgactgtagaggatcccctgagggagcctgtgcccaccctgcccagtcgctttcggggccgctgcggagcttccgctgccatcttcggatcctgtgtcccgcacgggggctccaccagggcagggatgatggcttgggtttggatacttctccagtaatgaaggcccctcccaagctggagggtgatgctactgatggctcctttgccaataagcatggccgccatgtcattggccacattgatgactacagtgccctaagacagcagattgtggagggcaagctgctggtcaaaaagatagtgtctcttgagcctgtgtggcggtgggaggaagtagtgttctgtcctgatgcctgcttgcggcctcgaaggcgatttgaatctgccttcaggaacaatcgccgtcttcgtgcggtgtctcgttga

SEQ ID NO: 121762 - DNA, 5994 bp, Homo sapiens
tctaagtcacagtctctattttagcaacacagtagtcactttgggcacaaagaatggcctaacatcttacaatgggcctgttttcttctgcagagaggggcttcatccgtccagcaagaactgatgcttagatgtgctgtctctaaaatttctttcgcatccttgtcaatcttcttgtcttttgtctcatagcactgccagcggaacacaacaggagagcactgtgaaaagtgtctggatggttatatgataaaaagttaagacagtctctttggtgatgtatggaattgacttccaatatttgcttccaattttagttttgcagaattataaaagtaggggtttgtcagggactatcataagtaaacttttgtatgctcattttgttaaatccatagggtccagagtttgtaggaaagaagattaaaaggaagaaaaaccatgatgctaaatatttaaatgtgtgatattcctcttcagatgtgctcccggttactatggaaaccccttactcattggaagcacctgtaagaaatgtgactgcagtggaaattcagatcccaacctgatctttgaagattgtgatgaagtcactggccagtgtaggaattgcttacgcaacaccccaggaaaatattgccatattttaagcattaagaagtgcatttctcgtctcttgtttttgtttcccacagtgtgcaactgcgggggaggcccatgtgagttacactaggaacaaaacttttggtttaaaaactattttaatagtaggcatcccctcccccaaacagatgtatcttggtgttctgctaaaacggcctgcctttagcatgcttttgacttgtgattctgaagaaatgtttcacctccaggctgtgataagtgcgtctgggacctgactgatgcactgcggttagcagcgctctccatcgaggaaggcaaatccggggtgctaagagttttatgtacattttttaaaacctggtgtgcccattgactattctcaaaacacattcttctgcagacaaaattgtcagaaagagaaaaccaatacgccctaagaaaacccaaatctcacaagttacatccacctagctacgggttttgtctgaacttccctttctaaattctccagccttctactgggaagtcctacagccctttcccaccacttatgtctgggattcccctaaaggatgcccatccatctgtgttcataaatacccagtgctcaaaagatgctccctttggtgctgctgatcttgtcccctatctgtgcttatacaacattcttttctcatacatttaatctagcctttatacggattatttgtaggaaaatcaagcctccagaaaaggacaacttgttcagaaggaatgctcccttgcatttctagtgcctggtcatctctccctgctgccttgtttcaccatgttcttcctttcagagatcaacaacaagatgctctattatggggaagagcatgaacttagccccaaggaaatctctgagaagctggtgttggcccagaagatgcttgaagagcaaaatgctgggaggaatggaagcgaacaggagaaagccacactgagcctttatctccatttcttcccagtactgagccaggctgagagctggcagcggctgcacaatgagacccgcactctgtttcctgtcgtcctggagcagctggatgactacaatgctaagttgtcagatctccaggaagcacttgaccattactgctctccccaacgctttccctaaagacatattcacttcactctcccttactcttccttcccgcagaaacaacaggaaagagtgagggaacaaatggaagtggtgaacatgtcttttggtgcctaggaaaaatgttttaagttcttctaaattcaatgtatttattaaaatttttttctttagaatgcgtcagggatttatgcagaaatagatggagccaaaagtgaactacaagtaaaactatctaacctaagtaacctcacaagcattaaacatggccccattccccaagaaggtaagaaggagaaataacaatgtttgtttattaacaggaagttgcacagttcagatatgaacgggctggtacagaaggctttggatgcatcaaatgtctatgaaaatataatccttcaactatgaatagctgatttcttctgctgtcatttttaccctcttctctcaattcctttgtaggcggtgagtgggattgatactcaaatcaagtcactcacaagcagtattacaagtgttctgcaattctgtacctcgaattttaaatgctactttccagaattgttgatctatgttcagagtattcagaatactgcaaatactgcagatgactgcatcgtacaaatgagaagtttccttgttgaaatggaatccttttcgaggcatcttggctccactagtacttctttctgctgctcttccacaggcagtgatgaagcagtggctgacactagcaggcgtgtgggtggagccggggtgttaatgttccccaacaaatatccggcttctctgcaaagtgaatgaccctgtgctctgtgtaaaggggatgcccagcagcgcctggggcagtctagactgatcaccgaggaagccaacaggacgacgatggaggtgcagcaggccactgcccccatggccaacaatctaaccaactgtctacatctgattcttgaaatataatattgagttattttcttaaatgattaatttttattaactgcagtaagaaatctgaccgaggttgtccctcagctcctggatcagcttcgtacggttgagcagaagcgacctgcagggaagcacgggaaagcactctgcccatttctgcaaagcacttttaatgaaaccgttgtgtcactccagatccaagtctccatgatgtttgatggccagtcagctgtggaagtgcactcgagaaccagtatggatgacttaaaggccttcacgtctctgagcctgtacatgaatcctttaaaaaagatgatgttcattcttatgaattttatttaaatgacttcttacttcttgatatttcaggccaaaaaagagtatatgggtcttgcaatcaaaaatgataatctggtatacgtctataatttgggaactaaagatgacattttgacatttaaaaagtattttctatgaattatataataacaagtgaaaattatttatctcaatagggtgggaaaacatggaaaggtgtttttaacagtcccgagtctaagtagcacagcagaggaaaagttcattaaaaagggggaattttcgggagattgtctgttctgtgatgtctgagtaaaatatgaccatgagacaagtggttttactttttctattgcatagctccctaccagcttaaacctgcctggctttgttggctgcctggaactggccactttgaataatgtaaaagggcttcacttgaaaagcataacagaaactgtagtgttcaaatgaccgttgtgtttccatttcagagataagctggccttcactcagagtcgggctgccagttacttcttcgatggctccggttatgccgtggtgagagacatcacaaggagagggaaatttggtcacaaattcagctaaatctgactctactcgcataacagatgttcctatcttacaattcctttctctcctcagagtatgtttttcagactggaaatgcgcaatggttacctacatgtgttctatgattttggatttatatagaagtcatcaaagaactgaatattaaatagttaatcaaggcttactatatattatctctcccagatctcaatcatttaccacaatgataagaaaatgatcttggtagttgacagaaggcatgtcaagagcatggatatccatagcctacatatgcagggtaacatcatcatcatggctgtatcagtgaggctgactttcttttccagggccctcagagcacaccttcccctagatatcaacttcagaggatgcatgaagggcttccagttccaaaagtgaaacattgatagttttaagcatttgataattctcaaaaacactatctccacttgttctggcacacagatatctcgcagagcatatttcaatggacagagcttcattgcttcaattcagaaaatatctttctttgaaaatgttgaaaacatttccgtcttttggatccctagactccctacttacatgcctgtgcttgcatttcagtcagacgtgttctccatctcactggataatggtactgtcatcatggatgtaaagggaatcaaagatccaacctagagtgggtcaaggtaaaatgctagctctgtggtatgtaaagaagcctttttcttttgcagatatgaactgatagtagataaaagcagagttgggagtaagaatcctaccaaagggaaaatagaacagacacaagcaagtgaaaagaagttttacttccataatattcatcatgtaattctgaacaatatttttaatatttattttttcctctgttacaaacacagggtggatagagatgtggaggttgaagatttccaacggtatactgaaaaggtccacacttctctttatgagtgtcccattgagtcgaggacatcacaaattactttttgctgctagtatgtcacttttatcccttaatttggtttacttttatagggagggaaaagtaaagatgcaccttcatgggatcctgttgctctgaaactcccagagcggaatactccaagaaactctcattgccacctttccaacagccctagagcaatagagcacgattttaagaagttagagattatcctcagtctcattttacatatggtaatccctttcttttcatttaccagatctcagttttccattcgtctgagaactcgttcctcccatggcatgatcttctatgtctcagatcaagaagagaatgacttcatgactctatttttggcccatggccgcttggtttacatgaggaaacacagccttttctgcaatcttggaatgtacctgagatgtgctattgtccttctcttcatccaggtgatatttattcgagaaaggagcagtggccgactggtaattgatggtctccgagtcctagaagaaagtcttcctcctactgaagccctcattttgcttccccttggtgcatttgtgttgagaaaattgattttaagaaatatcttcttccctcagattaactccatctacagttttagtggctgtctcagcaatctccagctcaatggggcctccatcacctctgcttctcagacattcagtgtgtacaaaatcacaccatagttacaaatatgatcttgctgttcttgggagtttatagtgtttctctccacagatgaatctttcaatattggattgaagtttgaaattgcatttgaagtccgtcccagaagcagttatttaagaaattcagttttatcacaatgaggacaaactaaatcatacaatgtgtcctatcttttgcaggtcatagtgaaagtcaataatggcatagtctttctcaggttaaaaattcatcactccagtgccacttatgaccagtctttgccctgcatttcagttattagagattctaatgtggttcagttggatgtggactctgaagtgaacaccaggaagtaatatttgggcttggaatacctcaattgcaatctttgtttttatttcttgctcttttcagaatctctactgacaccacgcttggcccccagcaaacccttcacaggggacacccagtgagcttcagtaaagcagccctggtcagcggcgccgtaagcatcaactcctgtccagcagcctgacatgacagagcacagctgcccaaatacaaagttctttagagcactgaaagaaacacaaagccagccaggaggaacagtaactcttccttcgggtggaagctttcatcgagttgaacaggacttaaacgaatcatcagggac

SEQ ID NO: 121763 - DNA, 935 bp, Homo sapiens
  misc_feature (1)...(935): n = a,t,c or g
accccttgctttgaaagccccaatgaacagggacttacttttcaacaaaagnaggatacgtgttnntaaatgatcttccaatatggaattgagtttgaaattgcatttaaggtcngtccaagaagcagttcgggaaccctggtccacggccacagtgtcaatggggagtacctaaatgttcacatgaaaaatggacaggtcatagtgaaagtcaataatggcatcagagatatttccacctcagttaacacccaagcagagtctctgtgatggcagatggcacagaattacatgttattagagattctaatgtggttcagttggatgtggactctgaagtgaaccaatgtggttggaccccttggaatccaaaaaccaattgatcacagggagcctgtgttaggttggaggtgttcccagaattctctactgacacccacgcttttgccccccacaaaaccctttcacagggctgcatacgcccactttgtgattgatggaccaccccagtggagcttccaggtaaaagcagcccctggtcaagcgggcgcccgtaaggcatcaaactccctgtcccagcagcctggacatggacagaagcacagctgccccaaatacaaagttcctttaagagcactggaaaaggaacacaaagccagcccaggagggacagtaactctttccttcggggttggaagcttttcatcgagttgaccagggacttaaaacgaatcatcagggaccggatatttcttatttctcatttggattcttaaccttggaatccaaagtgtctgcaatggacaacaattgaaggagtggcaaacttacttgctattgagagcacacgcaattcctactggtgaaattactgtttctgttttctaataaaatagaagggattccaaataaacacttgcacacaaaaaaaaaaa

SEQ ID NO: 121764 - DNA, 901 bp, Homo sapiens
  misc_feature (1)...(901): n = a,t,c or g
gagatggagtctcccactgtcgcccaggctggagtgcagtggcatgatctcagctcactgcaacctctacctcctgggttcaaatgattgcgtgcttcancctcccgagtagctgggactacaggtgcacaccaccatgcctgactaatttttgtgtgtgtatttttagtagagacagggtttgggccatgttggcaggctggtcttaaaaactcctgacctcaagcgatccgcccacctcagcctcctaaagtactggggattacagggcatgagccaagggcgcctggccagaaaattttaacttttcatattttaacttagcaaagcctaaagttagacaatatctttatcctgttctagagcattacaaatgaacccacagaaaaaggctatctggaacccacagaaggggccaactaggtcaggagaaggaagggggatgttggtcgcacttagaatactcaccagaccagtttaaagatgacttccgagaaactatttctacatgacagttaggcccaggcacgatgggtcaacagtgcctcactggcaggacagctgcagagggacatcagcagagaccctcagttctggagaaataagtggccgtcagagctcacctccaggtcagtcggacctgtggggaaccaatgaactgcaagcaggcacccacaagggaaatttatcaaaatattttctgatctatccagcccttctaaagctccatggaactttagttggtcaacaaaagccagcccccaactccaatctagatgcgatggtcacagccagctcaagcttgctgtccactgcacggccttataccatgtcaccaccagccctgtggaagtcccagagagtcagagatgagagcacttgtaactcaaactttcactga

SEQ ID NO: 121765 - DNA, 480 bp, Homo sapiens
atacagtcctcctgaatgtccattctgtggaaaaatagaggagcacagtgaagatatggaaactcatgtgaaaacaaagcatgccaatcttttagacattccattggaagactgtgatcaaccactctatgattgtcctatgtgtgggctcatatgtacaaattaccatattcttcaggaacatgttgacttgcatttggaagaaaacagctttcagcaaggcatggatagagtccagtgttctggtgatctacaattggctcaccagcttcagcaagaagaagacagaaagaggagatctgaagaatcaagacaagaaatagaagaatttcagaagctgcagagacaatatggtttagataattctggaggatacaaacaacaacaactacgaaatatggagatagaagtaaataggggaagaatgcctccatctgaatttcataggagaaaagctgatatgatggaatcattagctct

SEQ ID NO: 121766 - DNA, 468 bp, Homo sapiens
gcacgagaaggaagtgcttttgaatgaggtactgagggccaaggtgttggaagttcctaattctttcctcggttaactgtgaaactctgcgtattgggaaggcctggcctcagtcatcaggccaggagaggtactggacgccgcgcacgcactcgtctgccagcgaggcccaaaggggaagcctagcggagctcaatgtggcagctgctggcctctgggccgctacttgtcaataccatgctttcctgtaatatttgtggtgaaacagtaacctcagaaccagacatgaaagctcacctaattgttcacatggaaagtgaaattatatgtccattttgcaagttgtcaggtgtgaattatgatgaaatgtgttttcatatcgaaacagctcattttgagcagaatacacttgaaagaaactttgagaggataaatacagtacaatatggaacttcagataacaagaaa

SEQ ID NO: 121767 - DNA, 1862 bp, Homo sapiens
atgcactgcatagagaccggcgtggagcggcgcattctgggattacttcttttccgtgggagcctggcctcagtcatcaggccaggagaggtactggacgccgcgcacgcactcgtctgccagcgaggcccaaaggggaagcctagcggagctcagtgtggcagctgctggcctctgggccggcccaaagctttgacccagttagtgcctgctagtttcgtgtgcctggcttgtgcctttggcgcggaacgtttgggagactcggccttgcggtcttctgacctcacccaccacctacttgtcaataccatgctttcctgtaatatttgtggtgaaacagtaacctcagaaccagacatgaaagctcacctaattgttcacatggaaagtgaaattatatgtccattttgcaagttgtcaggtgtgaattatgatgaaatgtgttttcatatcgaaacagctcattttgagcagaatacacttgaaagaaactttgagaggataaatacagtacaatatggaacttcagataacaagaaagacaacaccctacagtgtggaatggaagttaattcaagtattctttcaggttgtgcatctaatcatccaaaaaattcagctcaaaacctgactaaagatagtactttaaaacatgaaggcttctattcagagaacttaactgaatctagaaaattcctgaaaagtagggaaaaacagtccagcctgaccgaaataaaaggatctgtttatgaaacaacatacagtcctcctgaatgtccattctgtggaaaaatagaggagcacagtgaagatatggaaactcatgtgaaaacaaagcatgccaatcttttagacattccattggaaggcatggatagagtccagtgttctggtgatctacaattggctcaccagcttcagcaagaagaagacagaaagaggagatctgaagaatcaagacaagaaatagaagaatttcagaagctgcagagacaatatggtttagataattctggaggatacaaacaacaacaactacgaaatatggagatagaagtaaataggggaagaatgcctccatctgaatttcataggagaaaagctgatatgatggaatcattagctcttggttttgacgatggaaaaacaaaaacttccggaattattgaagcacttcataggtattatcagaatgctgccacagatgtgagacgggtgtggctttcttcagtggtggatcactttcattcatctttaggcgacaaaggttggggttgtggttacagaaatttccaaatgctactttcatcattattacaaaatgatgcttacaacgattgcttaaaaggtcacagtcgaactgttattgggaattgaaggagaaaaaaaaccgaacattatgcttacttaatacttgatcctgggatgtccttcttcgagaaatggcaggaaattatttaaagcaagacatagaggcttaggcagtcctcaagcaaccttcggaaatcctatgggaaatttaaaaccataagcaatacccagatattgggcagtagagggtgctctttctctagaggagaaacttgccagggagacaagcttctcaagtctttacagccgagaagattccttgaaggaatcaagcatttaaggcatttccagtgattggaggaacattactttgttttccttaaatgtagatattgaactccttaatacaattatgaatctgtgaattctcttaagtcttaacatataatttaatttctaaaatgcctggtggttaattggaattataccctatccatacttccattggtttggtaaattatttcaataaaatgtcttgtttttgcattgtg

SEQ ID NO: 121768 - DNA, 303 bp, Homo sapiens
tgtctgtactcgtgaactatgcgttttctccttctacacactgggcgtcatgtctggagctgcagaggaggtggccactggagcagagggctcatatttggaaatcaagaaacagatggacaagttggatgccctggcccatcctctcctgcagtggatcatctctagcaacaggtcacacattgtcaaactacctctcagcaggtgggtccacattgagaactggcattcgatcctgcgcaatgggctggtcaatgcatcctacaccaaactgcaggaatgggaaaaggacagcacaggatg

SEQ ID NO: 121769 - DNA, 473 bp, Homo sapiens
ctctgtgatcatccagatcagcacttgactgtttattttcaaatctcacgaacctcaccccaagatcttcacattctggatctcagctgctcttgaaggacagtgacttgttaccaccgcaacagcagagcctgccatccccaacagatcaccagttgtccctgacatcgtgccctaccttgtctccctttgtggtctcctaaatgcccatctcgttggccttggttcggctagtggtatggaggggtgctgcctagcactgacctgagagtgtgtgtgacccactgacccaatggacatcaaaggccagttctggaatgatgacgactcggagggagataatgaatcacaggaatttctctatggcgttcaggggagctgtgcagctgacctgtatcgacacccacagcttgatgcagacattgaagccgtgaaggagatctacagtgagaactctgtatccatcagagaat

SEQ ID NO: 121770 - DNA, 649 bp, Homo sapiens
aactcttaggctaggctagttgccctcctctaggctcacaccatgctctataatctgcatcacaaccccttaccatgctgtgttgttaattacttgttcttgcttgtaatttccagcagactaaattctgtgggggaaaataatcttctttgttttattctctgctgttttgatgagcatctagctcagtgctgggacatagtaggcactttcgtaaatttttgataaatgaagtgggtgtattgttctgtgacaggaatgggaaaaggacagcacaggatgcccctccaagggatgaggctgggtccagagatacaacagggatggaataccatccccccgggtattggaactattctaatgagggcagggacctttccctgggggctaatttaggctccagagctggacagggaaacagtggggtgagaatgggttggggagtgatttgagatcatttaaaggagtcaggtatgttctaaagtgaacacacgtctggagtcatatgtagctgaagtcatgagtataaaagcagaggctgagtttagatgaaaatgtaaagatggaagctgtgaccctatccagactgattatgggaaagaagaattttctgtgcggcgagggggtgtgcttgggaccccaagaaatt

SEQ ID NO: 121771 - DNA, 1188 bp, Homo sapiens
atgtcgactatagatgatccccggctgcaagggagacgaatgtgtctgatgctcaggggtacccctgagcagaaggctctggtgattggtggagaggcttgtatgtggggagaatatgtggacaacacaaacctggtccccaggctctggctatgtcccccaagtactcaagacctagccaacgaaggaatcagggaaatgactatcttacacaggcacatccctgacagaggcaaaggtgtcatgagatcctgctctttcaggaccccaagacccttcacacttgcctgtggtcctgagaagagcctgatggatccacaaagccagagtaattctgagggcgcctcgtccagcctcgtggtcaagctggcggacaccgaccgggagcgcgcgctgcggcggatgcagcagatggccggccacctgggcgccttccaccccgcgccactgccgctaggggcctgcggcgcctacaccacggcgatcctgcagcaccaggcggccctgctggcggcggcacagggcccaggcctaggcccggtggcggcagtggcggcccagatgcaacacgtggcggcctttagcctggtagctgcgcctctgttgcccgcggcagcagccaactccccgcctggcagcggccctggcaccctcccaggtcttccggcgcccatcggggtcaatggattcggccctctgaccccccagaccaatggccagccgggctccgacacgctctacaataacgggctctccccttatccaggctggtcccagtccaggcctattctcaggatcatgaagtatgcagaacagaggattccaacattgaatgagtactgtgtggtgtgtgatgagcagcatgtcttccaaaatggatctatgctgaagattcagccagacacaatcatacaggtgtggcgagaggatattccagtgaactatatgaaggagctggaactggtcaccaaggccggcttccgggcccttctctctgccccctggtacctgaaccgtatatcctatggccctgactggaaggatttctacatagtggaacccctgtcatttgaaggtacccctgagcagaaggctctggtgattggtggagaggcttgtatgtggggagaatatgtggacaacacaaacctggtccccaggctctgggcacaccgtattcagctctga

SEQ ID NO: 121772 - DNA, 1213 bp, Homo sapiens
  misc_feature (1)...(1213): n = a,t,c or g
atgcatgtacagcatagagttcaggctggagtggagagtctgtacaagagcaccaacgaccacacgggacagtcgacacaacacaaacaagaaaaaagtcttctcctggcaaagggaacagggatgcctgcagggcagctgaagttcatgcacacctcacaccagttcctcctgctgagcagccctcctgccaaggaggctcggttccggaccgccaagaagctctatggcagcacctttgccttnccagtgtacctgtccatcttcatgtcctgtgtgggtgagaatggtgggtcccacattgagaactggcattcgatcctgcgcaatgggctggtcaatgcatcctacaccaaactgcaggacatcaaaggccagttctggaatgatgacgactcggagggagataatgaatcagaggaatttctctatggcgttcaggggagctgtgcagctgacctgtatcgacacccacagcttgatgcagacattgaagccgtgaaggagatctacagtgagaactctgtatccatcagagaatatggaactatcgatgacgtggacattgacctccacatcaacaatcagtttcctggaatgaagaagtctctacagcctgggaaggtcctccggacaagaacctattgtgttgaggctgcgatttttttctctcccagtacctagatggaccagacccatcccattgaggttttccagccatcaaataagaaaggatttgggctgggtcttcagttgaaaaagatcctgggtatgtttacatcccaacaatggaaacatctgaggcaatgatttcttgaagacccagcaggagaagaggcacagttggttcaagggcaagtgggtaccatcaagaagttccgagctgggccttcagcattctttttcacccatccccaagtcttcccagttttccctattcataacagggactccatggctggaaagggcaaactaggtgtaaccagagcttcgggttgggcgcctcatgaaccgttccatctcctgtaccatgaagaaccccaaagtggaagtgtttggctaccctcccagcccccaggcaggtctcctgtgccctcagcactttgaccccaacgagatcaaagttgtatacctgaggtgcactggaggtgaagtcggtgccacttctgccctggcccccaagatcggccccctgggtctgtctccaaaaaag

SEQ ID NO: 121773 - DNA, 1728 bp, Homo sapiens
ttgaaaaagatcctgggtatgtttacatcccaattttggaaacatctgagcaatgatttcttgaagacccagcaggagaagaggcacagttggttcaaggcaagtggtaccatcaagaagttccgagctggcctcagcatcttttcacccatccccaagtctcccagtttccctatcatacaggactccatgctgaaaggcaaactaggtgtaccagagcttcgggttgggcgcctcatgaaccgttccatctcctgtaccatgaagaaccccaaagtggaagtgtttggctaccctcccagcccccaggtcagtggtcactgcaagaacattcccactctggagtatggattcctcgttcagatcatgaagtatgcagaacagagtgattccaacattgaatgagtactgtgtggtgtgtgatgagcagcatgtcttccaaaatggatctatgctgaagccagctgtctgtactcgtgaactatgcgttttctccttctacacacttgggcgtcatgtctggagctgcaaaggaggtggccactggagcaaaggtggtggatctgctggtggccatgtgtagggcagctttatagtcccctagaaagagcatcatctttgagccctaatcctttgggggggaaccccactgatcccaagactctggcctttaacccctaagaagaagaattatgaagcggcttcagaaagctctgggatagtgtgatgtctattccgggagatgacccagggctcataatttggaaatcaagaaacagatggacaaagtttggatccccctgggcccatcctctcctgcagtggatcatctctagcaacatggtcacacattgtcaaactacctctcagcaggcagctgaagttcatgcacacctcacaccagttcctcctgctgagcagccctcctgccaaggaggctcggttccggaccgccaagaagctctatggcagcacctttgccttacagtgggtcccacattgaggaactgggcattcgatcctggcggcaatgggctggttcaatggcattcctacaccaaactgcaggaatgggaaaaggacagcacaggatgccctccaaggatgagctggtccagagatacaacaggatgaataccatcccccagacccgatccattcagtcaccggttcctgcagagtcggaatctaaactgtataggcactttgttgaagtgattacatctaaggacctccagaaggcatggggaacatctggggtgttgccctgtgttccgacccatgtcctgcacaagattccttcctttgtaatatgaggatggtccaggtgggcgatgcccaacattatatacctcacggaccccagagagtacacgagagggaaatcagtgcgtgttgatcgggagactcacggtttacacaaagctcgagggggccccaggccctcggtacccacccctgttacccccaggatccatctgcccctcataaaagtgttcaggtaacacggctgaggctgccctgaggaatcaaggggccattaccaaggggcaaggaaaaggatatgtaagaggtggccttcatggtagagcttgacccaagaactactccacattcggatggcccagactgactccatcccctgactttcccttttgacttcaccctgtttgtaaataaaacaataaaatggaaggtgctgtggattggaaaaaaaaaaaaaaaaaa

SEQ ID NO: 121774 - DNA, 525 bp, Homo sapiens
ggagagaacagacttcttgcagatgtcgctggaggatgagaagtgtgacgggagcctctgcgaagaggcattcctggcagagggtgccgcaaatacaggcgcacagaggtgtgcgatggctccgctgtgactggggactgccgactgtgactggggctttggggaagggctctggctctactggctgtgtgagcgagctgctggatacttcggagaatggggtgtgagccagggaggtgtggaagtcacctgctgccccgggacacccagatgatgccctgcccacctcccctgcagacaccaatgtgctccgctacatccagctgactcagctgaagatgaatcgttgcagcctccagcgggaagacagtggggctgggtcccagactcgggatgtaattggctgaggccaatccagggggacctctctatccctcgccctcccacctcaccatgtaacttcccccgactcatgtgtttgttggtaaaacacttgtcactggtgatcaaaaaaaaaaaaaaaaa

SEQ ID NO: 121775 - DNA, 840 bp, Homo sapiens
atgcagcgcggcgcgctgtccccggtgctgatgctcagcgctgccccggagcctccgccgcgcccgcctcccggcctctccccaccgggctcgggcccaggctcgggctcccgccatggctcggctcgtcccggtcctaccccagagccgtcggggagcctgggcgcggcgctcgacagcagcctgcgtgccgccgtggcgttcaaggcagagggccagcgctgctatcgagagaagaagttccgggaggccatcggcaagtaccaccgagcgctgctgcagctgaaggcggcgcagggggcccgccctagcggcctgcccgcccccggcccccggggcccaccagcagccccgggccggcgcgcctcagcgaggagcagcggcgcctggtggagagcacggaggtggagtgttacgattcctcaccggcttggcctgctgcagtcggagctggtaaactacgagcgcgtgcgcgagtactgtctcaaggtactggagaagcagcagggcaacttcaggcccccctaccgtgccgggcattgccttttaccccctgggggactacgcacgcgcgttgcgcttcctgcaggaggcccccagccgggaacccccagacaccaatgtgctccgctacatcmcagctgactcagctgaagatgaatcgttgcagcctccagcgggaagacagtggggctgggtcccagactcgggatgtaattggctgaggccaatccagggggacctctctatccctcgccctcccacctcaccatgtaacttcccccgactcatgtgtttgttggtaaaacacttgtcactggtgaaaaaaaaaaaaaaaaa

SEQ ID NO: 121776 - DNA, 658 bp, Homo sapiens
  misc_feature (1)...(658): n = a,t,c or g
aacgggaaggaacctggacgatacacatttgaagatgctcaagagcacatttacaaactgatgaaaagtgattcatacccacgttttataagaaccagtgcctatcaggagcttctacaggcaaagaaaaagggcagaaacatccctattttcccatgccataaaaactgtacaccaacactgagggccagcactaacctgttatgaaaagaggggaaatctctcacgtccaagaggttaacaagccttgctcagtcttactaaacggatcatcttgtagcatgaatgcagactggagtcactgcacacactttgtagctcaatgttgtgacctggagcagaggacattagaacaagatgttgcatgagcaaaggacctaaattgttatttttgtgtgtacattccatctccaatggactcttccgtctcaatgcctccatttcaaactgggtgctgcttttttcntcttctactatgctggatctggggctcttccttttntacaagntcaagtgaaagaaaccttttctttnttnccctcttcncctctctctctctcaaagcttcagtagaacacangtcactgaaaatcagtcagtcaaaaactggagaactgtaaagaaaaagttatatcataagatactgtggctcacatat

SEQ ID NO: 121777 - DNA, 1395 bp, Homo sapiens; identical to SEQ ID NO: 118349

SEQ ID NO: 121778 - DNA, 2108 bp, Homo sapiens
atggcccaggggaataattatgggcagaccagcaacggggtggccgatgaatcacccaacatgctggtgtacagaaagatggaagacgtcatagcacggatgcaagatgaaaaaaatggaattcctattcgtacggtcaaaagctttctttccaagatacctagcgtcttctctggttcagacattgttcaatggttgataaagaacttaactatagaagatccagtggaggcgctccatttgggaacattaatggctgcccacggctacttctttccaatctcagatcatgtcctcacactcaaggatgatggcaccttttaccggtttcaaaccccctatttttggccatcaaattgttgggagccggaaaacacagattatgccgtttacctctgcaagagaacaatgcaaaacaagggcacgactgggagctcgcagactatgaggctgagagctgggccagggtttgcagagagcatttgccccgaagtggggagttcattttcatggcaagcaggagcacaagcaaaagtggacaagaagagagacaagattgaaaggaagatccttgacagccaagagagagcgttctgggacgtgcacaggcccgtgcctggatgtgtaaatacaactgaagtggacattaagaagtcatccagaatgagaaacccccacaaaacacggaagtctgtctatggtttacaaaatgatattagaagtcacagtcctacccacacacccacaccagaaactaaacctccaacagaagatgagttacaacaacagataaaatattggcaaatacagttagatagacatcggttaaaaatgtcaaaagtcgctgacagtctactaagttacacggaacagtatttagaatacgacccgtttcttttgccacctgacccttctaacccatgggctgtccgatgacaccactttctgggaacttgagggcaagcaaagaaccgagccagcagagggtaaaacgatgggggttttgggcatgggacgagggcattggaaagacccagttggggaggaggaacagtttccttaaaattttctaggagttcaggatttcaggttcgggaaattttaaggttctgggctgggccagtgggaggaccttgaaaaagaggcctttttaaagaagtaccctcaagagttcaggaaatatggcaagagtttctggctcccggagcccccagtgctattaacttggattccaagagttatgacaaaaccacacagaacgtgaaggaacctggacgatacacatttgaagatgctcaggagcacatttacaaactgatgaaaagtgattcatacccacgttttataagatccagtgcctatcaggagcttctacaggcaaagaaaaaggggaaatctctcacgtccaagaggttaacaagccttgctcagtcttacttaaacggatcatcttgtagcatgaatgcagactggagtcactgcacacactttgtagctcaatgttgtgacctggagcagaggacattagaacaagatgttgcatgagcaaaggacctaaattgttatttttgtgtgtacattccatctccaatggactcttccgtctcaatgcctccattccaaactgttgtctgctttctttctccttctactatgctggatctgtgtctcctcccttttaaacaagttccaagtgaaagtaaaaccttttctttttttcccttcctttcctctctctctctctctcaaagcttccagttagacacacagttccactgaaaattcagtcagtcaaaaacgggaagaactgtaaaagaaaaaagtatatatcaataagtatacatgtggcttcacatttattaaacaataaattccgcacagaaagtttcatttcaccaatgtgtcacagtcagaaacaaactcatgtcttcggtctgttgtctgtacattctccgttaatgtttctcgcatttatttttataccatatttaaagaagaaacaccttttactccaaatgtattaaagttgatcccttctctgtaaatttgtgtatgtttatattgttgttttatctttcattaaaagatgtcagaatctcaaaaaaaaa

SEQ ID NO: 121779 - DNA, 439 bp, Homo sapiens
  misc_feature (1)...(439): n = a,t,c or g
cccacgcgtccgaataagcttttactgcataaactttacatccagcactgtagttaagtacccaaaattgaatagaaataatggcnnnnnnnnnnnnnnnnnnnnnnnnnnnnnnnnnnnnnnnnnnnnnnnnnnnnnnnnnnnnnnnnnnnnnnnnnnnnnnnnnnnnnnnnnnnnnnnnnnnnnnnnnnnnnnnnnnnnnnnnnnnnnnnnnnnnnnnnnnnnnnnnnnnnnnnnnnnnnnnnnnnnnnnnnnnnnnnnnnnnnnnnnnnnnnnnnnnnnnnnnnnnnnnnnnnnnnnnnnnnnnnnnnnnnnnnnnnnnnnnnnnnnnnnnnnnnnnnnnnnnnnnnnnnnnnnnnnnnnnnnnnnnnnnnnnnnnnnnnnnnnnnnnnnnnnnnnnnnnnnnntggggcaaagcaaagggaaatatttttcttat

SEQ ID NO: 121780 - DNA, 825 bp, Homo sapiens
atggcggcgcggacagcgttcggtgctgtgtgccggcgcctctggcaggctgtcacgggaaaacttcactgtacactggtaacaatctctgatgaaccagacatattatataagcgcctctcggttttggtgaaaggtcacgataaggctgtattggacagttatgaatattttgctgtgcttgctgctaaagaacttggtatctctattaaagtggctagcatggggcaggagtttagctgggaggaggcggaggcagctggcgagatagatgtggcggagctccaggagtggtacaagaagtttgtgatggagtgccccagcggcacactctttatgcatgagtttaagcgcttcttcaaggtcacagacgatgaggaggcctcccagtatgtagagggcatgttccgagccttcgacaagaatggggacaacaccatcgacttcctggagtacgtggcagctctgaatctcgtgctgaggggcaccctggagcacaagctgaagtggacattcaagatctatgataaggatggcaatggctgcatcgaccgcctggagctactcaacattgtggagggaatttaccagctgaagaaagcctgccggcgagagctacaaactgagcaaggccagctgctcacacccgaggaggtcgtggacaggatcttcctcctggtggatgagaatggagatggccagctgtctctgaacgagtttgttgaaggtgcccgtcgggacaagtgggtgatgaagatgctgcagatggacatgaatcccagcagctggctcgctcagcagagacggaaaagtgccatgttctga

SEQ ID NO: 121781 - DNA, 1927 bp, Homo sapiens
  misc_feature (1)...(1927): n = a,t,c or g
caaacctacaccgttgatgtcccaaaaggatttcaccaaacctgtgataacaatctctgatgaaccagacacattatataaaattttaaagnttgcattgtcaagtccatctttcccttatagatttacctttactgataatgttttttgttgttgttgttttgagactgagtttcactcttgttgcccaggctggagtgcagtggcgcgatctcgtctcactgcagcctccaccgggcccgggttcacgcgattctcctgcctcagcctcctgagtagctgggattacaggcacgtgccaccatgtccagctaatttttgtatttttattagagacggggtttcaccgtgttagccaggatggtctggatctcttgacctcgtgatccgcctgcctcggcctcccaaagtgctgggattacaggcgtgagccaccgtgcctggcctgctttgggccatttttaaaagccatttatttctattcaattttgggtacttaactacagtgctggatgtaaagtttatgcagtaaaagcttattgaatgaatgaatcataggataaataatacaactagtaatttcttaagatcataaattccattacagtaacccctggtaggcaactctataaagttctgggctccaagaagaggtcagtgcatgccataaatgtgtttgatctgctgtgaagtatattcagtcttcaaaatgtaatgcttacatgagataaaatcggttggttaccacccccaaattagcatatgccagcctgcacaaaggtaaatagcaaaaactttaactgctcaatctgaattaaccaaagattccttctaggaatcttaaaaaaaaataagggtacgaacactccaagcacttattttcagatgcatcaactgacataaattaaaaatggtacaaactaataattgaacaccagtagcgtaacaaaatagaattttcattctttttgctttcagtcaaagtggtttgctcatgtttgctgaaatcagaactgaaacaatgaataaaaagaatagataaaagtggttcttccattaaagttccattccctgccctcagctgatgagggcacgagaactcaatggagcagttagggcagactcaaatcatctcagctggaagcactctccacttaaacatactcatctggcccacccttcatttcaaaatttaggcaaaaatggcctccctgaaggctttatgacttgctttcttctttttcttttgataagggttcccaagattggctccttgatgtgttctggtaactgttctaattgtgtctaaaaaaataaagaaacaaaactttgttacttccatggcaaccccttcaggtaaagtttcgctgaatatattccaagtagacatctgctgtgcttccagttagatgttctaactctaaacatctgtaaagtgttctcatttcatactgaactctgtgcttcttgtaaatatgcactgattggagaagagtaaatcgctctattttccttggaggttcatgtactttaatagaaatcccaagttcctttagcagcaagcacagcaaaatattcataactgtccaatacagcctttatcgtgacctttcaccaaaaccgagaggcgcttatataatatgtctgggttcatcagaggattgttaccacaggtttggtcaaatcctttggaacatcaacgtgtaggtttgaaaactgtacccacttcatattggtactgctatgtgtggggaaaaaaagagaaacagaagcaagccaccacttttgccctgtattgcccttagaagtgtttacagaaaaattccccaatccatgccataggcgccggcacacagcaccgaacgctgtccgcgccgccatcttgacttccaccgcactgcactaatggttatcgaaatacaaattt

SEQ ID NO: 121782 - DNA, 448 bp, Homo sapiens
  misc_feature (1)...(448): n = a,t,c or g
attgcttttgaggcnccccacccgtccgcggatacctgcgtgtatcctgtgtttgccaaactcattctcttgggtctagcatctttcttctctctcagctacgtcttcatcgccagcatctacctacttggagagaagctcaaccactggaaatggggtgacatgaggcagccacggaagaagaggaagtaattgcacaccattttccaagaaccaagaaagaagaaaacacaagagatttttctcatccnnnnnnnnnnnncnnnnnnnnnnnnnnnnnnnnnnaacttaccaaagtgggggggccaaaaagggatccttaattttaaaaaaaggttcgggagggagcctaaatttgaaaactttggtttttttgaagggtggatggcccttcccaaaaacacctcttgttttttaaaaataaattatttttgaccttcggggaggg

SEQ ID NO: 121783 - DNA, 1037 bp, Homo sapiens
agctctccggcctgctgttggacttaggctgtgacccacagaaggacgccagaaagtactcaagacattcacggtgccccggtcagcactcgccatgacgaagacttctacatgcatataccacttccttgttctgagctggtatactttcctcaattattacatctcacaggaaggaaaagacgaggtgaaacccaaaatcttggcaaatggtgcaaggtggaaatatatgacgctgcttaatctgctcttgcagaccattttctacggggtcacctgcctggatgatgtgctgaaaagaaccaaagggggaaaagacattaagttcctaactgccttcagagacctgcttttcaccactctggcttttcctgtatccacgtttgtatttttggcattctggatcctctttctctacaatcgagatctcatttaccccaaggtcctagatactgtcatccccgtgtggctgaatcatgcaatgcacactttcatattccccatcacattggctgaagtcgtcctcaggcctcactcctatccatcaaagaagacaggactcaccttgctggctgctgccagcattgcttacatcagccgcatcctatggctctactttgagacgggtacctgggtgtatcctgtgtttgccaaactcagcctcttgggtctagcagctttcttctctctcagctacgtcttcatcgccagcatctacctacttggagagaagctcaaccactggaaatgggtttctgttcagatcttgcaaagatggaggctagaatctgttggaatctgcttccagtggcccgattggaagtcaccagccaagcaccaactggtcaagaatatcaggtgaaatatcagggctataaaaatatttctagcccttgctactatctgacagcagttaaaggaataaaacaagtcggggtgaatctaacttcctatctgccaactaggatactttctactgggaaaaatgcttctcaatcaagaaaatatttataataaacataattttccaattacaa

SEQ ID NO: 121784 - DNA, 602 bp, Homo sapiens
  misc_feature (1)...(602): n = a,t,c or g
agagaagtaggttccaggaaacaaaaaggtcagaggtgtacccagtgaagacaacagcaggtgtgaaagccaagaaactgcagcgctcagttcactcaagaaacaaaggggttcaatatggatggactgcagatctccagatggaagcggggcatggccaggccagcatcctatggctctactttgagacgggtacctgggtgtatcctgtgtttgccaaactcagcctcttgggtctagcagctttcttctctctcagctacgtcttcatcgccagcatctacctacttggagagaagctcaaccactggaaatggggtgacatgaggcagccacggaagaagaggaagtaattgcacaccattttccaagaaccaagaaagaagaaaacacaagagatttttctcatccnnnnnnnnnnnnctgggggggggannnnnnnnnnnaacataccaaagtcggagggacaaaaagggatccttaaatttattaaaaggttggggaagggaccttaacttgaaaactctgggttttttgaagggtggactgcccatgccaaaaacaactcctggtatttaaaaattaattatctttgaccttgg

SEQ ID NO: 121785 - DNA, 1383 bp, Homo sapiens
gggtgaattacagattgatgaagaggaggggcatggaggagataccaagcaaaacctgggggcccttccacctggccccatctcagaatgtagagccacagaccagtgagtctaggcagaaattgtagcacaggaagttagtgaggaaggaggtaaaagtaggaaaggacctcagtttgggaagagccaatatcaggaactaattcgcagatcggaatgtggcctgaatagaggagagggagagagtattaaggcaaatatgcagcaggtgatatacatattccccatcacattggctgaagtcgtcctcaggcctcactcctatccatcaaagaagacaggactcaccttgctggctgctgccagcattgcttacatcagccggtaagaatggctctactttgagacgggtacctgggtgtatcctgtgtttgccaaactcagcctcttgggtctagcagctttcttctctctcagctacgtcttcatcgccagcatctacctacttggagagaagctcaaccactggaaatggggtcagtgtcaggaactctaccctgattctgtatataaggatggcaaagagtcacacccagtcccccacatcactcgcccacatgccattctgttctatcaaaatagagatggcagaagtgccatcttccgcccaatctatgaactggtgtgaaaaactgctggttttccctccacgttgatgttgtttcttacgtccacgggattctgtgtctcctccagtctttgcctggttcatactcatgcatttcaacactcgcctcttccaggaagccttccctggtcagccccagatcttgcaaagatggaggctagaatctgttggaatctgcttccagtggcccgattggaagtcaccagccaagcaccaactggtcaagaatatcaggtgaaataaaacagttgccacagtggaaattccccaaacgtgaagccctcgggggatcacccaaatgttccacaccccagaggtgactcgggctgcgtaactctcagtcacagtaagctcacgttgctgaatgtacagttgggaagagatgtggacaaccacttagtcctcgagagcctgttgtgcaaactggctccagcacacctctgcgttcagagcagggaaatgacaagtccaaggtcacatgagtaccgggtcatccaaaaactttatttaaaaaacaaaacagaaatgtgtccacatcttgcagagctggacaaaagaaggtggtcaagagatcccaaattggtggaaactgtccccgttacaggaggaggaaggacgctgccaccactaccccagggactggcctatactcatgcttctgttccagtgttgctgtctcacatttgaaaccaatt

SEQ ID NO: 121786 - DNA, 626 bp, Homo sapiens
  misc_feature (1)...(626): n = a,t,c or g
cccaggaacttttgttggtgggtactagtagggtaaggcagttcttcccatcatgagggagaccttgggagactttcattaccaaatccattgctgccccgaccttcctgggactgatctgggtcaccctgggtctcctgatcttggagaagtcaagttcttatcccagacttgagaggttacaagcctccaggtctctggcaaagtgtggagatgatggacagccatttgtacacacaccagccagtcccttagcatatctctcttggttttgtctcaggtctgcctcagccacctccctgacgctgtcccactgtgtgaatgtggtgaaggggcttctggattttaagaagaggagaggtcactcaattgggggagcccctgagcagcgataaccagatcatccctgtgtgtgtggcttgcccgacttcctaacccgggctcaggatgtgcttgcagcctcctgggccactgggaggggcttgaccgcctgattccacctctggaatgttnttggggaagttcgcctgggaggccaaccagaccctgggagggagctggtggcagcatcaccagtgtgggactttgacccctcgggctaccacgttttagcagcaacttacaac

SEQ ID NO: 121787 - DNA, 768 bp, Homo sapiens
atgaagacagtgggaagttgggaggtggtccgggactacaatcttcagctgtttttgcaagaaaacgctgtatttcacaaaccccagcccttccagttccagccttgtgacagtgatactaagaagagaggtcactcattggggggagcccctgagcagcgataccagatcatccctgtgtgtgtggctgcccgacttcctacccgggctcaagatgtgctggatgcccacctctctgaggtcaatgctgttcgttttggccccaacagcagcctcctggccactggaggggctgaccgcctgatccacctctggaatgttgtgggaagtcgcctggaggccaaccagaccctggagggagctggtggcagcatcaccagtgtggactttgacccctcggtgaggaactctgccccagtggcatgggattgtgccctctctgatctccacactgggcagggctaccaggttttagcagcaacttacaaccaggctgcccagctctggaaggtgggggaggcacagtccaaggagacactgtctggacacaaggataaggtgacagctgccaaattcaagctaacgaggcaccaggcagtgactgggagccgcgaccggacagtgaaggagtgggacctcggccgtgcctattctccgaagagacagcgaccatcgagaacgggccatgatgacgatggcggttttgtcgaaaagaaaagggggaaatgtggggaaaagagagatcagattgttactgtgtctgtgtag

SEQ ID NO: 121788 - DNA, 1589 bp, Homo sapiens
  misc_feature (1)...(1589): n = a,t,c or g
agcaggcgcgggtgtcccaggagctgaagaaggctgccaagcggaccgtgagcatcagcgagggcccggacaccctaggcgatgggatgagggagagaagggagactctggctctggcccctgagccagagcccctggagaaggaagcttgtgagaagtggaagaggcccttcaggtctgcctcagccacctccctgacgctgtcccactgtgtggatgtggtgaaggcgcttctggattttaagaagaggagaggtcactcaattgggggagcccctgagcagcgataccagatcatccctgtgtgtgtggctgcccgacttcctacccgggctcaggatgtgctggatgcccacctctctgaggtgcaatgctgttcgttttggccccaacagcagcctcctggccactggaggggctgaccgcctgatccacctctggaatgttgtgggaagtcgcctggaggccaaccagaccctggagggagctggtggcagcatcaccagtgtggactttgaccccttcgggctaaccaggttttagcagcaacttacaaccaggctgcccagctctggaaggtgggggaggcacagtccaaggagacactgtctggacacaaggataaggtgacagctgccaaattcaagctaacgaggcaccaggcagtgacttgggagccgcgaccggacagtgaaggagtgggacctcggccgtgcctatttctccagggaccattcaatgttccttttcctactgtaatgacgtggtgtgtggggaccatatcatcattagtggccacaatgaccagaagatccggttctgggacagcagggggccccactgcacccaggtcatccctgtgcagggccgggtcacctccctgagcctcagccacgaccaactgcacctgctcagctgttcccgagacaacacactcaaggtcatcgacctgcgtgtcagcaacatccgccaggggtttcagggccgatggtttcaagtgtggttctgactggaccaaagctgtgttcagcccgggacagaagctatgcactggccanactccctgtgatggggcccttttaaatctgggaatgtggaacacccgggaaaaactggaagaaacaagaactaacagggacccccattgcgctgcccgttcaaacgccgtggccctggtgcctactcccgggaagcccacatggtgaaacgtggacccagggcaggaaaggttgtgcttttggcagtagggcccacgacctgcctgccctgggctggaggcttttgcccgaagcctgaagcttcctttgggcgccatgccaggggttggggttgggactggagctggccttgggatttaatggggaagaaggcctggcaggacctggcctgtttgtttaaaaatgaagtatgggttgggggattacgctagtttttctttgtatttttatctctatctatctcctcactttttctcccaaagtagaaaaaaatgatatctgaacgaataaaaaataacatacatgacgtgatcattacatatgtgtatgatattgaatctattcagatcttgtagatctcataatatcatg

SEQ ID NO: 121789 - DNA, 463 bp, Homo sapiens
gacttattttgcagacacattttcatgcagccttgactcttgttaggtgcttgaacataaattctgagttgagaggcccgaatttgtagttgtagtctatttaaagttgctgttcaagataggatgttgaagttggtttaatttctcagctccaggactgtgaacttggtgggtgcattcccttaaaagtctttccagccgtgtttaggcttcctctgagcctgcacacattcctgcccttgcccctctccaggaccttggcttctggtggtgatggtgcaacttctgcttcctgctgcaggtgccctggggctgtgagtatctcgtgactgtagcaaactgtggcttctccttaggtgctggtgtttgtccactcccggaaggagaactggaaagacagccagggccatccgggacatgtgcctagaaaaggacactctgggtctgtttctgagggagggct

SEQ ID NO: 121790 - DNA, 492 bp, Homo sapiens
atgggacatcgccttggggttggtgaggatgaggaacctgatctgacatcaagggaggaaaggtcccggagagagcgagtgcgtcagtctcgaatggacacagatctggaaaccatggatctcgaccagggtggagaggcactggctccacggcaggttctggacttggaggacctggtttttacccaagggagccactttatggccaataaacgctgtcagcttcctgatggatccttccgtcgccagcgtaagggctatgaagaggtgcatgtgcctgctctgaagcccaagccctttggctcagaagaagtaatgtttaaccttgtatccaacagtgacgacaacgtgtttgtgggggcccccacgggcagcgggaagactatttgtgcagagtttgccatcctgcgaatgctgctgcagagctcggaggggcgctgtgtgtacatcacccccatggaggccctggcagagcagagcctcgtggaatga

SEQ ID NO: 121791 - DNA, 426 bp, Homo sapiens
atggtgggcgcccctccctcagccttgctgccaccttgcagtttgatctcagactgctgtgctagcaatcagggggactccgtgggcataggaccctccaagccagcttgtgagacccagctgcctgtctccttccggcacctgatcttgccggagaagtacccccctccaaccgaacttttggacctgcagcccttgcccgtgtctgctctgagaaacagtgcctttgagagtctttaccaagataaatttcctttcttcaatcccatccagacccaggggtttggtgataactgggacaagcagattgtaagttattgtccagaaggacggtggttcctggacctgaaaaaggacgacaccatggctatctcgcttttcttttggtttctccggttcccccaacaggattcttttccttattag

SEQ ID NO: 121792 - DNA, 900 bp, Homo sapiens
atggtgtccaggccccttcaagcattcctgcctgatgtagttttcctcccacagcgcctggccacttatggcatcactgttgctgaactgactggggaccaccagctgtgcaaagaagagatcagtgccactcagatcatcgtctgcacccccgagaagtgggacatcatcacccgcaagggtggtgagcgcacctacacccagctggtgcggctcatcattctgaaaatcactaccaagaatgcttttggtttgcacttgattgattttatgtcagagattcttaaacagaaagacaccgaaccaaccaactttaaagtggctgccggtactctggatgccagcaccaagatctatgctgggcgcgtggatgccgtccatgccgatgtatacagagtccttgggggggctgggcaaagatgcaccgtcttttgcttcttgcactgcaccgagaaggatctgattccgtacctggagaagctaagtgacagcacgctcaaggaaacgctgctaaatggggtgggctacctgcatgaggggctcagccccatggagcgacgcctggtggagcagctcttcagctcagcataccagagattttcaaaatactgtttaggactcttggctgttaactcatttgatcctcccaagaacctcgtgaggcagatggtgggccacgccaaccgccctttgcaggacgatgaggggcgctgtgtcatcatgtgtcagggctccaagaaggatttcttcaagaagttcttatatgagccattgccagtagaatctcacctggaccactgtatgcatgaccacttcaatgctgagatcgtcaccaagaccattgagaacaagcaagatgctgtggactacctcacctggacctttctgaccgccgcatga

SEQ ID NO: 121793 - DNA, 1827 bp, Homo sapiens
ggcttcgagggcgcgggcgcacagcgcttccccgttcgggttctccccgccaaccagacaagctctcccggcacaaaccccgtggccagcgtgcagggccagcggctccccaccacgtggctctgtccgcacgaaggcccccatggaagtgctactgaaatgggaacaaccaaaaaggctgtaaagccaaagaagaagcacttacacagaactattgagcagaacataaacaacctcaatgtctccgaagcagatcggaagtgtgagacggccagtgatgatcgggaatgtgaaaatcagctggttctgctgcttggtttcaacacctttgatttcattaaagtgttgcggcagcacaggatgatgattttatactgtaccttgctggccagtgcacaaagtgaagctgaaaaggaaaggattatgggaaagatggaagctgacccagagctatccaagttcctctaccagcttcatgaaaccgagaaggaggatctgatccgattacttaagatggcccagggccatagggtagagactgagcattatgaagaaattgaagactatgattacaacaaccctaacgacacctccaacttttgccctggattacaggtatacatggactggtacgagaagttccaggacaggctcaacaagaaggtggtactcctgacaggcgagaccagcacagacctgaagctgctgggcaaagggaacattatcatcagcacccctgagaagtgggacatactttcccggcgatggaagcagcgcaagaacgtgcagaacatcaacctcttcgtggtggatgaggtccaccttatcgggggcgagaatgggctagagcccccaggtgaattgatgattccaaaaagaaggattctgccccctggggatattgatgcattttggctgcagcgacagctcagtcgtttttatgatgatgccatcgtgtcgcagaagaaggcagatgaagtattggagattttgaagacggccagtgatgatcgggaatgtgaaaatcagctggttctgctgcttggtttcaacacctttgatttcattaaagtgttgcggcagcacaggatgatgattttatactgtaccttgctggccagtgcacaaagtgaagctgaaaaggaaaggattatgggaaagatggaagctgacccagagctatccaagttcctctaccagcttcatgaaaccgagatggattttgccgatttcggaaccaccatcaaacaggattttcgcctgctggggcaaaccagcgtggaccgcttgctgcaactctctcagggccaggcggtgaagggcaatcagctgttgcccgtctcactggtgaaaagaaaaaccaccctggcgcccaatacgcaaaccgcctctccccgcgcgttggccgattcattaatgcagctggcacgacaggtttcccgactggaaagcgggcaaccatgcttgtccgagcgtctgaacgtctggctgagcgcggtgggcccctacgacccccagcacgcggctcagagggcgcccgcgcgccgcagccgctcccgccgtccgggctcctccccgcccacccagtacaagctcctccccgcccaaacccccgtggcccagcgtgcaggggcagcggcctccccacaccgggtctctgtccgcaccgaggcccccgtgggtttgctgggagagtggaggggccgtggccacacactctccgctgctcggcctccctggggtggcaaatggggcaccgccgtgcctgctgtcagctgcactcagctcagttcagtggagaacagacttactaggattcgggtgtaa

SEQ ID NO: 121794 - DNA, 969 bp, Homo sapiens
atgctgttcatcaaactggcctttcccctgttcatcaaactgcccagattctccaagcaaatattaaacatgtcctgcaaatctcaggaatcagcacacagagaaacacaaagaagaaccaaggtgcgagggcttattgagatcatctccaatgcagcagggtacgagaatatccccatccagcaccatgaagaaaacttcctgaggcagttggctcagaaggtccctgacaagctgaataaccctaagttcaatgatccgcacatcaagaccgaacctgctcctgcaggctcacctgtcgccgcatgcagctgagtgctgagttgcagtcagatacggaggaaatccttagtaaggcagtccggctcgtccaggcctgcgtggatgtcctctccagcaatgggtggctccagctctgctctggcagctatggaattggcccagatggtcacccaagccatgtggtccaaggactcatacctgaagcagctgccacacttcatctctgagcatatcaaacgttgcacagacaagggagtgaagagtgttttcgacatcatggagatggaggatgaagaacggaacacaattcttcagctgactgacagccagattacagatgaggtggtggataaggacagcatccgcagtggcgggccagcggtggtgctggtgcagctggagcgagaggaggaagtcacaggccctgtcattgcgcctctcttcccgcagaaacgtgaagagggctggtgggtggtgattggagacaccaagtccaatagcctcatctccatcaagaggctgatcctgcagcagaaggccaaggtgaagttggactttgtggctccagccactggtgcccacaactacactctatacttcatgagtgatgcttacatgggatgtgaccaggagtacaaattcagcatggatgtgaaagaagccgagacggacagtgattcagattga

SEQ ID NO: 121795 - DNA, 5521 bp, Homo sapiens
  misc_feature (1)...(5521): n = a,t,c or g
aagagatcagtgccactcagatcatcgtctgcacccccgagaagtgggacatcatcacccgcaagggtggtgagcgcacctacacccagctggtgcggctcatcattctggatgagattcatcttctccacgatgacagaggtcctgtcttagaagctttagtggccagggccatcccgaaacattgagatgacccaagaggatgtccgactcattggtctcagtgccaccctacccaactatgaagatgtagccacctttctacgtgttgaccctgccaaggtcctcttttactttgacaacagcttccgtccagtgcctctggaacagacatatgtgggtatcacagagaaaaaagctatcaagcgtttccagatcatgaatgaaatcgtctatgaaaaaatcatggaacatgctgggaaaaaatcaggtgctggtgtttgtccactcccggaaggagactggaaagacagccagggccatccgggacatgtgcctagaaaaggacactctgggtctgtttctgagggagggctcagcctccacagaagtcctgcgaacagaagctgagcagtgcaagaacctatagctgaaggatcttctgccttatggctttgctattcatcacgcaggcatgaccagggttgaccgaacactcgtggaggatctttttgcttgataaacatattcaggttttagtttccacagcaactctagcttggggtgtgaatcttccttgacataacggccttattcaaaggcacccaggtgtacagtccagagaaggggcgttggacagaactgggagcactggacattctgcaaatgctgggacgtgccggaagaccccagtatgacaccaagggtgaagggcatactcatcacatctcatggggagctacagtactacctgtccctcctcaatcaacaacttcctattgaaagccagatggtttcaaagcttcctgacatgctcaatgcagaaatcgtgctaggaaatgtccagaatgccaaggatgcggtgaactggctgggctatgcctacctctatatccgaatgctgcgatccccaaccctctatggcatctctcatgatgacctcaagggagatcccctgctggaccagcgccgactagatctggttcatacagctgccctgatgctggacaagaacaatctggtcaagtacgacaagaagacgggcaacttccaggtgacagaactgggccgtatagccagccactactacatcaccaatgatacagtgcagacttacaaccagctgctgaagcccaccctgagtgagattgagcttttcagggtcttctcattggcctctgagttcaagaacatcacagtgagagagggggagaagctggagctgcagaagttgctggagagggtgcctatccctgtaaaggaggagcattgaggaacccagtgctaagatcaacgttcttctgcaagccttcatctcacagctgaaattggagggctttgcactgatggctgacatggtgtatgtcacacagtcggctggccggttgatgcgagcgatatttgaaattgtcctgaaccgaggttgggcacagcttacagacaagaccctgaacctctgcaagatgatcgacaaacgcatgtggcagtccatgtgtcctttgcgcccattccggaaaactccctgaggaagtagtgaagaagattgagaagaagaatttcccctttgagcgtctgtacgacctgaatcataatgagattggggagcttatccgcatgccaaagatggggaagaccatccacaaatatgtccatctgtttcccaagttgggagttgtcagtgcacctgcagcctatcacacgctccaccctgaaggtggagttggaccatcacggccagactttccagtgggatgaaaaggtgcatggttcatccgaggctttttggattctggtggaggatgtggacagcgaggtgattctgcaccatgagtattttctcctcaaggccaagtacgcccaggacgagcacctcattacattcttcgtgcctgtctttgaaccgctgccccctcagtacttcatccgagtggtgtctgaccgctggctctcttgtgagacccagctgcctgtctccttccggcacctgatcttgccggagaagtacccccctccaaccgaacttttggacctgcagcccttgcccgtgtctgctctgagaaacagtgcctttgagagtctttaccaagataaatttcctttcttcaatcccatccagacccaggtgtttaacactgtatacaacagtgacgacaacgtgtttgtgggggcccccacgggcagcgggaagactatttgtgcagagtttgccatcctgcgaatgctgctgcagagctcggaggggcgctgtgtgtacatcacccccatggaggccctggcagagcaaggtatacatggactggtacgagaagttccaggacaggctcaacaagaaggtggtactcctgacaggcgagaccagcacagacctgaagctgctgggcaaagggaacattatcatcagcacccctgagaagtgggacatactttcccggcgatggaagcagcgcaagaacgtgcagaacatcaacctcttcgtggtggatgaggtgcaccttatcgggggcgagaatgggcctgtcttagaagtgatctgctcccgaatgcgctacatctcctcccagattgagcggcaccattcgcattgtggcactcagctcttcgctcttcaatgctaaggatgcggcccactggctgggctgcagtgccacctccaccttcaacttccatcccaatgtgcgtcccgtccccttggagctgcacatccagggcttcaacatcagccatacacaaacccggctgggtttcattggccaagcctgtgtaccatgctatcaccaagcactcgcccaagaagcctgtcattgtctttgtgccgtctcgcaagcagacccgcctcactgccattgacatcctcaccacctgtgcagcagacatccaacggcagaggttctttgcacttgcaccgagaaggatctgattccgtacctggagaagctaagtgacagcacgctcaaggaaacgctgctaaatggggtgggctacctgcactgaggggctcagccccatggagcgacgcctgggtgggagcagctctttcagcttcaggggctatccaggtggttgggtggcttctcggagtctctgctggggcatgaacgtggctgcccacctggtaatcatcatggatacccagtactacaatggcaagatccacgcctatgtggattaccccatctatgacgtgcttcagatggtgggccacgccaaccgcccttttgcaggacgatgaggggcgctgtgtcatcatgtgtcagggctccaagaaggatttcttcaagaagttcttattattgagccatttgccagtagaatcttcacctgggaccactgtatgcatgcccacttcaatgctgagatcgtcaccaagaccattgagaacaagcaggatgctgtggactacctcacctggacctttctgtaccgccgcatgacacagaacgccaattactacagcctgcagggcatctcccatcgtcacttgtcggaccacttgtcagagctggtggagcagaccctgagtgacctgggagcagtccaagttgcatcagcatcgaggacgagatggacgtggcgcctctgaacctaaggcatgatcgccgcctactattacatcaactacaccaccaattgaagctcttcagcatgtccctcaatgccaagaccaaggtgcgagggcttatcgagatcatctccaatgcagcagagtatgagaacattcccatccggcaccatgaagacaatctcctgaggcagttggctcagaaggtcccccacaagctgaattaaccctaagttcaatgatccgcacgtcaagaccaaacctgctcctgcaggcctcacttgtctcgcatgcagctgaagtgctgagttgcagtcagatacggaggaaatccttagtaaggcaatccggctcatccaggcctgcgtgggatgtcctttccagcaaatggggtggctcagccctgctcctggcaagctatggaactgggcccagatggtcacccaagccatgtggtccaaggacttcataccttgaaagcagctgccacactttcaccttttgaggcatattcaaacgtttgcacaggacaaggggaatggagagtgtttttcgacatcatgggagatggaggattgaagaacgggaacgcgttgcttcaagctgacttgacagccagatttgcagatggtgcctcgcttttgtaaactgcctacccctaatatcgaaactaccttaaggaggtggtggaataaggacaggcatccgcagtggcgggcccagtttatgtgcttggtgcagctggagcgagaggagggaagtcacaggcccctgctcaatgcgccttttcttccgcaggaaacgtgaagaagggctggtgggtggtgattggagatgccaagtccaataggcctcatctcaatcaaagaggctgacctttgccagccagaagggcccaaaggtgaaagtttggacttttttggcccccagcccactgggttgcccacaaacttacactctggtaccttccatgaagtgacgccttaacatggggatgtgccccaggagtacaaattcaagcgtgggatgtgaaagaagcctgagacagacagtgattcagattgagtccctgaggcattttactttttgggtaaagggagagttgagccctgaattaggaatgtgtacattgtaggaatcctgggttgtgggggagcaggtctgtggggcctcaggtctgggccagcccagggctggtggctgtccccgcctacctcccacttccttttcccttgttcacactctggatccaagtgacagcaggtgtccatgggtcaagcataaatcatatatagcattttccaggcatgttcctgggtagttccttttgagtctgacatttctaataaaaataatttgtagaaaccatttgtctttgtagtgattccaaattaaaagttttctttctcccaacctgaagggcacggccaaaaagatctggttattttttagcccaggaacgtgcttgttaatgagtatgtctggaggacagacctgctcattaggtgtgctgtcccctgtagccttcgtgagtcagcccagaggagggtacatgcgactgtgggcctgggcntcaagtggtacccacacatcagcactaccacaagaaccaacacttgagccttcgggaagctagattcacaggttagggggttttttctaggatggggggttcttgaaattttgcagtgtctgctcctgggaggcagcaccagaaaggggcactgaaatgtactagctggatgtgacccagtcttaataaacaggttttctaatccaaaaaaaaaaaaaaaaaaaaaaaaa

SEQ ID NO: 121796 - DNA, 518 bp, Homo sapiens
cgcgggctcggccgtgatgctctgggatcccgcgcttccgagactcgcagtctacgcgagctgcctgtttttttcctgcggggacgcgcatgagggccccgtccatggaccgcgcggccgtggcgagggtgggcgcggtagcgagcgccagcgtgtgcgccctggtggcgggggtggtgctggctcagtacatattcaccttgaagaggaagacggggcggaagaccaagatcatcgagatgaagattggataacccagaaattgactaatccagagtccgccgtacatgtgaaaatgatgccagaattccagaaaagttcagttcgaatcaagaaccctacaagagtagaggagattatctgtggtcttatcaaaggaggagctgccaaacttcagataataacggactttgatatgacactcagtagattttcatataaagggaaaagatgcccaacatgtcataatatcattgacaactgtaagctggttacagatgaatgtagaaaaaaggtat

SEQ ID NO: 121797 - DNA, 1732 bp, Homo sapiens
cgcgggctcgtccgtgatgctctgggatcccgcgcttccgagactcgcagtctacgcgagctgcctgtttttttcctgcttggacgcgcatgagggccccgtccatggaccgcgcggccgtggcgagggtgggcgcggtagcgagcgccagcgtgtgcgccctggtggcgggggtggtgctggctcagtacatattcaccttgaagaggaagacggggcggaagaccaagatcatcgagatgatgccagaattccagaaaagttcagttcgaatcaagaaccctacaagagtagaagaaattatctgtggtcttatcaaaggaggagctgccaaacttcagataataacggactttgatatgacactcagtagattttcatataaagggaaaagatgcccaacatgtcataatatcattgacaactgtaagctggttacagatgaatgtagaaaaaagttattgccaactaaaggaaaaatactacgctattgaagttgatcctgttcttactgtagaagagaagtacccttatatggtggaatggtatactaaatcacatggtttgcttgttcagcaagctttaccaaaagctaaacttaaagaaattgtggcagaatctgacgttatgctcaaagaaggatatgagaatttctttgataagctccaacaacatagcatccccgtgttcatattttcggctggaatcggcgatgtactagaggaagttattcgtcaagctggtgtttatcatcccaatgtcaaagttgtgtccaattttatggattttgatgaaactggggtgctcaaaggatttaaaggagaactaattccatgtatttaacaaacatgatggtgccttgaggaatacagaatatttccaatccaactaaaagaccaatagtaacataattcttctggggagactcccaaggagacttaagaatggcagatggagtggccaatgttgagcacattctgaaaattggatatctaaatgataggagtgggatgagcttttaggaaaagtacatggactcttatgatattgttttaggtacaagatgaatcattagaagtagccaactctattttacagaagattctataaacaagcattctccaagaagacctctctcctgtgggtgcaattgaactgttcatccgttcatcttgctgagagacttatttataatatatccttactctcgaagtgttccctttgtataactgaagtattttcagatatggtgaatgcattgactggaagctccttttctccacctctctcaacacactcctcaccgtatcttttaacccatttaaaaaaaaaaaatcttaaagccaaaattagaaaaattaactcccctaccttttccaaagtgaatttttggagtttaatggttatcatgcagcttttgaggagtcttttacactgggaaagtttgtagaaattttaaaataagttttatgaaatggtgaaataatatgcatgattttaagtattgccatttttgtaatttgggttattatgctgatggtatcaccatctcttgaaattgtgttaggtttggttattttgtctggggaaaaaatatttactggaaaagactagcagttagtgttggaaaaacctggtggtgtttacaatgttgctaatcattacaaaacattctatattgaagcactgataataaatatgaaatgcaaaacctttttaaaaaaaaaaaaaa

SEQ ID NO: 121798 - DNA, 564 bp, Homo sapiens
atgcccaccaatcacaaggatctttataagagaaacaaggagaaacaggaccttgccctgtcactcaggatggagttcagtggtccaatcatggctcattgtagcctcaaactcccaggctcaagcaatcctaccacgtcagtcttcccagtagctggtgggaccatccagttgcaggaaaacgagcttaacacgcccactgattctacattatggcccagctcttcctcccggctgcgtctccaggcccgactcctgcctcccaacaacctctttggactcagtgcctgcccatctcctggcggccttggtcggcccacagcttcctcaagccaagctccccaggcccaggcccaactccggcctcccaacaaggtctttggactcagctcccccgcagcttccagcggccctggcctaagtcgtcctcaagtcggcctggaaatgggcctggaagagctgcaagtcggcctccccgggcccagctccgtcctctcggcggcctctccaggtttaatgacggtcatggcaactttttggcacaatgaaaaatatcgcccatga

SEQ ID NO: 121799 - DNA, 736 bp, Homo sapiens
tcagtcacgcagcgcacggacgaacggcagcggcgtgcggatactgcactcactttggcggattatcggaatacctctgttactggggtattcgctggtttgttctagagtgcttttggcctgcttttggcctggttccgatttttggccgcgaagcaggcgaaaaacctggctcagactcttgacgctgccctggctgccccaccactgcttctgcccgagagtcacgtgaggctgagagtaggggcaggggcagcagtggtgccagttggggggcggtccagtgggaggagcctcagcctcgcaggctgctccgtgggactgatgactgcatgatcttctgggcacctcacggatcttcaacttggcgaagaagatgtgtgcatagcaggtccactgctgctgaccctgtcctgactcccagccctgcctgaccccgagctcaaactgctcaggctctggcacaagcctggctgccctgccactgcctctgccccagacgttggggccttgacagcctggttggaaggggacaccccagccctgcctcaacacctggggggtctccataactagcacaggcaggtgggcaaccccaaagatcccaggactcacagtaccccctgagaacatggacagtatgtgggggtagcaatggagggcaggatggttatcttctcccaggtaaaagccatttaatcctttcagtttgggacggagtaaggccttccttttt

SEQ ID NO: 121800 - DNA, 887 bp, Homo sapiens
tcgctcttcctcccggctgcatctccaggccggactctggcccgactccggcctcccaacaacgtctttggactcagctcctgcccagctcccaggggccctggtaggcccacaaacttccctaagccaagctccccaagcccagctcaggcctcgcgggggcctctccaggctcagctcctggccctgcgatgacatctgcaggccccaaatggcctccggtcggggggctcctctaggcccagcttgggcctcccggcggccttcgcaggcccaaatcgtaccgaagtcaggctctccaggcttagctccagcctcccggcggcctctgcaggcccaaggcgtcctcaagtcggcctggaagtgggcctgggaagagcagcaagttcggcctccctgggcccagctccgtcctcttcgggcggcctctccagggtgcaaaacttcctcgagttcagcctctccagggcccagctttttcctggcctcccagtggcctctttcggcccagcccagctcatggctctcggcggccttcccaggcccccgcttttgacttttggcagcctcttcaggcgcagaacttgatctccagtcggcctttgcaggcccggcctcctggcctttcgaaggcctgcacgggcccggcctcggcctcggcctcacagcggactctccacgcccagctagctctcgcctcactgcggtctccccagtccaaagctcctggctttcggccacttcggcaggtccagctcctgcctgccagtggcctctttaggcccagctcattcctcacgtcggccattccaggccccgtttttcccttccggcagcctcttggcctctaatttgtttatcttttgtgtataaataccaaaatattg

SEQ ID NO: 121801 - DNA, 429 bp, Homo sapiens
tcctgacctcaagtgatccacctgccttggcctcccaaagtgctgggattacaggtgggagccaccatgcccggctgggaaaatattttctcctccatgaaccatactctcaatgcactaactggtgctgtgacaagcaccagggacaacagttagttgcaccgggtcagttgcatcagctctccctggtgttgctgtctctccccttgcccttgcagggtgagcgcagggacagggcgtgtcccttcatgtctgtgtcactcaggtgcctggaacaggcttgaccaggatattaacaggaataacagctgctagtgtgagccaccacacctggcccacttccttctaatgctggaatgaatgttcctgtcaactttcagacacacttggccagtgcagccagctgtcctgctcttgagtgaggacaca

SEQ ID NO: 121802 - DNA, 1392 bp, Homo sapiens
ttttttacacacaaaatatcttttattctgtggaatcaaagctccacacaagtactttataagatccattattttttttttttttttgagacagagtcctactccattgcccagggtggagtgcagtggggcaatcttggctcactgcaacctccatctcctgggttcaagcaattatcctgcctcagcctcccgagtagctggaactacaggtgcgcgcccccatgcccggctaattttgtatttttagtagagatggggtttcactggattaagccaggctagtctcggaactgacctcgtgatccacctgcctcggcctcccaaagtgctgggattacaggtgtgagccaccatgcccagccctaatgtagtatttttaaatgatatgattatacaacaactttctttaaaatctaagttcacaaaaatttgtcagtacatcatctgttttatctctattgactataattaccagttgtaagaacaattctaaccatattaatacctgacagaacgttgaggcctgattataactgggatattggggtagcatccagttaaagtatcagtagagcttggatgtatcaaagaaaatattttattcaagttcccaaaacaaacttgaggagttatgctgggtttgaattgaagaaaaaaggccaagttaaaataggaaaacaaatggttttcatttggtggcagttgaaatcaaagtatacatgtgtatacattctaatccgtcatctatcccatgtggcattttccaaggttttaagagtctaccaggccaaaccctttgccactttcactgcttttgctttgcttttcccctttcttttctctcgctttgccttcagcctttttctttgccttttggttcatccatattggggtaactgtccattgctggtctagaaagagtctttttttgtttctcttataattcagtctccattttcatgtcatctttttcatcttttacctcacattgcattttctcttggcaatgtttgggtttgggtaccaccacagttgctatctcttgaacatctttcattaaaacatcaccgtctagtttgagaatacttttaagcctgctggcctcctttgggcgcattcttttttctcttttcagcacgcatctttcttttccacttactccgtaagcttttagccatgttttacctgagaaacgaacacccacacctcacgctcacgccgaccggcatggacagtacccaatatggatgaaccaaaggcaaagaaaaaggctgaaggcaaagcgagagaaaagaaaggggaaaagcaaagcaaaagcagtggaaagtgggcaaagggtttggcctggtagactcttaaaaccttgggaaaatggccacatggggatag

SEQ ID NO: 121803 - DNA, 834 bp, Homo sapiens
atgcctatcttgttcaccactgtatcctcagcacttagtggggcccagcatatagcagatgctcagtgtgacagaaaagggcaccgcactacaattcaggggtcaagggtcaacctggtccagccctctgtgggtcccaaggtggaggagacgcagtgctggggtccaggccgagggatgcctggcgcgccggaagcacctagagagcggcgcgtgcgcagcgggagtcgaagcggagatcccggggtcgcgcgagagccgcaagcggagttggtgggcgctatgctatcacccgaggcagagcgagtgctgcggtaccttgtagaagtggaggagctcgccgaggaggtgctggcggacaagcggcagattgtggacctggacactaaaaggaatcagaatcgagagggcctgagggccctgcagaaggatctcagcctctctgatgaggaaaacaacgtaaaatgcgtaattgaaaattgtaagaaagccagagatggaattggacttggggtgggtgttgagaatatatatccagaagaatgggacactttagatgaggccaagtggctgtggcagtggaagcaaatggggaaagatgtgatggtttgcttcgggaacatgtttatcaagatgcctcaccctgagacaaaggaaatgattgaaaaagatcaagatcatctggataaagaaatagaaaaactgcggaagcaacttaaagtgaaggtcaaccgcctttttgaggcccaaggcaaaccggagctgaagggttttaacttgaaccccctcaaccaggatgagcttaaagctctcaaggtcatcttgaaaggatga

SEQ ID NO: 121804 - DNA, 1391 bp, Homo sapiens
ggggggttaattccgcgtgcgcagcgggagtcgaagcggagatcccggggtcgcgcgagagccgcaagcggagttggtgggcgctatgctatcacccgaggcagagcgagtgctgcggtaccttgtagaagtggaggagctcgccgaggaggtgctggcggacaagcggcagattgtggacctggacactaaaaggaatcagaatcgagagggcctgagggccctgcagaagggatctcagcctctctgaagatgtgatggtttgcttcgggaacatgtttatcaagatgcctcaccctgagacaaaggaaatgattgaaaaagatcaagatcatctggataaagaaatagaaaaactgcggaagcaacttaaagtgaaggtcaaccgcctttttgaggcccaaggcaaaccggagctgaagggttttaacttgaaccccctcaaccagggatgagcttaaagctcttcaaggtcatcttgaaaggatgagactcaagaaccaagatgggggaccagcaaccccccagggttcatgggaggacccacggacccctccaacctttgacacctgttaagggacagggttcttgccctgttaaggggcccagcccgtcaggaatctggccatgaaaacctcttttgtagtgcttggctactctgtgatggcaggagggaaccttcagcctgtctggcttgctgggacctgggacaccaggggcttcggttggacacaagatctattgacgggccttggtagccaccagtgggtgtgtggggcagtggctgtgggggtgtaagaatgactgcaacaggcacttcccaacaatggccttgctgctcacatggaccctgcgcctgtgaggagggcgggcagggcagagtggagtgtcattccaacattcctctcagagggcccagaggtttttcaggctggtgcccatgcgattggaataaagccaggaggctcatgggtggttgctgaatgaagaacagaatcttggtggccttgtggctcaaccaacagccaatctgtggggcaggccacccccccccttcccgccaggttccaaattttgccacttttttccctgcttgattccaagagtagggttgtgccttagcagcccgttcgtggccactcgtttactcaggagggccttgcagagtccctgcacccaggccctgggtgagtggatgcgcctcttaccatatgacacgtgtcaagatgcccttccgccccctcctgaaagtggggcccggccagcactgctcgttactgtctgccttcagtggtctgaggtcccagtatgaactgccgtgaagtcaaaactcttatgtgttcattaagggctcaataaatgttagctgaatgaaaaaaaaaaaaaaaaaa

SEQ ID NO: 121805 - DNA, 985 bp, Homo sapiens
ctgttttcactctattaaatcttgcaactgcacactcttctggtccacgtttgttctggctcctgctgagctttcgctcaccgtccgccactgctgttcaccgccgttgcagacccgccattgacttccacccctctggatctggcagggtgtcagctgcgtttctgatccagcaaggcacccattgccgctcctgatcgggctagaggctcgccattgttcctgcatggctaagtgcctgggttcatcccaatcgagctgaacactagtagctggattccatggttcgcttccatgacccacagcttctaatagagctataacactcatggcataactttccatgttcccactgccaatgtgttggttgtggacctgatgtgccatctggagaaacttgccaaatatgatgacataaagaagatggtaaaacaggcattggagggtccccttcaaaggcattctggactacactgagcaacaggttgtctcctccaactttactagtgatactcattccttcacctttgatgctggggctggcactgccttcaacaaccactttttcaaactcattttctgatacgacaatgaatttggctacagcaacagggtggtggaactcatgttccacccggcttccaaggggtaagagccctgtgtaagttatagctgccaacattccaatcaaggtcagagaactgatagaaaatgacaatgcagctaaaccatgactacttccaagttcttcaaatagggacttcactttttcccactctgtagaatttttgttattgggaacattcaatggaacaaaggcactgactccaagattgtcacttccataaacaatagcactagaagtgagcaccacccaactgagtgagtccccttctgatacagcagtacagctgtaggtcctccctggacccaccctgccctggcagatcttctgcaataaccaagcaaatgccagttccttcat

SEQ ID NO: 121806 - DNA, 1013 bp, Homo sapiens
tcaggcgcgcagggcccgctctcgaaactcgcgcgggctctcgcagtcagccgcgcggcctttagccgcgaaaacagcgtggcgcacggtggcgccgccgcagccgtgggccgccgcgcccaggtagcgctccagctgcccgcatagctcctgcagcgccacctcgccggggcccgcgcgcgcctgccagagcagcgcccacagcccgagccccagactccaggccccgccgccgcccacgtccagctgcggggagcagcgttccagaggcggccacagcgccgctagctgccagcgcgcgccgcggaaccccgcggccgagaaccggccggcccagttgggcgggaacacggcagggcagctgggcggggacacagcggccttgggtttgggctccagccccagccgggccccctcgcgccgctgcggctgctgcgcggtgaggtcgtgacaagtcacagctaacttgccctccgcgccattccacgccaccaggaagcgcagccggtgcctctcggcatcggcgaagaggccttgccggaccggcgcccagccctccaggctgtcgagctgctcgtcctccatggccgtcggcggcagcggccctaggactcggcgggcgcgggcctgacctcgtcgcactgcattgtgaaatccactggcccttagaatttcaaagtctgtgctgttgtcttctaaccagtcgtggtggcgaagcctcatgccatcctgagtttcacttgtttatgcatgactttctccctggaagcttttaggagtttgtcttttccttggtgagctgaaatagcacaacagtgtacttagtgtgggtcttttttcattcattatgctgggtacaccaaatgaacaggcctatggataggctctttcaaagttggagtcttgaatcttgtcatatttttgttgttaactttctcttttccattttatttgttcatttggaagtgtctgttaattggattttagacctcttgtcttgagtcttatatctc

SEQ ID NO: 121807 - DNA, 555 bp, Homo sapiens; identical to SEQ ID NO: 116130

SEQ ID NO: 121808 - DNA, 799 bp, Homo sapiens
cctgggcaagtatatcactggtgacaaggtgctggcctcaaacacctaccttccaggacctcctggcctgcctgggggccagggccctcccggctcaccaggaccaaagggaagcccaggctttccccggtatgccaggccttctggggcagcccggctcacggggctcaattgggacccatgggaccatctcttgatctgtcccccactaagcaaggccggaggggccctgtgggtcctccagggccaccagaaagagatggttctaagggggagagaggagcgcctgggcccagagggtctccaggaccccctggttctttcgacttcctgctacttatgctggctgacatccgcaatgacatcactgagctgcaggaaaaggtgttcgggcaccggactcactcttcagcagaggagttccctttacctcaggaatttcccagctacccagaaaccatggacctgggctctggagatgaccatccaagaagaactgagacaagagacttgagagcccccagagacttctacccatagcacatcccaacaccgtcacgccaaaggaagagaaagatcaactcacctgcaagttaaaccatctaaagagaagaaagaccacttggagacctagaaaacatacatttttctcttctcttcgtcctgacgatctgtccactcctcttcttccaaatacgatgctattttcagagccctcttgtacgcctgcagacatgagggagtgaatgattgatttacctgcttctcactaagagtccattggggaggtttgcatagt

SEQ ID NO: 121809 - DNA, 373 bp, Homo sapiens
gatagggaagtaattttatgaccttgggccattttcacaaagaaatgagatctaagtttcagaacttgactgtcttctttaaaacaccacattttacatgtttcaagacgattacctagattttggggggagagatgtggattagatttggagaccatctcaccagattttgacatttcaggttagtactccagtagttaagcaaggaccagtgtcacagtcagccacacagcagcctgtaactgctgacaagcagcaaggtcatgaacctgtctctcctcgaagtcttcagcgctcaagtagccagagaagtccatcacctggtcccaatcatacttctaatagtagtaatgcatcaaatgcaacagttgta

SEQ ID NO: 121810 - DNA, 1639 bp, Homo sapiens
tgcgcccgctctcccccctccccgacacacactcacaggccgggcattgatggtaatgtatgcgaggaaacagcagagactcagtggatggctgtcacgaccggaggggggactcgcagccttaccaggggggtgatgttttacacgcactgaactattcatggcagaatcaccccatgtggcggctatcacaccacatgaaaagatggcgagacggccttagatccttcaccactccatgaactgctgctgcatatctgatagtccctgaaaacaaattaccagtgacagcacaaggtcacagtaaggccaaaaatgtgcatactcacagagttagagagagggatggtgggaccagttactctccacaagaaaattcacacaaccacagtgctcttcatagttcaaatttcacattctttctaatccaagcaataacccaaggcaaaactttcagatgcaatttttaagccttatgattctggcagatgactggtctggagcatattagctcttctggggaaaagtactactacaattgtcgaacagaagtttcacaatggggaaaaaccccaaagagtgggcttggaaagaggacagagaccaaaggatggcaaacaagatgggcagtcaacaggcttcccaaatgttaggggattacaggaaggagagggtgatgccaaggcaacagcccacttagtggggtttggcccagtggggattgggaggacaagcattcccagtgatgcccagtagtttgctccccacagaatattttgtctcaaacaagcagacacaatgacagagactacagactgccaagagcagagactcacagtagttcctacgcccagtacagcaccccatcaaacctagtggttcatccaactgctaccccaagcactgttccttctagtccatttacgctacagtctgattcaccagccaaagaaatcatttgatgctaatggagcatctactttatcaaaactgcctacacccacatcttctgtccctgcacagaaaacagaaagaaaagaatctacatcaggagacaaacccgtatcacattcttgcacaactccttccacgtcttctgcctctgcgactgaaccccacatctgcacctccaacatctgcttcagcgggtccctgtttctcctgttccacagctcgccaatacctcccttacttcagggacccaaatcttcttaggacaattgctgtcctgctttgcaaggccacggtggcagctttaattaattcttaatgtgggacatatcttaaaattaaatgaagttcttacagcagctgtgacacaagcctcactgcagtctataattcataagtgtcttactgctggaccatctgctttcaacataacgtctctgatttctcaagctgctcagctctctacacaagcccagccatctaatcagtctccgatgtctttaacatctgatgcgtcatccccaaggatcatatgtttctccaaggaataaggcacacctcaaacttaacacagtccctattcaaacctttggattcagtactcctcctgtttcatcacaggccaaaggttaggtactccagcctggcgagagagtgagactccatctcaaaaaaaaaaaacaagaac

SEQ ID NO: 121811 - DNA, 2372 bp, Homo sapiens
atgcacttaattcctccagcaacaaattgtgacacacttgtggaatgttgtctaccagggaagctcactagagatttagtgtgcacggcttttactggatttgggaccagttactctccacaagaaaattcacacaaccacagtgctcttcatagttcaaattcacattcttctaatccaagcaataacccaagcaaaacttcagatgcaaatattttgtctcaaacaagcagacacaatgacagagactacagactgccaagagcagagactcacagtagttctacgccagtacagcaccccatcaaaccagtggttcatccaactgctaccccaagcactgttccttctagtccatttacgctacagtctgatcaccagccaaagaaatcatttgatgctaatggagcatctactttatcaaaactgcctacacccacatcttctgtccctgcacagaaaacagaaagaaaagtattacagcaactgtcaaaacacaacaggaaagtaatgattagaagtgcacttattaccagtatcattttagatcttctgtatattgaaaaggatttgagataccagaaaaatatagaatctacatcaggagacaaacccgtatcacattcttgcacaactccttccacgtcttctgcctctggactgaaccccacatctgcacctccaacatctgcttcagcggtccctgtttctcctgttccacagtcgccaatacctcccttacttcaggacccaaatcttcttagacaattgcttcctgctttgcaagccacgctgcagcttaataattctaatgtggacatatctaaaataaatgaagcccagccatctaatcagtctccgatgtctttaacatctgatgcgtcatccccaagatcatatgtttctccaagaataagcacacctcaaactaacacagtccctatcaaacctttgatcagtactcctccgtgtttcatcacagccaaaggttagttactccagtagttaagtcaaggtaccagtgttcacagtcagccacacacagcagcctgtaactgctgacaagcagcaaggtcatgaacctgtctctcctcgaagtcttcagcgctcaagtagccagagaagtccatcacctgggtcccaattcatacttcttaatagtagtaatggcattcaaatggcaacagttgtaccacaggaattctttctggcccgattccacgtgtttcatttaacgcctggcactaggcggccaccatttcagtggaaaatctcattaaaacacgtttcaagggatgggcctgcagattcatggcaggaggaaggcagggcatcaaggtttacggcggaaggaaggcggcattaacaggggggaactattttcacatgttccgaaatttgtactgaattaaaaaatttaagatctttagtccgagtatgtgaaaattcaagcaactttgccgagagccaaaggatactattttttgagacaacaaaattaagggaaccctgaaaaagccctaaaaaaatcccagaatcccccctccatggtgtggaaagatgtggaaataaattgccaccatggttttgaagaaaccaggaaacctgtaaaatcctgttgcccccccaaccctaaacatttttgaagcctgcatttaaagtagacctttggacccgttaagcctgggccaaaggaaatgaccaaggggacggggtcctgtgagagtcaattccaggggaaagataccaagattgatttgtaaaaccccttgaaatgtagatttcttgtagatggtatccttcacgttgtaaatatgttttgtagagtgaagccatggggaagccatgtgttaacaggagctttaggacatcccaaaacttaatccaatgcttggaggtgggctaaaataccttagcctttttacctgttaaaccttgtctgcaaaattagcttttttaaaaaaaaaaaaaaaaaaattgggggggttaatttatcattcagaaatcttgctttttaaaaaattcagggcaagcgccaggcgatttgtgtttaaggataccattttgaaccatatgggcagtgtacaaaatatgaaacaactgtttccacacttgcacctgatccaagagcagtgcttctccatttgttttgcagagaaaggtttttcatttcccgtgtgtttccatttccttctgaaattctgattttatccatttttttaaggctcctctttatctcctttcttaaggcactgttgctatggcacttttctataaccttttcattcctgtgtacagtagcttaaaattgcagtgattgagcataacctacttgtttgtataaattattgaaatccatttgcaccctgtaa

SEQ ID NO: 121812 - DNA, 2286 bp, Homo sapiens; identical to SEQ ID NO: 117722

SEQ ID NO: 121813 - DNA, 3632 bp, Homo sapiens
  misc_feature (1)...(3632): n = a,t,c or g
atggcttttctgaccaatgtacttgcttttcatttcatttttgtttttgttaaagagggtaagccagagaaattttcatttggtcttctggatcttccttttcgtgttggagttccatttaatatccctctggagtttcaggatgaatttggtcataccagtcaactagtaactgatattcagccagttcttgaagcaagtggtttatctttacattatgaagaaataaccaatggaccaaattgtgtaattcgaggtgttacagccaagggccctgtaaactcttgtcaaggcaaggtngctccaaaccttccagtctatgttgtagattgcagtagttctggaaccagtattttaacaggatctgcaattcaagttcagaatattaaaaaagaccagacgcttaaagcaagaattgaaatacctagttgtaaagatgtggcacctgtggagaagactattaagttgcttcccagtagccatgttgcaagactacaaatattcagtgtagaaggacaaaaggcaattcagatcaaacatcaggatgaggttaattggatagcgggtgatattatgcataatcttatttttcaaatgtatgatgaaggagaaagagaaatcaatataacatcagctttagcagaaaaaattaaaggtctgcttcctgatgtgcaagtaccaacatctgtaaaagatatgcgctattgccaggtttcattccaagatgatcatgtgtctttggaaagtgcgtttacagtaagcatgttggaactacttcaattaatggtgtcactaaagacttctaacttgttaaacaatttcagaccacttcctgatgaacctaaacatttaaaatgtgaaatgaaaggaggaaaaacagtacagatgggccaagagcttcaaggagaagtagttataataattacagatcagtacggaaatcagattcaagcattttcaccaagttctttatcttctttgtcaattgctggggttggacttgatagctcaaatttgaaaacaacctttcagtccattccagtgattaatggaagagatttacagaaccctattattgttcaactttgtgatcagtgggataatccagcaccggtacaacatgttaaaataagtcttacaaaagctagcaatttaaaggttaaagccatctataacaaaagtatcatagaaggacctataattaagttaatgattcttccagacccagaaaaacccgttcgtctcaatgttaaatatgacaaagatgcatccttcttagcagggggtcttttcactggatatgttcgtccagtaccagtgccacgcagtttaaatagtgatatttcctattttggtgttgggggcaagcaagctgtcttctttgttggacaatcagccagaatgataagcaaacctgcagattcccaagatgttcacgagcttgtgctttctaaagaagattttgagaagaaggagaaaaataaagaggcaatatatagtggatatattagaaacagaaagatttctatgtttgaaaaagggaaggtacctaagattgtcaacctaagggaaatacaagacgacatgcagacgttgtatgtaaacacagcagctgatagttttgaattcaaagctcatgttgaaggagatggtgtagtggaagggattatcccttatcatccattcttatatgatagagaaacttaccctgatgatccatgctttccatcaaataattttggaatcagctttgtacattcacttgaagtaattctanaattaaaagatgaagatgatgaagatgattgtttcatacttgagaaagcagctagagggaaaaggcctatttttgaatgtttttggaatggacgattaataccatatacatcagttgaaganagagggcttgcaccaattgaatgctacaataggatatctggtgcattattcactaatgacaaattccaggtcagcacaaataaattgacgtttatggatcttgagctaaaattgaaagataagaacaccctttttacaaggattttaaatggacaggaacagcgaatgaaaattgacagagaatttgctttgtggctgaaggactgtcatgagaagtatgataaacaaataaaatttacactttttaagggagtaattacacgtcctgatcttccttctaaaaagcaaggtccctgggcaacatatgcagcaatagaatgggatggaaagatatacaaagcaggacagctggaacctcaggcactatatgatgaagtaagaactgtgccaattgcaaagctggataggacagttgctgagaaagctgttaaaaaatatgtagaagatgaaatggcaagcctgtggatcctgggctacaaacctgtacagcacatgactgtactgagtactgcaggcaattgtaacacaacgttttggaagaaaataaacattaccgtgatactaagatgtagatctctgaccaaggtcctactggcaactgagcgaacatttgaaacagctggtgtaggtggtttaattttaggtcaagttgaagaagcaagattaaaagaggcccaattgcgaaatgaactaaaaatacataatattgacattcctacaacacaacaggtgccacacattgaagcacttctgaaaagaaagctatcagaacaagaagaactgaagaaaaaacctagaagatcgtgtactcttccaaactatactaaaggcagtggagatgttttgggaaaggggcagagtacaggactgggacccgtggaagttacacagtccagcccatcatctaggacatcagagtacttctggttaacaaagttctgctggctggaagactgggcatctggtgaaagcctcaggctgcttccactcatggtggaaggtgaaggggagccagtgtatgcagagatcatatggcaaaagagggatgaaactgttaaagatggagtcaccttatacctgctacagtcggtcaatcagttactactgacagctacgaaagaacgaattgacttcttacctcactatgacacactggttaaaagtggcatgtatgaatattatgccagtgaaggacaaaatcctttgcnaatttacacgcacgtgggagaccgcgaagcgcaggcagcgttaaaactagggcgctggagtcacccccgtaccccgaatgccgtcggcgctccagggcccccagagggtgcggggggcggggacgctgtgacgtcacagagcgcccttctgacgttctcacggacccgctttgcctcgggggcccacgctggagcccacccagtactactaagaaatgaggaggaaaaaggggcgccggctctcgtagcgcctattttctcggcagagggacccacgtgctcgctttggtggactctgcgcccggcgagtaccgccggcctgaagcttcccgcacgccgcgtccacgcgacccagccagagagggctcagtcagccggcgcggcacctacaagctcagtcgggatcctggagaggcgggaaggcagcggggccctttccacagagagaacacagctcttcgggagattcccccgctgccacccgagccctgctctcccgcctcggcctctgaggactacccgcag

SEQ ID NO: 121814 - DNA, 594 bp, Homo sapiens; identical to SEQ ID NO: 119164

SEQ ID NO: 121815 - DNA, 561 bp, Homo sapiens
atgacagtggattatcgtaagcttaaccaagtggtgagtccaattgcagctgctgtaccagatgtggttttattgcttgagcaaattaacacatctcctgatacctggtatgcagccattgacttggcaaatgcctttttctccattcctgtccataaggcccaacagaagcaatttgccttcagctggcaaggccagcaatatacctttactgtcctacctcaggggtatatcagctctctggctttgtgtcataatcttattcgaagagaccttgatggctttttgcttctgcaaaatatcacactgctggtccattatgttgatgacattatgctgattggatccagtgagcaagaagtagcaaatgcactggacttattggtgttttctgaccatctagccataaagtgggtcatgcacagcagcattgcatcatcaagtggaagtggtatatgcgtgatcaggctcaagaaggtcctgaaggcacaacctgcaccaatggcctcatggggggttctctatgatcagttgacagaagaagagaagattagggcctag

SEQ ID NO: 121816 - DNA, 1275 bp, Homo sapiens
atggaaaagaatgacatagaccagagccgaagaagaaaagttgttgagatgaacgaaaacgtccaattagttagatatggagagcaagcaagtgaccttaaaacagcaacaaaatttaaatctccatcagaagtaaaacatatcagattcattcaacaagcatttattgggagcaaattgctgatgaggccctggactacagtaacgaagcagatactgagcctcaaatctgctaagattgccttgagcgagagtcttataccctgtagaaaaagagctgaatttgtggaaaaacagacacaagcttttatcatgcaagtgtctgacctgcaacaaaaggtgcatgcacagcctagccaggtgtctactgttaaagtgaaggcattgattggaaaagaatgggaccctgccacttggaatggggatgtgtgggagggtcctgatgaagctggggacactgagtttgtaaattctgatgaagcttttttgccagaagcaacagctttcccatccccagaagtgggaaatgatcagacagtttggggactactggacactggctctgagctgatgttgattccaggggacccaaaatattaccgtggtcctccagttaaagtaggggcttatggaggtcaggtaattaatagaggtttagctcaaatccaactttcaatggatccagtgggtcaccggactcgtcctgtggtcagttccccactgccagaatgcataattggcacagacatacttagcagcaggcagaacccccacattggctccctgactgatatcacactggtccactacattgatgacattatgctgattggatccagtgagcaagaagtaacaatcacactggacttattggtccaggctgttgcacaagctgctctgccagttgggccatatgacccagcagatccaatggagcttaaggtgtcagtggcagatagggatgctgtttggagcctttggcaggcccccatagttaccatgagacctgaacgacctatcatgaactgggtgctttctgacccatctagccataaagtgggttgtgcacagcagcattccatcatcaaatggaagtggtatatacgtgactgggctcgatcgggtcctgaaggcacaaaccactcacggcgagtgtgttctctccacaggtccaggcgccgtcagcgaggtgagcaacggcacgtcgaggagggcaggctgcgtctggctgctgcctcttctggtcttgcacctgcttctcaaattttgatgtga

SEQ ID NO: 121817 - DNA, 2031 bp, Homo sapiens
tcattgcaggtcagccacttgcatgatacgagcttgtgtctgtttttccacaatttcagctctttctctacaggagataagactctcactcagggcaatcttagaatatttgagggtcagtatctgcttctgaagctgggagacagaatccctgagttcatcattttctttcatcactttgtccactgaacttaggagcaaacaaccagcttcattatgttccttggttctccacacatgatcaaaggtattatatatagagtcactaaactccttgcacgatccacaaggtcccacaataggctgtctgcaagcttgaggagcaaggagagccagtccgagtctcaaaactgaaggacttggagtccaatgttcaagggcaggaagcatcatgatttcagccgaaccattcacgaaggggaattcaagtgttctaactttcccaataaaaagtggggtatcagtatcttcctcattagagcctttaatggtggctattatagtgccaaccaaatcaattccagtatggttgtcgtagtcatccgtgatactaagatgtagatctctgaccaaggtcctactggcaactgagcgaacatttgaaacagctggtgtaggtggtttaattttaggtactaacttcacaggttgattaggcaggacttcaactataacatttgctgggggtcggttcccactggtagacagcttccacattttcatggaaatacgtgctggattaatgtttttaatgatactgtcatcttcagaaataacactaatcataaaatcagtgaaaagaccccctgctaagaaggatgcatctttgtcatatttaacattgagacgaacgggtttttctgggtctggaagaatcattaacttaattataggtccttctatgatacttttgttatagatggctttaacctgaagagtatgctctcccctaggggcaaaaacactgaatactcccaaattagccctgcctttctcatctgttttatgctgttggtttgaaggcatgagctttaaattgctagcttttgtaagacttattttaacatgttgtaccggtgctggattatcccactgatcacaaagttgaacaataatagggttctgtaaatctcttccattaatcactatttgttcccctaagatcagacactgttttggaactggagctccaaataccattccccgaagtttatccattggaggagctttattctgaaggcccccaaactttccattacttcgaattcgatctccatctctggtcagcagtgtaggacagtgtgtaattttaacaacctcttttctataatgattggccgcatccagattatccaaaataatggtgtctcctaacagcataccaaatactgtttcacaatgttctacattatctggaaatgttaacaagtctcgagcaaagactggatctccaatgggtttaaaatacaattttccatttcggaaatgaggtagagatcttttccaatctggaagagtcttcttgtaaatagaatcaaggggcaacacctgctgacgaccttgggtttcatcatagatacgacgtgcagcgtcagtggttagggtgactacacagtccatgtcacttgccagatgccaagaaataaccatcgcagctctatcatcttcaatttgtgctagatgtgcaatctttcccaaaacatctccactgcctttagtatagtttggaagagtacacgatcttctaggttttttcttcagttcttcttgttctgatagctttcttttcagaagtgcttcaatgtgtggcacctgttgtgttgtaggaatgtcaatattatgtatttttagttcatttcgcaattgggcctcttttaatcttgcttcttcaacttgacatttcatttcattaagaagctgttggctggcttcaaataaacttttatacataacaatagactgagataattggtccttttcttttgtaagtgctgccatttgttgctgcttcttaacatcattgtaaaacat

SEQ ID NO: 121818 - DNA, 474 bp, Homo sapiens
atgactccaggggacttaaaacatcattgtggtcttccagttaaactaggggctcatggaagtcaggggtatatcaactctccggctttgtgtcataatcttatttggagagatcttgatcgcttttcgcttccgcaagatatcacactggtccattacattgatgacattatgctgactggatccagtgatcaagaaatagcaaacacactggacttattgcctgcactgatggcctcatggggagttccctatgatcagctgacagaggaaaagaagattagggcctgcttcacagacggttctgcatcatatgcagacaacacccgaaagtggagagctgcagcactacaacccctttctaggacatccctgaaggacaacaatgaagggaaatcttcccagtgggcagaacttcgagcagtgcacctggttgtgcactttgaatggaaggagaaatggccagatgtgtga

SEQ ID NO: 121819 - DNA, 3384 bp, Homo sapiens
atgaagaacataaaaagaaatgaacatgaacggcatttggccacagtttatgtctttccaattttatcttccaccatctaccgctcagttctcctcacttccagccaaacaataatttacacgcacgtgggagaccgcgaagcgcaggcagcgttaaaactagggcgctggagtcacccccgtaccccgaatgccgtcggcgctccagggcccccagagggtgcggggggcggggacgctgtgacgtcacagagcgcccttctgacgttctcacggacccgctttgcctcgggggcccacgctggagcccacccagtactactaagaaatgaggaggaaaaaggggcgccggctctcgtagcgcctattttctcggcagagggacccacgtgctcgctttggtggactctgcgcccggcgagtaccgccggcctgaagcttcccgccgccgcgtccacgcgacccagccagagagggctcacggcggacggcggcgggcctggtggggcctctgtggggactgaggaggatggcggaggcgtcggccacaggacggtgtacttgtttgatcggcgcgaaaaggagtccgagctcggggaccggcctctgcaggtcggggagcgctcggactacgcgggatttcgcgcgtatgaaactgttaaagatggagtcaccttatacctgctacagtcggtcaatcagttactactgacagctacgaaagaacgaattgacttcttacctcactatgacacactggttaaaagtggcatgtatgaatattatgccagtgaaggacaaaatcctttgcgatatgttcgtccagtaccagtgccacgcagtttaaatagtgatatttcctattttggtgttgggggcaagcaagctgtcttctttgttggacaatcagccagaatgataagcaaacctgcagattcccaagatgttcacgagcttgtgctttctaaagaagattttgagaagaaggagaaaaataaagaggcaatatatagtggatatattagaaacagaaagccctctgattctgttcacattacaaatgatgatgaaagatttctacatcatcttatcatagaggagaaggaaaaagatagctttactgctgtggttatcacaggggtacaaccagaacacatacagtacttgaaaaattatttccacctttggacacgacagttagcgcatatttatcactactatattcatggcccaaaaggaaatgaaatacgaacatcaaaagaagttgaacctttcaacaatattgatattgaaatttctatgtttgaaaaagggaaggtacctaagattgtcaacctaagggaaatacaagacgacatgcagacgttgtatgtaaacacagcagctgatagttttgaattcaaagctcatgttgaaggagatggtgtagtggaagggattatccgttatcatccattcttatatgatagagaaacttaccctgatgatccatgctttccatcaaaattaaaagatgaagatgatgaagatgattgtttcatacttgagaaagcagctagagggaaaaggcctatttttgaatgtttttggaatggacgattaataccatatacatcagttgaagactttgactggtgtactcctcctaagaagagagggcttgcaccaattgaatgctacaataggatatctggtgcattattcactaatgacaaattccaggtcagcacaaataaattgacgtttatggatcttgagctaaaattgaaagataagaacaccctttttacaaggattttaaatggacaggagtggaaagagctgtcgatggagggctacccattaccctcccctcctccacaaaggagctgtcacctccccttaataggcaaacaactcaggggccatccccatttgtttcttaaacctgcaagtttctggtgggtggagtctcctgcttcagaacaaatgatatctttctcccaagtcagaggtctcaaggctcaacaccacgcagaagctgccaaggtgtgggacttccaccctctgaagccacagcccaagctgtacgttggcccctttcagccatggctggagtggctgggaacagggcaccaagtccctagactgcacactgcagatgttaagaagcagcaacaaatggcagcacttacaaaagaaaaggaccaattatctcagtctattgttatgtataaaagtttatttgaagccagccaacagcttcttaatgaaatgaaatgtcaagttgaagaagcaagattaaaagaggcccaattgcgaaatgaactaaaaatacataatattgacattcctacaacacaacaggtgccacacattgaagcacttctgaaaagaaagctatcagaacaagaagaactgaagaaaaaacctagaagatcgtgtactcttccaaactatactaaaggcagtggagatgttttgggaaagattgcacatctagcacaaattgaagatgatagagctgcgatggttatttcttggcatctggcaagtgacatggactgtgtagtcaccctaaccactgacgctgcacgtcgtatctatgatgaaacccaaggtcgtcagcaggtgttgccccttgattctatttacaagaagactcttccagattggaaaagatctctacctcatttccgaaatggaaaattgtattttaaacccattggagatccagtctttgctcgagacttgttaacatttccagataatgtagaacattgtgaaacagtatttggtatgctgttaggagacaccattattttggataatctggatgcggccaatcattatagaaaagaggttatagttgaagtcctgcctaatcaacctgtgaagttagtacctaaaattaaaccacctacaccagctgtttcaaatgttcgctcagttgccagtaggaccttggtcagagatctacatcttagtatcacggatgactacgacaaccatactggaattgatttggttggcactataatagccaccattaaaggttctaatgaggaagatactgataccccactttttattgggaaagttagaacacttgaattccccttcgtgaatggttcggctgaaatcatgctttttgatgaaacacaaggaaaacctgctgttgcagtgatagataatggaagaggaatgacctctaaacagcttaacaactgggccgtgtataggttgtcaaaattcacaaggcaaggtgactttgaaagagctctttttgcaaaacattcaggagtggaatctagtggagttatatatcagaatgtgcttgtagaaaatatcctgaatgaggatgtcacagggaaaacaaaatgtgctaaaagccatcagacataa

SEQ ID NO: 121820 - DNA, 333 bp, Homo sapiens
atgattagacatttcagggaccactggacatgctctgagctgacattgattccaggggacccaaaacctcattgtggtcctccagttaaagtagaggcttatggaggtcaggcccaccagaagcaatttgcctttagctggcaaggccagcaatatactgttactgtcctacctcaagggtatatcaactctctgactttgtgtcataatcttatttggagagaccttggtcgcttttcacttctgcaagatatcacactggtccattacattgatgacattgtgctgattggatccagtgagcaagaagtagcaaacacactggacttattg

SEQ ID NO: 121821 - DNA, 390 bp, Homo sapiens
ggtaactgtgcattggggaaaggaaatgatcagacatttcggggattactggacactggctctgagctgactttgattccaggggacccaaaacatcattgcgatcctccagttaaatgtgcagccattgacttggcaaatgcctttttctccattcctgtccataaggcccaccagaagcaatttgccttcggctggcaaggccagcaatatacctttactgtcctacatcaagggtgtatgaactcactggctttgtgtcataatcttattcagagagaacttgattgctttttgactccagaagatatcacactggaccattacattgatgacattatgctgattggatccagtgagaaagaagtagcaaacacactggacttattg

SEQ ID NO: 121822 - DNA, 728 bp, Homo sapiens
gtgctgtaccagatgtggtttcattgcttgagcaaattaacacatctcctgctacctggtatgcagccattgacttgggaaatgcctttttctcgattcctgtccataatacccaccagaagcaatttgccttcagctggcaaggccagcaatatatctttactatcctacttcaggtgtatatcaactctccagctttgtgtcataatcttattgggagagattttgattgctttttgcttctgcaagctatcacactggtacattacattgatgacattatgctgaatggatccaacacactggactcatgggtgagaaatttgcatgccagaggatggaaaataaatccaacaaaaattcagggagcttctacctcagtaaaatttctagggatccagtggccatatgacccagcagatccaatggtgcttgaggtgttaatggcagatagggatgctgtttggatcctttggcaggcacccataggtgaatcacagcagaggcctctaggattttggagtaaggccctgccatcttctgcagataactactctccttttgagagactgctcttggcctgttactgtgctttcgtggaaactgaacgtttgactatgggtcatcaagtcatcgtgcgacgcgaactgcctatcatgaactgtatgctttctgactcatcaggccacaaagtgggtcacgcacagcagcatcatgaaattgaagtg

SEQ ID NO: 121823 - DNA, 529 bp, Homo sapiens
ggagacctctggccttttaccagggtaactgtgcattgggaaaagggaaatgatcagacactttggggactactggacactggctctgagctgacgttgattccaggggacccaaaatgtcactgtggtcctccagttaaagtaggagcttatagaggtcagaagacagatggatcttggagaatgacagtggattattgtaagcttaaccaagtggtgactccaattgcagctgttgtaccagatgtgatttcattgcttgagcaaattaacacatttcctggtacctggtatgcagccactggcttggcaagtgcctttttctccatctctatccataaggcccataagaagcaatttgacttcaactggcaaggccagcaatatacctttacagtcctacctcaggggcatatcaactttccagctttgcatcataatcttatttggaaagatcttgattgctttttgctttcacaagatatcacactggtccattacattgatgacattatgctgattggatctg

SEQ ID NO: 121824 - DNA, 837 bp, Homo sapiens
atgtcactgtggtcctccagtaaagtagaggcttacggaagtcaggtacttaaaggagttttagctcaggtccaacttacagtgggtccagtgggtcctcggactcatcctgtggtcattttcccagtgccagaatgcataattggcatagatatgcttagtagcaggcagaacccccacactggctccctgactggtagggtgtggactattatggtgagaaaggccaaatggaagccattagagctgcctctacctagaaaaatagtaaatcaaaaacagtatcacatccctgaagggattgtggagattagtgccaccatcaaggacttgaaggatgcaggggtggtgattcccaccacatccccattcaactctcccatctggcctgtgcagaagacagacggatcttggagaatgacagtgggttactgtaagcttaaccaagtggtgactccaattgcagctgctgtaccagatgtggtttcattgcttgagcaaattaacacacctcctggtacctggtatgcagccattgacttggcaaatgactttttccccattcctgtccataaggcccaccagaagcaatttgccttccgctggcaaggccggcaatacacctttactgtcctacctcaggggagatgggaaataaatatgactaaaattcagggaccttctacctcagtaaaatttctaggggtccagtggtgtggggcttgtcaagatattccttctaaggtgaaggataagttgctgcatttagtccctcctacaaccaagaaagagcacaatgcctatctggatttcggagggaacacattcctcatttgg

SEQ ID NO: 121825 - DNA, 469 bp, Homo sapiens
ctccgacgttcagtgccggggcaagcaagctgtcttctttgttggacaatcagccagaatgataagcaaacctgcagattcccaagatgttcacgagcttgtgctttctaaagaagattttgagaagaaggagaaaaataaagaggcaatatatagtggatatattagaaacagaaagccctctgattctgttcacattacaaatgatgatgaaagatttctacatcatcttatcatagaggagaaggaaaaagatagctttactgctgtggttattacaggggtacaaccagaacacatacagtacttgaaaaattatttccacctttggacacgacagttagcgcatatttatcactactatattcatggcccaaaaggaaatgaaatacgaacatcaaaagaagttgaacctttcaacaatattgatattgaaatttctatgtttgaaaaagggaaggtccggtac

SEQ ID NO: 121826 - DNA, 1460 bp, Homo sapiens
ggtaccctgcttctgctggcttaatgcttcagaactttggtgtcattggtctcagataccactttgctatccactctccggctgctggtggtcttttggatggtttgcatgcagtggctgctatacagggcatcaccaagattgagaccacacctaaccatcagagagcaccagcacactggaccctactgacacaacaagctcacctgcagccttccccactccacttcaacctccccctgacactttgcttaatgcactgtcctacagccatcccccattgctttgccgatgcacgcacatgggtgaacctccccacttcttcactgataggacataaaaaagaaaatctgaaagaattcatctctggcagccttatagtacatgaaattttggaggaagtccttcaggcagaaggagacttccagccttttaccagggtaactgtgcattggggaaaaggaaatgatcagacatttaggggactactggacactggctctgagctgacattgattccaggggatccaaaacatcattatggtcctccagttaaagtagggggcttatggagctcagctgctgtagcagatgtggtttcattgcttgagcaaattaacacatctcctggtacctggtatgcagccattgacttggcaaatgcctttttctctattcctgtccataaagcccaccagaagcaatttgccttcagctgccataaagtgggtcgtgcacagcagcatccatcatcaaatggaagtggtatatatgtgatcaggcttgagcaggtcctgaaggcacaagtgacctcagcagaggaggatgttaataatcaagtggataggatgacccattctgtggacaccgctcagcctctttctccagccacccctgtcattgcccagtgggcccatgaacaaagtggccatggtggcatggatggaggagatgtatatgggttcaagttgacaagggttggacttgtgatggttaatactgagtatcgacttgattggattgaagggtacaaagtattgatcctgggtgtgtctctgccagcacagctagaatataagcaggcagaaaaatatgaaaacagagactggcctagcatcccagcctacatctttctccggtgttggatgcttcctgccctcgaacatcgggctccaagttcttcagttttggaattcagactggctctccttgctcctcagcctgcagacagcctattgtgggaccttgtgatcatctgggttacctatcttcttccaccttcaaatatcagagatccagattctccagactttgtactctggaacttgcaccagcagcttcccaggtgcttaggcctcagtctcagattgagttacagtgtaggcatccctgtttctcaggccttcagacttgaactgggctatgccactggcatccctagttctgcagcttgcagatga

SEQ ID NO: 121827 - DNA, 636 bp, Homo sapiens; identical to SEQ ID NO: 120791

SEQ ID NO: 121828 - DNA, 1431 bp, Homo sapiens
atgtgggaggaccctgatgaagctggggacactgagcttgtaaactctgatgaacctttcttgctagaagaaacagcttcctcatccccagtagtggcaaaatcccctcctcaatccatgctgccttcagcctttccacctttgtttgaggagataaactctcttctgcctgaggcaatagtgatggcctcccctgaggcagttgccagtcaagataatgttgattctcctcagaagccacccccaatactcctatttgcttctagacctataactagactaaagtcctggcaggcccctagagatctaacagtgggaaccacagtcactcaactacaaaatttaaatacaatgggaataattggatcccgaggtggcaggggccaagtggcagtactcaatcatcaaaggcaagaaaaagtaaatcaaaaacaatattgcatccctggagagaaggcggagattcatgccaccatcgaggacttgaaagacacaggggtgatgattcccaccacatccccattcaactctcctatttggcctgtgcagaagatagatggatcttggagaatgacagtggattattgcaagcttaaccaagcagtgacttcaattgcagctgctgtaccaaatgtggtttcattgcttgagcaaattaacatatctcctggtacctggtatgcagccaacttggcaaatgcatttttctccattcctagaagcaatttgccttcagctagcaaggccagcaatatacctttactgtcctacctcagaggtatatcaactctctggctttgtgtcataatcttattcagagaggtcttgatcgcttttcacttccacaagatatccgcactggtccattacattgatgacattatgctgataggatccagtgagcaacaactagcaaacacactggacttattggtgagacatttgcatgccagaggacgggaaatacatctaactaaaattcagggaacttctacctcagtaaaatttctaggggtccactggtgtggggcctgtcgagatattccttctaaggaacacattccttattggggtgtgttactctggcccgtttatcaagtgacccgaaaagctgccagttttaagtggggtccaaaacaggagaaggctctgcaatgggtccaggctgctgtgcaagctgctctgccacttgggccatgtgacccagcagatccaatggtgcttgaggtgtcagtggcagataggaatgctgtttggagcctctggcagacccccataaataaaacacaacagatgcctctaagattttggagcaaggccctgccatcttctgcagataaccactctctttttgagagacagctcttggcctgttattgggctttgatgaaaactgaacgtttgactatgggtcatcaagtcgccatgtga

SEQ ID NO: 121829 - DNA, 1036 bp, Homo sapiens
aggaagggatccaaaggcttaaaaagattgggatggtggagtggattagtcactttagacctactcctctcagcatggaaggtccagaacatatactcttgaccaacaccttgttaaatagatatgtgaaggcagcacctgcatctttgaagagccctttaactgctcttctctttatgtcagatctaactgtgggaaccacattctctcaactacaaaatttaaatacaatgggaatatttgggtcctcatgtgacaggagccaagtggcagcactcaaccatcaaaggcaagtgccagaatgcaaaattgtcatagatatacttaacatctggcggattccccacattggctcactgactggtagggtgagggaaattatggtgggaaaggccaaatggaagccattagagcagcctccacctagaaaaatagtaattcaaaaacaatatcacatccctggagctattacagagattagtgccaccattgaggacttgaaagaaacaggggtggtgattctcaccacatccccattcaaatcaagcatttggcctttgcagaagacagatggatcttggagaatgacagtgaattatcataagcttaaccaagtggagactccaattgcagctgctgtaccagatgtggtttcattgcttgagcaaattaacacatctcctggtacctggtatgcggccattgacttggtaaatgtctttttctccattcctgtctataaagctcaccagaagcaatttgccttcagctggcaaggccagcaatatacttttactttcctacctcaggggtatatcaactctccagctttgtgtcataatcttattgggagagattttgattgctttttgcttctgcaagctatcacactggtacattacattgatgacattatgctgaatggatccaacacactggactcatgggtgagaaatttgcatgccagaggatggaaaataaatccaacaaaaattcagggagcttctacctcagtaaaatttctagggatccagtg

SEQ ID NO: 121830 - DNA, 6914 bp, Homo sapiens
gcaaaaaggcttggagagagttttatttcagttacttcaaaatacaagtaggctattattttcctttggaagaagaaaccagaaaaaaaacttcctgattgtaacattgtgacaaatttcagattatataacacataacacaggataaatggctgtagcattaatttttttctccagttacattcctttatactaaaagactagtattaaatcttagaagaaaatttcaattgttcttacgtgttacatattaaacacaaaagcaatttattattatttggtacaacatgaacctcagtatttgctcaaatgtagaaaaggattccttaatatgctgagaaatatccttagataaatccaactgtgaaaatatagaaaaactccttactgtaattactgggaaccacaaagttaatttttacagggtagaaaaactccacaaaaatggagattcatacttaaaaccttcttttactgatagaacattctttctggtattataaaatgaacaaaagtgtacagatatgggcttggggctagataatatccatagaactcgccattttaagcaataaaaattggcatgtgggtgcatgcctgtaatccctgctacttaggaggccaaggcaggaagactgcttgaacccaggagttcaagactagcctgggcaatgtagtgaggccactgtcgctcaagggaaaaaaagacatgtttttaaacacacttctaataaaaagaatttttaaaaccaacttttttgcttctagatagtctcaatgccttggatttaaaacatgactccttcttgatacaatgaattataaaagcaaactagttccacatattaattatacgttcaagtctagttcctaaaaagtcatttctctttaacctttcttacctatcaatcaatcattttcatataatctaatgtctaaggactccaaatattggtacggggtgagtatccctaatctaaaagtcagaaacaagaaatgttccaaaattcaaaacatttgagcgcagatatgacacataagggaaatgctcattgaagcatttccaatttctaatgaaagatttttggattagggatgctaaattggtaaatataatgcaaatattccaaaataataatttaaaaaccccacaaaaaaccaaaatccaaaacacttcaggtcccaaccattttgaataagggatactcaacctgtagtaccatgggagccaatcttccccacagctaattctgtaattaccattttgtttcttctgtaacaacaaacagtttaaataatttccaattataaagataggttaacatcatcatcgttttttaacaagataacttttatgaagcttccaattttaaaaaagaaaaacacttatctattcagtagggaagaaacaatcttatttattaatggcctgcatatttagaaagggtttaaaaacacatacatttcctgggacacaaacttacttaccaaatgtatgtccttacaaaataacttcacagatcaatagtcttgaacttacacaaagacatatatatgacatacattaggttaatatacatttcaaatgtttttgcagcaactttctaccagaaagtacactaatgtgagaatgtatgttctctttaaccccttaaaaatagtaataaaaaattacaaaataatgtaaatgtaaaattaaggctgagactacatattctagtattaataaagtcaaacaaacaatagttataaaacttggtgctgctgaatattttatatatatatatttatatatatatatatatatatacacacacacacacacacaggataagtcttttgaaatttgaaatgctaccactgtcacaagttcactcattgatttaatgttgttctgggtatcttaacatttcaattcccaaatacctgtgcttttaaaatttttatcctgaattctgcattgagtttcctcacatatttacaattaaacatctagcctctagaacctcccttacacaaaagacaaaacatctttgttaaataaattcacgcaaaagtaataaaaaggttttcaagaaatagttctgacatgttcattatatttatactgaaaaatagtacatgtacttttcttcaggattaataaatgccatgtgccagttttacagtcactgccacattagcacattttcctcttacacatttgcaaggtagtgacaaccaaagggcataatgtctggaataattccagtaaatccataatgtccagtaagattcataaaattgaatggttgtttccagtcccatctgaatcgaaatggaaattcatgcccaggtacttgtattgtccccagaaatactcagtctggtaagtcaccctcttggtcttctgaaacagagatgcagaaagcagggcattcttactgagaccaatggcctcttctctctgtcacctctcatacatctgttttggttataatcctattttgtcttgtagcttctcgtctcattcttttaggaggaactggacaatctgtcgtctcaacctttggtgaatgacgcaatgagtcattacacttacgtatgggagtcatacctagtttttcctctattagtttgagatttttctcatgttcatcaagttcttgctttttcttcctcatatccggagtgcgaaggtactctaattgactgttaagatccttattcacactgtctagtttgcacacagcagaacgatactgctgaagaagatctatttgttcccctaagatcagacactgttttggaactggagctccaaataccattccccgaagtttatccattggaggagctttattctgaaggcccccaaactttccattacttcgaattcgatctccatctctggtcagcagtgtaggacagtgtgtaattttaacaacctcttttctataatgattggccgcatccagattatccaaaataatggtgtctcctaacagcataccaaatactgtttcacaatgttctacattatctggaaatgttaacaagtctcgagcaaagactggatctccaatgggtttaaaatacaattttccatttcggaaatgaggtagagatcttttccaatctggaagagtcttcttgtaaatagaatcaaggggcaacacctgctgacgaccttgggtttcatcatagatacgacgtgcagcgtcagtggttagggtgactacacagtccatgtcacttgccagatgccaagaaataaccatcgcagctctatcatcttcaatttgtgctagatgtgcaatctttcccaaaacatctccactgcctttagtatagtttggaagagtacacgatcttctaggttttttcttcagttcttcttgttctgatagctttcttttcagaagtgcttcaatgtgtggcacctgttgtgttgtaggaatgtcaatattatgtatttttagttcatttcgcaattgggcctcttttaatcttgcttcttcaacttgacatttcatttcattaagaagctgttggctggcttcaaataaacttttatacataacaatagactgagataattggtccttttcttttgtaagtgctgccatttgttgctgcttcttaacatcattgtaaaacatgaacggtaggatatatggttctaaggttcttgataaaagtggtagccggggctcaaatacaataaaatattcagtactatcccttccaggactactttctgccagcaccagactcatgatttcagccgaaccattcacgaaggggaattcaagtgttctaactttcccaataaaaagtggggtatcagtatcttcctcattagaacctttaatggtggctattatagtgccaaccaaatcaattccagtatggttgtcgtagtcatccgtgatactaagatgtagatctctgaccaaggtcctactggcaactgagcgaacatttgaaacagctggtgtaggtggtttaattttaggtactaacttcacaggttgattaggcaggacttcaactataacctgttcactgttgagaatatttgttttatccatcataaaaccaaactggatacaatatgtccccactttattaggaattactttatccctgaaatagaagcagccatcttctttgtcattatcttttattttattacaactaaatgtttctgcatttgctgggggtcggttcccactggtagacagcttccacattttcatggaaatacgtgctggattaatgtttttaatgatactgtcatcttcagaaataacactaatcataaaatcagtgaaaagaccccctgctaagaaggatgcatctttgtcatatttaacattgagacgaacgggtttttctgggtctggaagaatcattaacttaattataggtccttctatgatacttttgttatagatggctttaacctgaagagtatgctctcccctaggggcaaaaacactgaatactcccaaattagccctgcctttctcatctgttttatgctgttggtttgaaggcatgagctttaaattgctagcttttgtaagacttattttaacatgttgtaccggtgctggattatcccactgatcacaaagttgaacaataatagggttctgtaaatctcttccattaatcactggaatggactcctttagttctggccagtctataaggagaagtttagcaggaggtccagaaattagttgcactcgaataaagtcagaaaactcacgccaagtaaaacaaagatccttatttccaggaggacctggaataaatttgatgcctcttacacttatactctgtgtgttttcctgaaaggttgttttcaaatttgagctatcaagtccaaccccagcaattgacaaagaagataaagaacttggtgaaaatgcttgaatctgatttccgtactgatctgtaattattataactacttctccttgaagctcttggcccatctgtactgtttttcctcctttcatttcacattttaaatgtttaggttcatcaggaagtggtctgaaattgtttaacaagttagaagtctttagtgacaccattaattgaagtagttccaacatgcttactgtaaacgcactttccaaagacacatgatcatcttggaatgaaacctggcaatagcgcatatcttttacagatgttggtacttgcacatcaggaagcagaccctgtagcaagtgttctttgttaatctcaggagtccaattaactttaattttttctgctaaagctgatgttatattgatttctctttctccttcatcatacatttgaaaaataagattatgcataatatcacccgctatccaattaacctcatcctgatgtttgatctgaattgccttttgtccttctacactgaatatttgtagtcttgcaacatggctactgggaagcaacttaatagtcttctccacaggtgccacatctttacaactaggtatttcaattcttgctttaagcgtctggtcttttttaatattctgaacttgaattgcagatcctgttaaaatactggttccagaactactgcaatctacaacatagactggaaggtttggagcacctgaaaacttacaatgaacaatcaattttggttgtgctgttatgttgtctgattcatctaaaacttccacctgaaatgggaaagctgttccattttctataactaaaatttcagaatcaggtttcactttcagtcgacgagggtgaccaggtagtaatctaattttcaaaatctgtgagtcttcttttaagccaggcagagtaaccttcagattataattcttgccttgacaagagtttacagggcccttggctgtaacacctcgaattacacaatttggtccattggttatttcttcataatgtaaagataaaccacttgcttcaagaactggctgaatatcagttactagttgactggtatgaccaaattcatcctgaaactccagagggatattaaatggaactccaacacgaaaaggaagatccagaagaccaaatgaaaatttctctggcttaccctctttaacagaaaacttaattgctttagatggtagtggtcttcctgcataagtgtctgcattactttcattcaacacaacttgtaatttcaaggtataattccccaacttctgaatattttcaagcactggatctgacttggagagcattggggacagtgggaagtgctccacccatactcccagacctgggtggtacaaatagaaggcagccattcccgatcctaagtcacagcgggctgcacagaaacgttttgcagcctgagacagattcacaatctgaggacagactgcctgtgacttggctggctgtttcagcttgctgccagcagcagatggtaggagggaatccaaccaggtcaaaactgtagagaaccgggtcccactatcacctgccaggttgtggagccctagcgaccccactttccccatgctggatctttggcatggcagtggttgctctgctcctccctggagcattccttcggggcctgagaactgccttgcaacccctgcaagggctggtgcttgtgcccttgccatttcatcttctacatattttttaacagctttctcagcaactgtcctatccagctttgcaattggcacagttcttacttcatcatatagtgcctgaggttccagctgtcctgctttgtatatctttccatcccattctattgctgcatatgttgcccagggaccttgctttttagaaggaagatcaggacgtgtaattactcccttaaaaagtgtaaattttatttgtttatcatacttctcatgacagtccttcagccacaaagcaaattctctgtcaattttcattcgctgttc

SEQ ID NO: 121831 - DNA, 3183 bp, Homo sapiens
atggcagaaggcaaggaagagcaagtcctgtcttatacggatggcagcaggcaaagagagaatgaggaagatgcaaaagcggaaacccctgataaaaccatcagatctcatgagacttattcactaccacgagaatggtatgagggaaaccgcccccatgattcaattacctctcaatgggtccctcccacaacacgtgggaattatgggagtacaattcaagatgagatatgggtgggtgatcattcaggatatgttcgtccagtaccagtgccacgcagtttaaatagtgatatttcctattttggtgttgggggcaagcaagctgtcttctttgttggacaatcagccagaatgataagcaaacctgcagattcccaagatgttcacgagcttgtgctttctaaagaagattttgagaagaaggagaaaaataaagaggcaatatatagtggatatattagaaacagaaaggatgactacgacaaccatactggaattgatttggttggcactataatagccaccattaaaggctctaatgaggaagatactgataccccactttttattgggaaagttagaacacttgaattccccttcgtgaatggttcggctgaaatcatgctcatgccttcaaaccaacagcataaaacagatgagaaaggcagggctaatttgggagtattcagtgtttttgcccctaggggagagcatactcttcaggttaaagccatctataacaaaagtatcatagaaggacctataattaagttaatgattcttccagacccagaaaaacccgttcgtctcaatgttaaatatgacaaagatgcatccttcttagcagggggtcttttcactgctccaccactgccagcccagctcatgtcctcgctatcttgtgcctggattattgaatcagttcttaacagctggaggaagggatgcaacaaactcaggaaccagagagccctgcataagaaacaagacagagggaagcttccggaggatagagagcttcagcacactaagaaacagactaattgggcaggacttctgatccctgccatgaacaataacgtggatatgactgccagaaagctgcaaagagacctccagccttttaccagtgtgactgtgcattgcagaaagggaaatgaccagacatttgggggaccactggacgctggctctgagctgacattgattccaggggacccaaaacatcattgtggtcccccagttaaagtaggagcttatggaggccaagtaattaatggagttttagctcagccctcttatttggcttgtgcagaagacagatggatcttgagaatgacagtggactattgtaagcttaaccaagtggtgattccaattgcagctgctgtatcagatgtggtttcattgcttgagcaaattaacacatctcctggtacctggtatgcagccattgacttggcaaatgcctttttctccattcctgtccataaggcccagcagaagcaatttgccttcagctggcaaggccagcaatatacctttactgtcctacctcagtggtatatcaactctccagctttgtgtcataatcttattcggagagaccttgattgcttttcgcttccactagatatcacactggtccattacattgatgacattatgctgattggatccagtgagcaagaagtagcaaacacactggacttattcgtgagacatttgcgtgccagaggatgggaaataaatccaactaaaattcagggaccttctacctcagtaaaatttctagggttccagtggtgtggggcctgtcaagctattccttctaagatgagggataagttgctgcatttagtccctcctacaaccaagaaagaggcacaatgtctaacagctcttggcctgttactggctttggtggaaactgaacatttgactataagtcatcaagtcaccatgcgacctgaactgcctatcatgaactgggtgctttttgacccatctagccataaagtgggttgtgcacagcagcattccatcatcaaatggaagtggtatgtacatgattgggctcgagcaggtcctgaaggcacaaccacccctgtcatttcccaatggccccatgaacaatgtggccatggtggcagggatggaggttatgcatgggctcagcaatgtagacttccactcactaaggctgacctgaatacagccaccgctaagcgcccaatttgccaacagcagagaccaacactgagccctcaatatggcaccattcctcagggtgatcaaccagctacctggtggtgggttgattatatgggatctcttccatcatggaaagggcagaggtttgtcctcactggaatagatacttactctggatatgggtttgcctatcctgcatgcaatgcttctgccaagactgccatttgtggactcacggaatgccttatccaccatcatgatatcccacacagcattgcctctgaccaaggcactcactttatggctaaagaagtgcggcagtgggctcatgatcatggaattcactggtcttaccatgtttcccatcatcctgaagcagctggattgatagaatggtggaatggccttttgaagtcacaattacagtgtcaactaggtgacaatacttggcagggctggggcaaagttctccagaaggtcgtgtatgctctgaatcagcatccaatatatggtactgtttctcccatagccaagattcacaggtccaggaatcaagggctagaagtggcaccactcaccatcacccctagggatccactagcaaaatttttgcttccttttcctgcaacattacagtctgctggcctagaggtcttagttccagaggaaggaacgctgccaccaggagacacaatgattccattaaactggaagttaagattgccacccagacactttgggctcctcctacctttaaatcaacaggctaagaagggagttacagtgttggctggggtgactgacctggactataaagatgaaatcactctcctactccataatggaggtaaggaagagtatgcatggaatacaggagatccattagggcttctcttaatattaccatgccctatgattaaggtcaatgggaaactacaacagctcaagccagatcatcctagatga

SEQ ID NO: 121832 - DNA, 1531 bp, Homo sapiens
atggagaacactgatactgcttggcatgaactgtttagagagttatgcaaaataaatgcatttgacactcctgatttatcgctcatgagaggcaaggaatttagtgactctgtacataatacctttgaccatatgtggagaagcaaggaacataatgaagttggttgtttgctcctaagttcagtggacaaagtgatggaagaaaatgatgaactcagggattttaactcccatcttcagaaacagatactgaccctcaaatctgctaatatcaccttgagtgagagtcttatctcctgtagagaaagagctgaaattgtggaaaaacacacacaagctcttatcatatccaacagtgggagctgcagtcactcaactacaaaatttaactgcaatgggagtaattggatcccatggtgccaggggccaagtagtggcactcaaccgtcaaaggcaaggagacctccaaccttttaccagggtaactgtgcactggggaaaagggaaatgcagatatttgggggactactggacactggctctgagctgacattgattccaggggacccaaaacatcattgtggtcctccagttaaagtaggggcttatggaggtcaggtaattaatggagttttagctcaggtccaaattacagtgggtccccagactcatcctgtggttatttccccagtgccagaatgcataattggcatagacatacttagcagctggcagaacccccacattggctccctaactggtagggtgagggctatcatggtgggaaaggccaaatggaagccattagagctgcctctacctagaaaaatagtaaatcaaaaacaatattgcatacctggaggaactgaggagattagtgccaccatcaaggaattgaaagatgcaggggaggtgattccgattcccaccacattcccattaaactctcccatttggcctgtgcggaagacagatggatgttggagaatgacagtggattattgtgagcttaaccaagtggtgactccaactgcagctacagtaccagatgtggtttcattgcttgagcaaattaacacatctcctggtacctggtatgcagacattgacttggcaaatgccgttttctccattcctgtccataaggcccaccagaagcaatttgccttcagctggcaaggccagcaatatacctttactgtcctacctcaggagtatatcaactctctaggtttgtgtcataatcttatttggagagaccttgatggctttttgcttctgcaaaatatcacactgctggtccattatgttgatgacattatgctgattggatccagtgagcaagaagtagcaaatgcactggacttattggtatcaatggcctcatcgagagttccctatgatcagttgacagaggaagagaaggctaggttcacagatggttctgcacgatatgcaggcaccacccgaaagtggacagctgcagcactgcagcccctttctaggatatccctgaaggacagcggtgaag

SEQ ID NO: 121833 - DNA, 2159 bp, Homo sapiens
atgaaactcatggaaacacttaaccagtgcataaacgctggtcatgaaatgacgaaggctatcgccattgcacagtttaatgatgacagcccggaagcgaggaaaataacccggcgctggagaataggtgaagcagcggatttagttggggtttcttctcaggctatcagagatgccgagaaagcagggcgactaccgcacccggatatggaaattcgaggacggcgacgtgctgaagacgtatttccaccggtgatcggggttgctgcccataaaggtggcgtttacaaaacctcagtttctgttcatcttgctcaggatctggctctgaaggggctacgtgttttgctcgtggaagaagacagatggatcttgagaatgacagtggactattgtaagcttaaccaagtggtgattccaattgcagctgctgtatcagatgtggtttcattgcttgagcaaattaacacatctcctggtacctggtatgcagccattgacttggcaaatgcctttttctccattcctgtccataaggcccagcagaagcaatttgccttcagctggcaaggccagcaatatacctttactgtcctacctcagtggtatatcaactctccagctttgtgtcataatcttattcggagagaccttgattgcttttcgcttccactagatatcacactggtccattacattgatgacattatgctgattggatccaagacagctcttggcctgttactgggctttggtggaaactgaatgtttgactctgggtcatcaagtcaccatatgacctgaactgcctatcatgaactgggtgctttctgacccatctagccataaagttggtcatgaacagcagcattccatcatcaaatggaagtggtatgtacatgattgggctcgagcaggtcctgaaggcacaaccacccctgtcatttcccaatggccccatgaacaatgtggccatggtggcagggatggaggttatgcatgggctcagcaatgtagacttccactcactaaggctgacctgaatacagccaccgctaagcgcccaatttgccaacagcagagaccaacactgagccctcaatatggcaccattcctcagggtgatcaaccagctacctggtggtgggttgattatatgggatctcttccatcatggaaagggcagaggtttgtcctcactggaatagatacttactctggatatgggtttgcctatcctgcatgcaatgcttctgccaagactgccatttgtggactcacggaatgccttatccaccatcatgatatcccacacagcattgcctctgaccaaggcactcactttatggctaaagaagtgcggcagtgggctcatgatcatggaattcactggtcttaccatgtttcccatcatcctgaagcagctggattgatagaatggtggaatggccttttgaagtcacaattacagtgtcaactaggtgacaatacttggcagggctggggcaaagttctccagaaggtcgtgtatgctctgaatcagcatccaatatatggtactgtttctcccatagccaagattcacaggtccaggaatcaagggctagaagtggcaccactcaccatcacccctagggatccactagcaaaatttttgcttccttttcctgcaacattacagtctgctggcctagaggtcttagttccagaggaaggaacgctgccaccaggagacacaatgattccattaaactggaagttaagattgccacccagacactttgggctcctcctacctttaaatcaacaggctaagaagggagttacagtgttggctggggtgactgacctggactataaagatgaaatcactctcctactccataatggaggtaaggaagagtatgcatggaatacaggagatccattagggcttctcttaatattaccatgccctatgattaaggtcaatgggaaactacaacagctcaagccagaagccttggttccaaagggggtagtgtttccaccaggagacacaacaatgctttcactgagctggaagttaagactgccatctggccacgttggactcctcatgcctctgagtcaacaggtccagaaaggagttacggtgctggctggggtgattgatccag

SEQ ID NO: 121834 - DNA, 251 bp, Homo sapiens
  misc_feature (1)...(251): n = a,t,c or g
ggaatatttagaggacagtaacccatttccctacgccctacctttcccatggcactctgacgtactggatgtttggtttctgaagttactggctgtttaccctgccgggatgtaagcccctccagggcaggggcttgtctcgtgttcagtgctgcatcccagctgctgggcacggtacctggtccatggcgttcaataaataactgttggatgagtgnnnnnnnnnnnnnnnnnnnnnnngggtttttttt

SEQ ID NO: 121835 - DNA, 1903 bp, Homo sapiens
agatgggggtctcacactgtggctcaggctggagtgcagtggtgtgatcatggctcactgcagcctcgaagccccggggtcaagtgatcctctcacctcagcctcctgggtagctggaaccacaggcacgcaaccaccactcctggctagttttgtttttttagtagaataaggtctcactgtgttgcacaggctggtctctaactccttacctcaaaccatcctcctgccttggcctcccaaacatgttgggattacaggtgtgagccactggacctggccaaatactgggttttcagtgctcactgccactaataaaaatctgaaattctttcattatgcaatttctaagtgcctggtgagggccaagctcagttctaggctcttgaagattgaagagagaaacaaggctctgtctgctcctgttgtctctgtgagcatctttgacagagtgctcagattgttgggatatagtgcatcggactggcagcctgaatttgtggagaccgcagtcagtaactttgtgatatatggaatatttagaggacagtaacccatttccctacagccctacctgatcacatcgtgccctgctgggccataccccaaacagcccaccttcctctaggcctggccatggccctgtgcctgccacattgaggattaagtcaggatatcttgagccctctcaaatccctgtttattcaggcctctgccacatatagagccagccttctgtccccaccacttccactaccatggagcccacttaagtaaaacgctctctggggcccagcttcgccagaaaagacaccaggggaagcaaggctcaaaaccaggggcagctaaatctgatcttgtgggaccagtctctaagtaagggctttcagcgtcggctgtctgttcattgctttccaaataggatgcagcaatgattggtacatgggtattaagatcggtagtaggggctagtccaagtttagcaatagccaaactggagagcctctgaagtatgagagtcccagagggatttgtcagctcctggcagacatcctgattttcaccttcctgagtctaccctaccccagaagggtgccagtctcactgtggtgaatggttagcccagtgttgtgctgcatccacacccagcaacggagtcccgtgcttgcaggctggtgggatgctgtcctctgggttaagactgtctcccttctcgggagcactgggagggttctccatcttgcgtgtttcagtgggaagttggcagatacggaaaacaggcccctataggggaaggcagttccatgtaaaatgaattaatttctttcccaaaagacttaaaattttttcctatttcaattttcctttcaaaaaaggaaatacattcatgtagttcaaaacttaagaaaacaaaagtctgttcagcaaaagactcccactccgtttccccaaacgctgagccccaccccccatccctggtagccaagaagtgtttccaaattttaaggtttaaagaaacaaagtcccctggatttgtgttagggatgtcttccctgagagtgggttgtgttcccgtttgaaccctggcggttgaacctcggccccactaggatcatgcccgccctctcccagggaggagggcctccccatcaccctgtaccagtggcacccccagccactggcactgcccgcccttgctcagcgtacctttcccaatgggactctgacgtactggatgtttggtttctgaagttactggctgtttaccctgccgggatgtaagcccctccagggcaggggcttgtctcgtgttcagtgctgcatcccagctgctgggcacggtgcctggtccatggcgttcaataaatcaccccttggatgagtgaaaaaaaaaaaaaaaaaa

SEQ ID NO: 121836 - DNA, 709 bp, Homo sapiens
atgcctgcgtgtcgcctaggcctgctagccaccgccctcatcatcagcctgctgctgttcggcttcaccatagtctcaggcacaggagcagagaagactggcgtgtgccccgagctccaggctgaccagaactgcacgcaagagtgcgtctcggacagcgaatgcgccgacaacctcaagtgctgcagcgcgggctgtgccaccttctgctctctgcccaatggccaactggctgagtgattcgaagaaagtgaggaatcctccctggacactgtatcgcccttcgtcgtctttcagtcaatctcttccactctaaggattgagtgagcgcgagctggggactcttctcaaagataaggagggttcctgccccccaggtgtaacaatttaacttttccccagctcaggcctctgtctgggaccaggtgccaggtggaacagcccagtgtcctggccaggatgcaaatgctgccgcaaatggctgtgggaaggtgtcctgtgtcactgcccaatttctgagctccagccaccaccaggctgagcaagtgaggagagacagttttctgcctggccctgcatctgggttccaagcccacctgccctccccgtttttcgggactctgtattccctctttgggctgaccacaagcttctccctttcccaaccaataaagtaaccactttcagcaaaaaaaaaaaaaaaaaaacc

SEQ ID NO: 121837 - DNA, 2477 bp, Homo sapiens
atggctgtgaatggatgcctggaaggaccatcctctaattttctcagttgcctgttcattgtggcattggttggcagtgaatctactcatcctttatgtcttgagcaaccagccacccaggaaacgaggtatcagttacttcagcttcgacctgcgcagagagcatcatggattggttatgctattgcttaccatttattagaagattatgaaatggcagcaaagattttagaagaatttaggaaaacacaacagacatcccctgacaaggtggattatgaatatagtgaactactcttatatcagaatcaagttcttcgggaagcaggtctctatagagaagctttggaacatctttgtacctatgaaaagcagatttgtgataaacttgctgtagaagaaaccaaaggggaacttctgttgcaactatgtcgtttggaagatgctgcagatgtttatagaggattgcaagagagaaatcctgaaaactgggcctattacaaaggcttggaaaaagcactcaagccagctaatatgttagaacggctaaaaatttatgaggaagcctggactaaatatcccaggggactggtgccaagaaggctgccgttaaactttttatctggtgagaagtttaaagaatgtttggataagttcctaaggatgaatttcagcaagggttgcccaccagtcttcaatactttaagatcattactaccaagacaaagaaaagtgtggcaatcatagaaaagttagtagtaggttatgaaacctctctaaaaagctgccggctatttaaccccaatgatgatggaaaggaggaaccaccaaccacattactttgggtccagtactacttggcacaacattatgacaaaattggtcagccatctattgctttggagtacataaatactgctattgaaagtacacctacattaatagaactctttctcgtgaaagctaaaatctataagcatgctggaaatattaaagaagctgcaaggtggatggatgaggcccaggccttggacacagcagacagatttatcaactcccaatgtgcaaaatacatgctaaaagccaacctgattaaagaagctgaagacatgagctcaaagtttacaaggggaggcacatcagcggtagagaatttgaatgaaattcagtgcatgtggttccatacagaatgtgcccaggcttataaagcaatgaataaatttggtgaagcacttcagaaatgtcatgagattgagagacattttatagaaatcactgatgaccagtttgactttcatacatactgtatgaggaagattacccttagatcatatgtggacttattaaaactagaagatgtacttcgacagcatccattttacttcaagggcaggcaagaattgctatagagatctatttgaaggcttcatgacaacccccttacagatgaggaattaaaggaacacggaggctggatacagccaaacatgtctgacaaagagctaaagaagctacgtaataaacaaagaagagctcaaaagaaagcccagatagaagaagagaaaaaaaatgcagaaaaagaaaagcagcagagaaatcagaaaaagaagaaggatgatgatgatgaggagataggaggtccaaaagaagaacttattccagagaaactggccaaggttgaaactccattggaagaagctattaaatttttaacaccgttgaagaacttggtgaagaacaagatagagactcatctttttgcctttgagatttactttaggaaagctgccaaaatggtatattacttagatccttctagtcagaagcgagctatagagttggcaacaacacttgatgaatctctcactaacagaaacctccagacatgtatggaggtattggaagccttgtatgatggtagcctaggagactgtaaagaagctgctgaaatttatagagcaaattgtccataagctttaccccttatgcctttggcctttccatgcccccccggatatgaagaggatatgaagatccacagttaatggagatagttcctgcagaagctgaagaactggcccaatgaaatttgaacatcactaaacaagcaaatggaatgactttggaccatatctagtatataatatttttgtcacgcacctgctgcattgctctaacttacacagaatgagaggagtaaatgttcttgccttcaaatagtgttttacgttttttatcctgctgaaaaagtatatataaaatatctaacattacaggatagaggttcagtttcttaaaaaattaaagctgctaaaattgagtggttaaaaaagataccttatcctattcctccccacccacccatgtttttaaacctaatttatataaaatctggaggctgttacagctaacaaagcaggtgtgtggcagaaatattactttaaatttgtcttgtgagattttactatatctcagac

SEQ ID NO: 121838 - DNA, 429 bp, Homo sapiens; identical to SEQ ID NO: 118058

SEQ ID NO: 121839 - DNA, 684 bp, Homo sapiens; identical to SEQ ID NO: 121064

SEQ ID NO: 121840 - DNA, 1067 bp, Homo sapiens
ttactcatcctcatctttagctgccatgtagatgaggtcaatatccacaagaaactcacctgagtggggaagaaactcgctttccagtacaatagatagcaggaatggagcttgcaggactggagggtgtatgcattcctgctccagttccaacttctcattagttaattcctcaggaaccacctctaggagctcctcagtgtcatcttcatccacacccgggttaaagttgtttgccgtctcaaccagagctttgtcgatttttgcaacctccccattcttggcaaatctggtaacattagctgtcgattttgtgcacttaggggccatgatggacagaacaagagcacaagagaaaatgatgcagccacaagtcttggtaaacacagatgtatgaggctgcttctgggctaacatggcatcctgctttacagcaaacttttctttcattattatagattcagggggcacatgtgcaaagttgtttgccatctcaaccacagctgtgttgatttttgcaacctcctcaaccttggcaaatcctttgacgtcatagataaatctctcgagtgtcttcttgcagatgccatttatatactccttggtgacatcaccccaagcagctgctgtgggcttcacctgaaacttctcatgtttaactgctacaatccagctgagcagttgatgatgtgaaaataggactgctttagttccccccttcacacttggaacctcacagaatcctggcttaaaaagtatatgatgcttgcaaggcacacagcccagagcttggcacacggcaaagcagctagcctcggcagccattatccttgtgattaattcagcaaactctagaatgagtttttctctccaggtgacaaagtctgtacttgagtttttcttaatccagaacctctctgctgcccgcttctcacttccaatcatccgccttctgaagagttcctccctctccaggcctgactgccctttgtggccttccccctgcatctctgcttcagatgtgcccctgcaggtctgcaacccattctcacccagcagccaagaag

SEQ ID NO: 121841 - DNA, 2507 bp, Homo sapiens
atggtgagaccctttctctacaaaaaaataaaagaagaagaagaagaagaagaagaagaagaagaagaagaagaagaagaaggagaagaagaagaagaagaagaagaagaggaagaggaagaggaagaggaagaggaagacaaagacgacgaagaagaaagaagaagaaagaagaagaagaagaagaagaagaagaagaagaagaagaggaagaagaagaagaagaagaggaagaagaagaagaagaagaagaaaaaaaacattctttataggatccagatctgggagagaaagaaaacaaaggacaaaggaaaagaaaacttgcccgtgggacttcccagccatccctttcacctggaggctccgatcccctgggcgcttgataattctctgaggtcatggagatcagatacatggacactcatccaccaacaaaggctttcagacacaaaccaagctgcctcccagagtacagaggtagcaactctgctcatcactacagaggcactgatgtcactcggtgtccctctggaggagcaaatggacccacaaccccactgctttgctccccaccagctcctcccacacgctggtcctaacgctttgctgagcacacagtggactctccacgaacacttgctgcttgatcccttcagccttgcaaatgccgccatccgcctggacagcccaaagaggttatgtgccccttttcccctcctggtcctggaagactgcactgttaacaccatctccacagggttaacgagaattacatgccagactttagataaagcatcaaaagactctcttcaagcatctcacaatgaaactctgagcatttgcagcttacctcttacatggccccattctgagaaagctgaaagaaaccctcagtgtggcaagaagcactgtttaaaaacccctgcccactccactgcctcttggggtacaaagcccttgcagagaatcaacaatagcaagaccctggaagaaggaggaggaggagaagggcggggggaggagggggaggaggaaggggaaagggaagcggaaggggaaggggaaggggaaggggaaggagaaggagaaggaaaaggggaaggagaagtaggagaaggagaaggaggggaaaactatcctaccgttttctgcagtggctacaccattcccaacagtaacgatatcaacttgtcttcatgctccacaagaggcactcaatcactaaaggctatgactaatgatagcacagtggcccagactgaagaaatggggcaaaagaaaaactgtggcaaagaggatgtagctaaaaggacaaattcaaggtggacatgcatcccagagtgtggagatcatcttggcaacactaagggacaagcacgaagcattccattgttcctgggaatgtatgtccctgggaccaattactgccaacgcatgtgtgtggaagtgatggtgtcacttcctgggtcaaagtgtggctcccccatctctctgctgctggctggatgacgctctccaaagttctaagggatggcagagccataagagagggggagcctgggatcctgaaatcccccccaagaaaagaaagaataccccatggaccagcttcttggctgctgggtgagaatgggttgcagacctgcaggggcacatctgaagcagagatgcagggggaaggccacaaagggcagtcaggcctggagagggaggaactcttcagaaggcggatgattggaagtgagaagcgggcagcagagaggtggcagcaaggatcatacaggggattctggcttggccattggggaggtggaggtgttgtttaccaagatgcagagccccagagcaggaagggttttgtgaaggaagatgctcagttagggacgcagtgggccagaggacaggcacttcaaaccttagaaccaaataacggtttgggagcaatgcgagaagaggaagcaaggaagaggggattggagaagaagaaagagggggaggaagacagaggagaagaagaggaagggaagagaaagaaaaggagaaagaagagaaggaggaggagaaggaagcaaaattggaagctatcagcattaaaaatgatgatccataaagaagctctatcaaaaatcaacacagaaaacatcactctgcagccagcggtaattcctgaaccggagaacctcacacaggagaaatccaaaaaatacaggctagccagagttccaagtgtgaaggggggaactaaagcagtcctattttcacatcatcaactgctcagctggattgtagcagttaaacatgagaagtttcaggtgaagcccacagcagctgtcctacaaagtcatagctctgtttcacatgagcagaggcatttgttcctggagtccaagttggaggccatcttggtctggactccctcaaaagcaaagcctgtgatatggactggggtacagatcgtttatttgggaggtgatcctcggtacagggatgaggcagtaggaaagtga

SEQ ID NO: 121842 - DNA, 618 bp, Homo sapiens
atgcctgtggatcaccctcccatcaaagccttctcagagaaacgtacctcccagtcagtgaacatgctggccaaaacacatccgtataatcctctttgggcacagctggaatggtttaagcttttagaaatttcccccaagtcacccattaacacagacaaatttctacttaagagactttcagtgcctggttctgattcttgtcgtgtaagaatggaaaatgtgttggcatctcaagtcttacatccaggtcatgctgatgatgtaggagggaagtggctgggcagaagcaaggatcaccgagctcctgagcagcaaacccgtgaaagtggcatccggcttccctccctcttccctggtagtgctgagcagccatggagggggaacgcacagtggcacctgtcctggaaagctctcagaggagtctttggaatgattccagatagtcttctctatgaattccaccagtccgcaaagaagtcctcccacttcaaaccccctcaaccactcctctattggactttggttaacttcttaatacctttttcattgcactcttcaacctggttcatgtggagttcaaaccagggtataatgtgtaaagaagaagtcctgtaa

SEQ ID NO: 121843 - DNA, 5336 bp, Homo sapiens
atggtccagtggcgaattccaccacattggaattccaccacagtgcttgttggcaaatctgcaagcagagtctggctctgccaccccaggcggaaggccagttggatgttggactcagggcagctccgatctccaaaacagaagggatcctcccacctcagggaacactacggaaccactgcaagttcctgtggactgtcattgttggtagatgggttcggggtcaagagcctgcaaatcccaagaggaactatctggaacttatattctgttccaaggatagctgaacctgtatggcttactatgatgtccggcactttggaaaaaaaccagctctgccagcgctttctcaaggagtttacacttctgatagaacagataaataaaaaccagttttttgctgccttactgactgcggtgttaacctaccacctggcctgggtcccaactgtcatgcctgtggatcaccctcccatcaaagccttctcagagaaacgtacctcccagtcagtgaacatgctggccaaaacacatccgtataatcctctttgggcacagctgggaaaaagcccttcttctaacttcctgtccaaaatcctcggtaaaaattaccttgttcaacggccactgagaaatgaggatttgggttttggggaatttaagccctggtcctcaagaatggcaacccaggttcagctttactggggcccagcccacaggtgtgtccagcgggcccctggcctcgtgctttttacgaatatcccttgtggggatgacaacaagagggccaacttcaggactgaaggagacattccccgaaatgaaagctcagatagcgccctgggagacagtgacgacgaagcctgcgcttcagccatgctagatctgggtcacggtggtaaatcacctgaggttcctaggaagagaagctgcctctgccaagagaaggtccgtggctggcagcagatgctacataaatataattttgacattgacacgccgtgtggcctctctcctgccgatcagagcagcatttgtcttaaggaacacttacggaacactgcaagttcctgtggactgtcattgttggtagatggggttcggggtcaagaggctgcaaatcccaagcatccagtcctggatgagccaatagctgaagctgtctgtattatcgcagacacggataaatggagtgtgcaggtagctacaagtcagaggaaagtgacggacaacatgaaactaggccaggatgtcctggtctctagtcaggtgtccagtttgctccagtccattttacagctctataagcttcacctccctgctgattttccaccccgtatgggaagtgaggagcgtctccgcccggcagctgccccatctgggagagaggtgaggggcagcccccgtaccgccagccgacccgtccgggagggagctcagttcctaacgggttacacgtctacagcccaggggatggggacacctgtcttagttcatctggactgcagtaacaaaataccatacactgagtggcttataagtaacagaaatttggaggatgggaagttcaggatcaaggcaccagcagatttagtgtctagattttgccgatttcgcaaccaccatcaaacagcattttcgcctgctggggcaaaccagcgtgtaccgcttgctgcaactctctcagggccaggcggtgaagggcaatcagctgttgcccgtctcactggtgaaaagaaaaaccaccctggcgcccaatacgcaaaccgcctctccccgcgcgttggccgattcattaatgcagctggcacgacaggtttcccgactggaaagcgggcagtgagcgcaacgcaattaatggattttgccgatttcggaaccaccatcaaacaggattttcgcctgctggggcaataccagcgtggaccgcttgctgcaactctctcagggccaggcggtgaagggcaatcagctgttgcccgtctcactggtgaaaagaaaaaccaccctggcgcccaatacgcaaaccgcctctccccgcgcgttggccgattcattaatgcagctggcacgacaggtttcccgactggaaagcgggcacgtttgagctctgctaagggtcagactgcctcctcaagtggatccctgacccctgtgtatcctgactgggagacacctcccagtaggggccgacagaacctcatacaggagagctctggctggaatctggtgggtgcccctctgggacgaagcttccagaggaaggaacaggcagcaatctttgctgttctacagcctccgctggtgatacccaggcaaacagggtctgtagtggacctccaacaaaccacagcagacctgcagcagacaggcctgttagaaggaaaattaacaagcagaaaacagccacatcaacatcaacaaaaaggacgtccactcagagaccccatccgaaggtcaccaacgatcacagctcctcaccagcaagggaacaaaactggatggagaattgagtttgatgaattgacagaagtaggcttcagaaggtgggtaataacaaactcctctgagctaaagaagcatgttctaacccaatgcaaggaagctaagaaccttgaaaaaagacacagcctgggcacaaaggaacccgctgccttgaagggaaggacccagtactggcaggattcatcacctgctgacttaaggccctggctttgtgctacactcttaaagcagtataagccaactgtgttctcccattccacagtggctgttcaccctagagcaggatttcttaacctcagcactgttgaccagcatccagtcctggatgagccaatagctgaagctgtctgtattatcgcagacacgaataaatggagtgtgcaggtagctacaagtcagaggaaagtgccgcacaacctgaaactaggccaggatgtcctggtctctagtcaggtgtccagtttgcttcagtccattttacagctctataagcttcacctccctgctgattttgttggggacattctcctggataataacctgaagtgtgttttccaacttggttccattctccctgtcactttcaggagccatgacccttatgatggggagggcacggatgaactcagaaccgcagggcttgcagcccagacaccgagcaactggcccggcagtcaggcacatacccagtaagcctggggcaggccacggtgttagaagactctaaagcggcactgccaggtcttggacccacactaatggctgtgactgtggtgacaacagaagctgcagtagccattggttgtgaagctgcccattctagcagagaagactttactaatcatcagttgtggaggagaactgtggaggggaaaaaaggagaggggaaaaataaatttatgagtggaggagtcaataccaccgttccacttctcaaaactagtagaaaaggaagcccagactcaccacatctccgggagaaaccttccttagaaaaggtcactttccagattggaagctttgcatctccagagtctgactttgaaagccgcatgaaaaaaatggaggaacgggtgaaggcctgtggcccctccttggaggccagtgaggctgctgatgtggctcaggacccgcaggtttctaggagcccttttaaacctggctttcaggagaatgtttgctgtcctcagaatcggctttcagagggggatgaaggcgagtctgacaagggttttgcagaggacagaggcagcagaaacgacatggcagcagatattgctgggcagctcagccacgctgctgacttgggcacagcctcccacgacgatgtcacttatgcaataaagcccacttgctggccggggcttgacattattccttcctgtctggctctgcaccgtattgaaactgagttaatgggcaaatttgatgaaggtaaactgcccaccgatccacacctgatgctccgactggccattgaaactgttgctgatgactatgatgtcatagttattgacagcgcgcctaacctgggtatcggcacgattaatgtcgtatgtgctgctgatgtgctgattgttcccacgcctgctgagttgtttgactacacctccgcactgcagtttttcgatatgcttcgtgatctgctcaagaacgttgatcttaaagggttcgagcctgatgtacgtattttgcttaccaaatacagcaatagtaatggctctcagtccccgtggatggaggagcaaattcgggatgcctggggaagcatggttctaaaaaatgttgtacgtgaaacggatgaagttggtaaaggtcagatccggatgagaactgtttttgaacaggccattgatcaacgctcttcaactggtgatctttacggagccataggctctccagtgagactgactcgcaccgtagtggtagggaagcagaaggacttagtccagcgaatactttatgtcctgacctactttctccgttgctctgagctacaagagaaccagctgacctggagtggcatcatggtgagtgtgtttgtatggcccaagctatgccagctggatgctccttccctgggaattccttgtgatctttacggagcggtaggctctccagtgagactgactcgcaccgtagtggtagggaagcagaaggacttagtccagcgaatactttatgtcctgacctactttctccgttgctctgagctacaagagaaccagctgaccgggagtggcaatcatggtgaaggtgaccaagttttaaatgggagcaagatcataacagccttggagaaaggagaggtggaggagtctgagtatgtggtcattacgatatgtgagagggctaaagccaggcttttggcaagagcccttcctgaaacattttctttggtcagtattttgacacagactgcctggtggatgtccaatatgaggtctcagagcatcagcacccagaatgtaaggaactttggccgctcacttctggcgggctactgccccacatacatgcctgatcttgtgcttcatgggaccggcagtgatgagaagctgaaccagtgcctggtggccgaccttgtccacacagtccatgtaagtgatcccagtgtggagcctctggctgctgacagtgtgtcagtcaaagtcttggctgacaccagggaaaagatgatgcttatggcggtggtcttcctcctaaccatagctggattagagctacaggtttcttcagccaagctgaatgtctcatcagttgacctggagggaaatataagtttgaaaagttgccatgcatcagtgagtcacactgaaggtcaactgtaa

SEQ ID NO: 121844 - DNA, 2827 bp, Homo sapiens
atggcagaaaaggaagcaggcatgtcttacatggtggcagaagttttgggcttcgtggctgtcatcatagaagccgagtctctcaaaagaatcaggttttttgaaaattttactgtagcagaagagaggtcaactgatgagacattcagcttggctgaagaaacctgtagctctaatccagctatggttaggaggaagaaaattgccataagcatcatcttttccctatgtgagaaagaagaagcacaaaggaatttccaggacttcttcttttctcattttcccctgtttgaatctcacatgaacaggctgaagagtgcaattgaaaaggctatgatctcctgtaggaaaatagcagaatcaagtctccgagtccagttttatgtcagccgtttgatggaagctctgggagaattcagaggaactatctggaacttatattctgttccaaggatagctgaacctgtatggcttactatgatgtccggcactttggaaaaaaaccagctctgccagcgctttctcaaggagtttacacttctgatagaacagataaataaaaaccagttttttgctgccttactgactgcggtgttaacctaccacctggcctgggtcccaactgtcatgcctgtggatcaccctcccatcaaagccttctcagagaaacgtacctcccagtcagtgaacatgctggccaaaacacatccgtataatcctctttgggcacagctgggtgatctttacggagccataggctctccagtgagactgactcgcaccgtagtggtagggaagcagaaggacttagtccagcgaatactttatgtcctgacctactttctccgttgctctgagctacaagagaaccagctgacctggagtggcaatcatggtgaaggtgaccaagttttaaatgggagcaagatcataacagccttggagaaaggagaggtggaggagtctgagtatgtggtcattacggtgaggaacgagcccgctcttgtacccccccatcctaccaccaacagcagcagagagacacaacccctggccgacagggtttcctgagtgcccagagggcactgacagtagagacctgggtcttaaacctgacaaagaagctaacaggaggccagagcagggttctgaggcttgcagcgcagggtgcctggggccagcatcagacgcttcctggaaacctcagaatgcattttgtggggatgagaaaaataaagaggcaccgcaagatggctcttcaagacttcccagctgtgaagttttgggggcaggaatgaagatggaccagcaagctgtctgtgagctgttgaaagtggagatgcctacaagactgccagaccggtcagtggcctggccttgccctgacagacatctccgggagaaaccttccttagaaaaggtcactttccagattggaagctttgcatctccagagtctgactttgaaagccgcatgaaaaaaatggaggaacgggtgaaggcctgtggcccctccttggaggccagtgaggctgctgatgtggctcaggacccgcaggtttctaggagcccttttaaacctggctttcaggagaatgtttgctgtcctcagaatcggctttcagagggggatgaaggcgagtctgacaagggttttgcagaggacagaggcagcagaaacgacatggcagcagatattgctgggcagctcagccacgctgctgacttgggcacagcctcccacggtgcaggaggaacgggagggaggaggctggaggccactagaggtttgtatgtgaaggctgcggaaggacctgtgctggagcctgttgcccccaggtgtgtccagcggggccctggcctcgtggctggtgcgaatatcccctgtggggatgacaacaagaaggccaacttcaggactgaaggagacattccccgaaatgaaagctcagatagcgccctgggagacagtgacgacgaagcctgcgcttcagccatgctagatctgggtcacggtggtgacaggactggagggtccttggaagtggagctgcctctgccaaggtctcagagcatcagcacccagaatgtaaggaactttggccgctcacttctggcgggctactgccccacatacatgcctgatcttgtgcttcatgggaccggcagtgatgagaagctgaagcagtgcctggtggccgaccttgtccacacagtccatcatccagtcctggatgagccaatagctgaagctgtctgtattatcgcagacacggataaatggagtgtgcaggtagctaccagtcagaggaaagtgacggacaacatgaaactaggccaggatgtcctggtctctattcaggtgtccagtttgcttcaatacattctacagctctataagcttcacctccctgctgattttttgcatcatgcatctttgagatatactacaggagatgtaccttgagaagtaaaatgctatctgaatatctccggggacacacacgagtccatgtgaaagaattaggtgtcgtactggggattgaatccaacgacctgcctctgttgactgctattgccagtactcattctccttatgtggctcaaatactcttataagctaaagctcaggacagttcttccttgggaggaaaaaaatcaaattctcaacttgaaggagaaagggaataaggctctctgtggatgttcaaaaggctgaggaagaggcaaacaggaaacagtcctttccacctttttgttttgtgtttttgctgtcaagctgatgcttcattgaagacttaggtttacttgacataatagcatttgt

SEQ ID NO: 121845 - DNA, 403 bp, Homo sapiens
catagcaccagcctccacaaaatacttcagacacatatcatcaattccaccagtggttagaataacattggcaccagttgccaggatcttctgaattctctccttggtgatatctgattctctctgtctaatttggtccagtttttcagggtctgtaatgaccacctgtacaccaagcttcatttttgttttttgcaggctgaagtcaaggcaagcaatttttgcatttacgattctcttgggcatgccctgggatcccaccacacagttgagtgcatagccactgatgagcatactctccatttgacttctcccatgggctttcaaaatattaacagagttgactggatagcgtggctggcctcttatgtctgtgtatttaatagcaagtacagcatctact

SEQ ID NO: 121846 - DNA, 553 bp, Homo sapiens
atgcaacctgaactgcctatcatgaactgggtgctttctgagccatctagccataaagtgggtcatggacagcagcattccatcatcaaatggaggtggtatatatgtgattgggctgtagtaggtcgtgagagcacaaccaatggtttggcctggatggtccagggacttggaagaagcatgattggaaaattgaatgacaatgaaatttggggaaagaggtatgtggatagacctctctgagtggtcaaaaactgtgaagatatttgtatcacatgagagtgctcaccatatcacataaaagagctcagcagaggaggatttcaataatcaatgggatggaatgacctgttctgtggacaccactcatcctctttccctaaccacctctgtcatcgccaagtgggcccatgaacaaagtgaccatggtggcaggtatggaggttatgcaggggctcagcaacatggacttccacttaccaaggctgacctggctatgaccactgctgagtgcccaatttgccagcagcagagaccatcactgagcccttaa

SEQ ID NO: 121847 - DNA, 784 bp, Homo sapiens
atgactaaaattcaggaaccttctacctcagtaaaatttctaggggtccagtggagtggggcctatcaagatattccttctaaggtgaaggataagttgctgcatttggcccctcctacaaccacgaaagaggcttatttgggactattggattttggaggcaacacattcctcatttggtacagaacaggagaagactctacaacacgtccaggctgctgtgcaagttgctctgtttctcgagccatatgacccagcagatccaatggtgcttgaggtgtcagtggcagatagggatgctatttggagcctttggcaggcccccataagtgaatcacagtggagacctcaaggattttggagcaaggcccttccatcttctgcagctaactactctccttttgagagacagctcttggcctattactgggctttggtggaaactgaacatttgactatgggtcatcaagtcaccaagcaacctgaactgcctatcatgaactgggtgctttctgatccatctagccataaagtggggtgcgcacagcagcattccatcatcaaatggaagtggtatatatgtgatcgggctcgagcaggtcctgaaggcacaaccacccctgtcatcacccaatgggcccatgaacaaagtggccatggtggcagggatggaggttacacatgggctcagcaacagggacttccactcaccaaggctgacctggctacagccactgctgagtgcccaatttgccagcagcagagaccaacactgagcccttga

SEQ ID NO: 121848 - DNA, 643 bp, Homo sapiens
gctccttttgctttttattaaaatgtcacagcatgcctagagaacagtttatatggctgcataaagtctgaaacacaagaaaactaataaaaaaccacctgttaaatacacaattatgattattgatgtcctttcaattaaatcttgtgtgtttaaaatgaaaaacacgcagcctggtacaaatatccatatttcaatttgcgatctgctgcattggcatgagttttggtgaaactgcaaaatcacacccagtactcttctgtacgtcatccactgtcaggccttcccagagctcaatcagagtcaaccctttcttcttgtccacatcaaacacagccttttcagtaataatgcggttgacacattgctttccagtcaatggtaatgtacatttctccatgattttatgtgcatttccctttgcagaatgctccatggtgaccaccactttggttttcgcactggacactaaatccatagcacctcccattcctttcaccatcttcccaggtatcatccagttagccaggtcaccatatttggaaacctgcatcgctcctagcattgtcagatcgacgtgtccacctctaatcattgcaaatgattcatcgctggagaaaaaagaggctcctggaagaatagt

SEQ ID NO: 121849 - DNA, 2115 bp, Homo sapiens
atggacaccttactggacagtgaagatatagagcaattccatcatcgcagaaagttctgtttggacagcactgctctaggatacaacaggtggggtctatctgctgaggtcaagccataccaattggcactaccaacacctgatgttacagaccagaatgatggaatgtttcaggctgtgtttgatgtggacaagaagaaagggttgactctgattgagctctgggaaggcctgacagtggatgacgtacagaagagtactgggtgtgattttgcaaagaaagataggtcatggagaatgaaagtggtttatcatatgcttaaccaagtggtgactccagttgcagctgctgtatcagatgaggtttcattgcttgagcaaattaatacatctggtacctggtatgtagccactgacttggaaaatgccttttcctctattcctgtcataacggccaccagaagcaatttgccttcagctggcaaggccagcaatatacttttactgtcctacctcagggatatatcaactctccagcctacaccgatgacttcatggggagttccctgtgatcagttgacaaggaaaataagactagggcttagtccacagatggttctgcatgatatgcaggcaccacctgaaaccacccctgtcatcgcccaatgggcccatgaacaaagtggccacagtggcagggatggaggttatgcatgggctcagcaacatggacttccacttaccaaggctgacctggctatagctactgctgagtgcccaatttgccagcagcagagaccaacactgggccctcgatatggcataattcctcgggtagatcagccagattcctggtggcaggttgattatatttgggctcttccatcatggaaagggcagaggtttgtcctcagtggaatggacacttattctggatataggtttgcctatcctgcatgcaatgcttctgccaagactaccatctgtgaactcatggaatgcctcatccactgtcatggtattccacacagcattgcctctgaccaaggtactcactttacagctaaagaagtgtggcagtgggctcatactcatggaattcaccagtcttaccaagactcccatcatcctgaagcagctggactgatagaatggtggaatggccttttgaaatcacaattacaacaccaactaggtgacaatactttgcagggctggggcaaagttctccagaaggccatgtatgctctgaattggcatccaatatacgccaggattcacgggtccagaaatcaacgggtggaagtggaagtggcaccactcaccatcaaccctagtgatccactagcaaaatttttgcttcctgttcccgcaacattacattctgctggcctagaggtcttagttccagagggaagaacgatgccaccaggagcaggagacatgagaatgattcaattaaactggaagattgccacttggacacttttgggtcctcctacctcttcaattgccaatactgtgaaaagttctcttggtccagttggcttggataaaatgttggtggatgatgttggtgatgtaaccattactaatgatggtgcagccattctgaggttaccggaggtggtcattacagaccctgaaaaactggaccaaattagacagaaagaatcagatattatcaaggagagaattccgaagatcctggcaactgatgccaatattattctaatagctggtggaattgatgatatgtgtcaaaaggttggggctatggcaattagaagagctttaaaaagggaccttaaatgcattgctgaaacttctggagggactgttctgtcaaccctggccaatttgaagggtgaagaaacttttgaaactgcagtgtcgggacaggtggaagaagtggtacaggagagaatttgtgatgatgagctgatcttaatcaaaaccatgaagaaagttttggagtcaaaatccatgatgctagttggggatgctgtagaagcagccttttccatataccccgaaaactgtgaaaccagcatggagtctcaggaacagcttgctattgcagagtctgcaagacctcttcctgttattcactga

SEQ ID NO: 121850 - DNA, 246 bp, Homo sapiens
tcttttcgtctgcagatgactatagagaacatgaaccatttgaaattcattccccacaaagactacacagccaatcgcttggcagactgccagattcacttacagccccagctaattccaccaaacatggaggagtacatgaacagccttctctcagcggtgctgccttccgtgctgaacaaattccgcatttatctaactcttttgagattcttggaatatagcatatctgatgaaataaccaag

SEQ ID NO: 121851 - DNA, 3157 bp, Homo sapiens
atggcagccgcagcctgtctggatgcatccggggaggcgcggccagggctgcgccctccatggagccagcagggcagaaaacaagcgggagcgctgccccctaccaagttggcggggctcctggcacagctgcagccagcagaggctccagacctgggcattcctgtactctcagctacccgggaagaccctctttccccacaggctcggaagtgcctgctcccactccctggcctctctccctgctcccagcacctgctctggtgcagagcaagttgtggccgagcctggggaccgtcacgaccgagtcgggtgtgcacaggcttggacactgctgtcacaccagctccctgccgcctcagccccctctggacttcgggtgccgataagcgtgggagagaggccagcaggggtgagggcagctccaagtgggcctgcaggcacccctcagcccaaacagcctgggcagtggagggagacagacacaggttcctgtccagaaaggggcagatcacaggtaaaaccccaccttcaagccagggacaacctgaagcctggggtctgagctgcagttgtccacataccttgcatacctcattcttcctggacacgggacccctgaatggtgggactgaaaaagctgtaacacaaacaggaccaaaacacgccccctgctcaccaggttgtgggcaacaaggaggaaagggctgcggcccttcgggaacaccagacctaggggctctccgagccagggctgtgacagtggggctctgcagttcctggcatctccaagcttccgggcatcactgcattccccagtacctgcagcagaaactgcttgtggtacacctggtccagccacagccttgcacaaagccagtgcctgtaccgtcttttcgtctgcagatgactatagagaacatgaaccatttgaaattcattccccacaaagactacacagccaatcgcttggtcagtgggctcctccagctgcccagcaatacttcccttgtaatcgatgagactctcctgggaacaggggcagctggataccccaggtgttcataatgtgacagcccttagcaacctcataacgtggcagaaggtggattatgacttcagctaccatcagatggaattcccctgcaatattaacggttttcattacttcggaggggaggtcactcctcccggcagacgtgccagattcacttacagccccagctaattccaccaaacatggagggagtacatgaacagccttctctcagcggtgctgccttccgtgctgaacaaattccgcatttatctaactttttttgagattcttgggattttaggcatattctgatggaaattaaccaaggcagttgaagatgactttggtgaaaatgcggaaagaacgaccctccagagcatccactgctgatgatcttcacccagctgctcgtggtggctcggtgtctgtctctcagtgcttggtcaagacaacgctgtcaagaagaacgattggctgagagcaaagcagctagagtccttttaagaaagaacgaggcttcaagcagccaaaaatgtgttgaatggaaatgaactttaaagaattaattacctattgaagagtaatgggccaactgtagccccaatatttgtaaaattcagatattcatttatacccccattgttttataggtaatttctatcccaaaccagtgacatttcctgaaatcaagcctggtaacccctgatgtttatatgatattcagtaaggacttttcccttactgatttcatggagcttttgaagtttgttttataataattaattatataaattagtaatgatgtaaaaaaagtatttgatattaaaagtttaatattgataatgttgctgattgtaccatttccttagcttcagctgagtcataggccagactgttgaaatgctgaaatgaagaagtgttgttgcagtttcaaagtcagaggaatcgtgcttcggatgttcttatgttttctagttctctggttttccagttcacagtgggttggggtgcattccagtagtccatctttggggaacggaggcgtacttgcccattgattcacatgactacatgaaattctggtattgtcatttcccagatgtttggccacagaaactttttcccacttaacatttgttaacagcctgcaaaactaaacttgtacatggcagtggttcccagacttttgtattttatggaccggtagtaatatttccaaaaatctggggtactataaggttgccaatttaccttgccaagtaatccgaataaatcactgtattatcaccatttttttcataaaaggaaaggacaatctatctctgaataagaggagtcctttaaacggaatgaatgtggcttttgggggcaaaagaaaccaagacactacattgtctttattttctcctatcccagtgcatttgagaaccatgcataaggggatgctggtgctacaaagctgtgcccaaatatgaaaacaaaataggaaacttagaaagcaataccccctttagaaagtttttattttcttagatgtcattgagttgctttgattctattggatttttggcatttttttatgggatcatcagttggttccaagtatgttagatcagctaacatctgctactccagtaacagcctcatacaactgcaggtaggttttctccagaccaattagttttaatagagcaaactaacaacagactgtagtagcatggttatggcaaccagaatcttcagaaaggttaggacattactttttaagctgtcagtgggtatcaagtaacttacctagtttggaggcagataaaggatcccttacgttttttcctataaggcctaaattgaaattgttaaccaaggaaacagggtcagccttgaaaaatcaaggaattcattgtacctaataactgaagtaaaaataactagttgttcaacttttcctaaactcaaatctatttttataaacaaatgtaaataatgtttatattagagttgaactggttttcatttttataactggtagactagaccttccttaaacttttagaaataaaatgaaggcttcactggatttgtgaggataaaatacattttctttaattgtcctagagc

SEQ ID NO: 121852 - DNA, 2825 bp, Homo sapiens
atgccttcacacctaaatcaacatcagataattcatactaaggagaagtcctacaaatgtgaagaatgcggcaaatcctttaaacgctcctcaaactgtactacacataaaagaattcatactggagagaaaccctacagatgtgaggaatgtggcaaagcctttaggtggccctcaaaccttactagacataagagaattcatactggagagaaaccctacacatgtgaagaatgtggccaagcttttaggcgctcctcaacacttactaaccacaagagaattcatactggagagagaccctacaaatgtgaagaatgtggcaaagcctttagcgtatcctcaaccctcaatgaccacaagagaattcatactggagagaaaccctacacatgtgaagaatgtggcagagcctttaactgctcctcaacccttaagacacataagagaattcatactggagagaaaccctacaaatgtgaagaatgtgacaaagcttttaagaggcattcaagtcttgctaaacataagataattcatactggagagaaaccctacaaaactggctctttgcattttactgcagagatattgctggagcacgacataaacgattcatttcaaaaagtgatcctgagaaaatctggaagctgtgaccttaatactttacgtttaaagaaagactaccaacgtgtgggtaattgcaaggggcagaaaagcagttataatggcattcatcaatgtttgtcagctacccgtagcaaaacctgtcaatataataaatgtggcaaagcttttgggttgtgctcaatcttcactgaacataagaaaatttttagcagagagaaatgctacaaatgtgaagaatgtggcaaagactgtaggttgtcagattttaccatacagaagagaattcatactgcagatagaagttacaaatgtgaagaatgtggcaaagcctgtaaaaagttctcaaaccttactgaacataatagagttcatactggaaagaaaccctacaaatgtgaagaatgtggcaaaacatttacctgttcctcagcccttactaaacacaagagaaatcatactggagacagaccctacaaatgcgaagaatgtcacaaagcctttaggtgttgctcagaccttactaaacataagagaattcatactggagagaaaccctacaaatgtaaagaatgtcacaaagcctttaggtgttgctcagaccttactaaacataagagaattcatactggagagaaaccctacaaatgtaatgaatgtggaaaagcttttatgtggatctcggcccttagtcaacataacagaattcatactggagagaaaccctacatttgtgaagaatgtggcaaagcctttacctactcctcaacccttattagccacaagagaattcatatggaattgagaccttacaaatgtgaagaatgtggcaaaacctttaagtggttctcagacctgactaatcataagagaattcacactggagagaaaccctacaaatgtgaagaatgtggcaaaagctttacctgctcctcaaaccttattaaacacaagagaattcatatggaagtgagaccttacaaatgtgaagaatgtggcaaaacctttaagtggttcccagacctgactaatcataagagaattcacactggagagaagccctacaaatgtgaagaatgtggcaaaacctttacctgctcctcaagccttattaaacacaagagaagtcatactggagacagacctacaagtgcaaagaatgtggcaaagcctttaggtggttctcagaccttactaaacataagtaaacacaagagaattcatactggagagaaaccctacatttgtgaagaatgtggcaaagcctttatccgctcctcaacccttacaagccacaagagaattcatatggaagagagaccttacaaatgtgaagaatgcggcaaaacctgtataattcatattggagagaaaccctacaaatgtaatgaatgtggaaaaggttttatgtggatctcggcccttagaaaacataagagaattcatactggagagacaccctacatccatgaagaatgtggcaaggcctttacctactcctcaatccttattaaccacaagagaattcatatggaagagggaccttacaaatgcgaagaatgtggcaaaacctttatgtggctctcagactttactaatcataagagaattcaccctggtgagaaaccctacaaatgtgaagaatgtggcaaagtattgagctcgttctcacacgccattagacataagacaattcatagtagagagaagctccacaagtgttaaaaatgtggaaaagcctttaacaattcgtcatattgtgttcaacatcagagacttactactgaacaaatgtagtataaaggttattatgatgtttgtaatgaagatgagtataatggagctatatgtttctgaattctgaacaactatttacaaaattttatcctacttttttctgttgaaaatatgacttctctcgtctgctaaacacgtacagacctttagttttgatttacatcaatttaaatatacaaatgtatcactgtaaaataaactttaagtgtaacagatttatagagaaaatattcgtatttgtttatggttgtatacctattttgagaagaaaagaaaaatattagagtgaaacagataattttacatgtgttgatatcttgccagcaaaccagtaatttcaaagattttgaaagaaaatctgttttctctgctttgtattaaattcatttatctgaaatgtt

SEQ ID NO: 121853 - DNA, 536 bp, Homo sapiens
tttttttttaaattacataagacattcaatactttattaaaacaggcttcgtgttagacgagtttccccaactacaggctaaggcgttctgaacaagcttaagatggaccatgctaagctgtgatgtttgggagattaggtgtattaaacacatttcaacttgcaatactttcaacctatgatgtactcaccggaatgtaacccattgtaaactgaggaacacctgtactcaccccactggaagggatgtgggaggaaggtcaagcgcctcttccaggtcagaaggggcagaggttggatacaaaccaggcagcctgggtccatggtaaaagaacctccactaagtgaggctggggctgaatcccacgtttcctgcctcaaggagattgcagcaggcccccctcttttcccctctctccagagcgagtcaccccctggctcccagacagccacacctggtgaaggagaatgcggtgacaatggagagaacccccaggttcagtaagctgcctcgtctggctcactacacctagctg

SEQ ID NO: 121854 - DNA, 2338 bp, Homo sapiens
gcggccgccgagcgcgagctagagctgctgcgcgccagtctggagcaccagcgcggggtgagtgagcttctgcggggccggttgcgggagctggaggaagcccgcgaggctgcggaggaggcagcggcgggggcccgggcccagctacgcgaaggccaccacccagaccccgtggagctgtgccgaaaaggccgcgcagaccgagtccccggcagaggcgccctccttgactcaggagagctcgcccggatccatggacggagacaagggccgtggcgcccgcgggcaatcctcaaatccatcatgaagaagagagacggcacacctggtgcccaacccagctccggacccaagagcctgcagtttgttggggtcctcaacggagagtacgagagctcctccagcgaggacaccaagcgacagcgatggcgacagcgagaacggtggcgccgagcccccgggtagctcctcgggctccggggatgacagcggcgggggatccgactcgggcacccctggccctcccagcggcggggacatccgggaccctgagcccgaggcggaggcagagcctcagcaggtggcacaggggaggtgcgagctgagcccgcgtctgagggaggcgtgcgtagcgctgcagcggcagctgagccggccccgcggagtagccagcgacggcggcgcagtgcgcctcgtggcccaggagtggtttcgagtgtccagccagcggcgctctcaggcggagcccgtggccaggatgctggaaggggtgaggcgcctgggacccgaactgctggcgcacgtggtgaacctggcggatggcaacgggaacacggccctgcactacagtgtgtcccacgggaacctggccatcgcaagcctgctcctggatacgggggcctgcgaggtcaaccgccagaaccgagccggctactcggccctcatgctggctgcactcacctctgtgaggcaggaagaggaggacatggctgtggtccagagactcttctgcatgggtgatgtcaatgccaaggccagtcagacggggcagacagccctcatgctggccatcagccatggccgacaggacatggtgggcaaccctactggcgtgtggggctgatgtgaatgcgcaggatgcggatggggccacagcgctgatgtgtgccagtgagtatgggcgcctggacaccggtgcggctgctgctcacccagccagggctgtgacccctgccatcctggacaatgagggcaccagtgccctggccaatcgccctggaaggctgaaacaggaatgaaggtggccgctctgctaacatgcccacctgagctcgggccatcccgacacccagagcggagtcacccccttggctccccagacagccaacacctggtgaaggagaatgcggtgacaaatggagagaacccccaggttcagtaagctgccatcgtcatggctcactacacctagctgtggggagatctcctcgtcagtcacctcagcctttggcgcacagaagggtcccagggtcccctggctcagaggctaacactggccgacagagaaaggcaatttcaggttggggtgactgtggcaggaacggggctcactctggccccaccaaggtgaggtggggacccaacgtgatagagccctgatccacccactctctgaaaacttctttgctaataaaacattcctactacgcttgtgttttgtttggggtagaaggtgcaatcgaacaaacacgaaccccccgcctcaaaaaaggaaaagcttcgtttggcaagaccgcacggcccaggatttccagagtgcggaggatcggtgaaccgccctgggagcccactcaagaaacctggagaaaccctagtcgtataacccagaacaagaacctgagttaacttgaaaacacaaacgctttaattttaaagggagccatctagagttcacgtgtggggggacaaaaaaaaagggaccaaactgtgacaagaccaattccccatggggccaaagtggtcgatccccgacatccaaagaccccagcgagcgagccaagctcaacgtgcacaccctccggggcttctcgctctgactccaacaagggtgagcacgtcgccctcgcgcacggggccattttacattgcgcatgatggatcaggctcgtgtcgtcccatgaatttccacggcgcacctgcgatgcagctgtccctgagaaaacggtcctgcccaggaccttgggttgaccctggctcagcttgataggctgcacacgggctggtgtmccatgatggcggcgcggcggcggtctggcggagagcgggggggggggggggg

SEQ ID NO: 121855 - DNA, 408 bp, Homo sapiens
cgcgccctgctctcctgcgctgccctgacaactcggacccgctgaccagcatgaaggacgtcctcaagatcaccacgtgcgtggagatgctgatcaaggagcagatgaggaaatacaaagtgaagatggaggagatcagccaactggaggctgcagagagtatcgccttccgcaggctttcgctcctgcgacaaaatgctaacaagagccccaagacccgggacatccaggaggaggagctggaggtgctgctggaggaggaggcagccggcggcgatgaggaccgggaaaaggagattctcattgaacggatccagtccatcaaggatgagaaggaggacatcacctaccggctgccggagctggacccaaggggctcggacgaggagaacctggactcggagacgt

SEQ ID NO: 121856 - DNA, 464 bp, Homo sapiens
  misc_feature (1)...(464): n = a,t,c or g
ctaaacctggtgcggctgctatcccgctgcgaggcgattggcagcggagaaacgggacccggacgagtggcgcctggagaagcaaaccggcctctgaggtgatcaatgaatattcctggaaggtggattttctgagggggatgctgcaaggcgagaagctgacctcctcctcagagaaagcactggccaaccagttcctggcccctggcgtgntgccaaccacagccagagagcgagtaccctgccagtgagtnagaagcagtcggcagctgagctagacctcgtcctgcagcgacatcagaacctccagggaaaagctggcggaagagatgcttaggactggcccggagccttcaagaccaataccctgggccgcccagagttttcatcaagaaggacaaccagaccctgttcacattcattgaaaatgggcngaccagaacttggagaaaatttaagacgga

SEQ ID NO: 121857 - DNA, 1176 bp, Homo sapiens
atgaacaagagccccaagacccgggacatccaggaggaggagctggaggtgctgctggaggaggaggcagccggcggcgatgaggaccgggaaaaggagattctcattgaacggatccagtccatcaaggaggagaagcaaaaagggcttggcctggcggccggctggactgcagatgtctcttccaggcgccctggagcctcgcagctgccgccacctccaactcaccccatcccccagtaccggggctggggcccgcccgaccagcatttattaagcaccctttggacaaatgttggttcctacaagtctggaagttttctacagttgggtggatggtgtatgaacttggacatggatttgaactctgaggagtctcgctggctttttcgaaggcactgggatactggcggcataaaaccccatgagcgtaagcgggctgtagctcacctgacactgtctgagcgcgaggagatacgagctggtttgtcagccaaaatgagcattcgtgcgatagctactgcgctgaatcgcagtccttcgacgatctcacgtgaagttcagcgtaatcggggcagacgctattacaaagctgttgatgctaataaccgagccaacagaatggcgaaaaggccaaaaccgtgcttactggatcaaaatttaccattgcgaaagcttgttctggaaaagctggagatgaaatggtctccagagcaaatatcaggatggttaaggcgaacaaaaccacgtcaaaaaacgctgcgaatatcacctgagacaatttataaaacgctgtactttcgtagccgtgaagcgctaaaccacctgaatatacaggcatcttgcgaggtcgcattggctttggcctggcgagcgttatataccggaatggcgagagaggtcccgttaccctttggaccgggcacccatttcggatggttcccgaacttctgtaaagagggctctggggcagtggggggagcatctctcgcggcgaaacgcctttttccccttgtgtgcgaccgtcgtttaatcctgctacgcggggacgctctgtctcctacacgtgttgacacgagctattgtgctgtcaacacaacatgtgggagaggcagcggcgcactatatgacggcgagtctgtgaatggacttttcctcttcttgtttcttgagtag

SEQ ID NO: 121858 - DNA, 853 bp, Homo sapiens
ttatttgagtttaggcatgattcgaatgaagaggatcatgctaatgaagatgaagcagacgataatgagcatggcccagagcagccagttgactgacttctgcgtgtgctgctccagacgctctgactccgtcttcagtttctccaggttctggtccgccattttcagtgagtgtgacagggtctggttgtccttcttgatgacactctgggcggccagggtattggtcttgaggctccgggccagtcctagcatctcttccgccagcttttcctggaggttctgatgtcgctgcaggacgaggtctagctcagctgccgactgcttctcactcactggctgggaccctgccactccagttctcttccttacgtccaatctcaagcttctgcaagagtccgtgcctaagtagctcaattccgcatcttcgctggtgtaccgcgcccgtgactgcagatgcaccgtctttgtggcgggcactcgctctctggctgtggttggcacacggccaggggccaggaactggttggccagtgctttctctgaggaggaggtcagcttctcggcttgcagcatccccttcagaaaatcccaccttccaggaatattcattgatcacctcagaggccggtttgctggaaggcaggaagaagaaaaacaaaacctcgcgtggaccttcagggcctgcaacatgtcctctagggctcccacgtacttctccaggcgccactcgtccgggtcccgtttctccgctgccatcgcctcgcagcgggatagcagccgcaccaggtttagctccagcctcgacgccgccattatcgcccggccctacaccaccccttccgccacgaaa

SEQ ID NO: 121859 - DNA, 4084 bp, Homo sapiens
atggcggcgtcgaggctggagctaaacctggtgcggctgctatcccgctgcgaggcgatggcagcggagaaacgggacccggacgagtggcgcctggagaaggtgggcgtcacctactccgtggcctcgggacgagtgctgtttcaggatttcaccgagcagttccaggtgctcctgcccaaggatgcccagccctgcagggaggtcatctccaccctcctggagaaaatgaagatagacaagaggaactaccagatcgggaagaccaaggtcgagccaggcgttgagcctggccacttcggcgtgtgcgtagacagcctgaccagcgacaaggcctcggtgcccatcgtgctggagaagctcctggaacacgtggagatgcacggcctgtacaccgagggcctctaccgcaagtcgggtgctgccaaccgcactcgggagctccggcaggcgctgcagacagaccccgcagcagtcaagctggagaacttccccatccacgccatcacaggggtgctgaagcagtggctgcgggagctgcccgagcccctcatgaccttcgcacagtacggcgacttcctccgagccgtcgagctgccggagaagcaggagcagctggctgccatctatgccgtcctggagcaccttccagaagccaaccacaactccctggagagactcatcttccaccttgtcaagcaaccatcctctaactgccagtggctgtgcagggtggccctgctcgaggatgtcaaccgcatgtcacctggggcgctggccattatcttcgcaccctgcctcctgcgctgccctgacaactcggacccgctgaccagcatgaaggacgtactcaagatcaccacgccctggcgcggcgacgcacacggtacctgcccccctctagccccctccggacagcagcatcgccacgctgcaggtgagaagcgcaccaaggaaccaggaggcaaagggaagaagaaccgaaatgtcaagattgggaagatcacagtgtcagagaagtggcgggaatcggtgttccgccagatcaccaacgccaatgagctcaagtacctggacgagttcctgctcaacaagataaatgacctccgttcccagaagacgcccattgagagcttgtttatcgaagccaccgagaagttcaggagcaacatcaaaacgatgtactctgtcccgaacgggaagatccacgtgggctacaaggatctgatggagaactaccagatcgtcgtcagcaacctggccactgagcgtggccagaaggacaccaacctggtcctcaacctcttccagtcactgctagatgagttcacccgtggctacaccaagaacgacttcgagccagtgaagcagagcaaagctcagaagaagaagcggaagcaggagcgtgctaatgacatccccttagtgccacaggccagatggtatatcacgggcagcaatttggtgagtgacctttttggcttctggaatattccgaggagcgtggcccggctctgctcacctcttgcgctgcaggtgcccccgacacaggctctgcaggcggatgatgctctgtttctggtgccggaccgccagcaggcctggatggtgacggcggcccgcttcatctgcaggaagtgccgacgctccagcaccatccggaaccagctctgcagcagcaggattttccgcaccacctcccggtgcagcgtctcctgcagggcttgccgctccgtctccttcaggaagacctggcctggctcagggccgctggctatctctcagtacgagggaccatacccagaacttcctacgtcagctgaggtttcatcaaccaggacctcacgtcttccgctatcatctctacagtgttccttcctcatttctgatgagctctgtggacaggggcacctcctcctcccaccctcaagtgaaagcctctttaaaactacagctcaggggccggttaaaacgagccgagagaccgagggggacgttgtgccgctcatcttcgggtgggcgtttccacgctcggatgtcctccctgggccggtccacggtctgtgccccagggcctggcgcactcgaggtccggtcgcatcggtggccccggacgacatcggtgatccttgcatgacttccgctgagtccttgggtgtgacatgccaagctgaagccctctggtgtgaccatgccaagtgggtccctgctgatactgaccactccaggtgcgtggagatgctgatcaaggagcagatgaggaaatacaaagtgaagatggaggagatcagccaactggaggctgcagagagtatcgccttccgcaggctttcgctcctgcgacaaaatgctaacaagagccccaagacccgggacatccaggaggaggagctggaggtgctgctggaggaggaggcagccggcggcgatgaggaccgggaaaaggagattctcattgaacggatccagtccatcaaggaggagaagcaagtggctcaggaggacatcacctaccggctgccggagctggacccaaggggctcggacgaggagaacctggactcggagacgtcggccagcaccgagagcctgctggaggagcgggccgggcggggggcctcggaagggccccctgcgcctgctctcccttgccccggcgcgcccaccccgagccccctccccaccgtggccgcccctccaccgacgaaggctgtcgtccttcgtaacggtcagagtgaagaccccccggcggacccccatcatgtccacggccaacatcaagctcccaccaggcctgccctcccacctgcctcgctgggcaccgggtgcccgggaggcggctgccccagtgcggcgccgggagccacctgcccgccgcccggaccagatacattccgtgtacatcacgcccggggcagacctgccagtgcagggcgcccctggagcccctagaagaggatggccagcccacctggggccaaagcggaggtacttcggatccccccaacgtactgcctgccccccgcctcgggccagaccaatggctgagagccacagctgacaaagtctgcatgtccgaggacggcccctgcactggagctgggcgccagagctgcagagctagtgttcggccctcagagaaggatccagaatcaaaagctcaagagtgacgtgaggtgggcaccggccccaagtgcagagtcaaggcagggatgaggccggctggagccaggccccctcgcacgcagcccccaaatcatggacgcacctgtggggagcaccacatctgccacctgcggcctcacatctccccactcccctttcttgtacgtgtaactgtttctttgtacgtggtttacgtaactttaaactgtaacagccttaatgggaagaccaaatggttttttatatgtgtatgtacaaagttttctatttaacggctgcccgtctcccttattaacctgggacgtgagctgttcagaggcaggaggccattagggccattgcggcgttcttgaggcttcagaccctgctgtggttgggcttggggtggccaatgggctggggaccctccatggaggagttttgggacacttggggtcaactggacccgtggcctatttggacacatgttttccgggggggcagccactgggccaaatgtggcatttttgcacgtgctggaaccttcccatgggggtctgggctaattgggctggaaccaggaacatgagtcaggggcaccattggacctcacgtgcccagggagactttgaatgtggctgtcactcttccggaacgccaagggcatgcaggaggctgctttttggcactacccccacccctgtacagaataggagcccagcgactcaggactgctcacgggtcaggagggcaacgcctgaagtcagacctccctataggtcaacagggacaacctggggatctctggagcagggccctcctctactcaggcttggcccactcccccagacacctggacacgtggcccacaaatctgggacaaggggcccccgcacagcatgaaataaaaagtgcctgagaaaaaaagtcgacgcggccg

SEQ ID NO: 121860 - DNA, 415 bp, Homo sapiens
gcggggcccgaagcgtttactttgaaaaaattagagcgctcggggtccccgggcggcggcggcggcgcagaggaggaggcaggcggcggccccggtggctcccccccggcccacctgtcccctcgggaggggagctgagcccgacttctaccggggtcccccagcttccggactggccgcaccccggaggagccacgggggcgctgctgggaacgtgggcggggggccgtttcctgacactaccagcctgggaggcccaggtgtagcggtccgaggggcccggtcctgcctgtcagctccaggtcctggagccacgtccagcacagagtggacggattcaccgtggccgactcttttccctgctttggtttgtttgaaatctaaataaaactactttatgagaggccagagaaaa

SEQ ID NO: 121861 - DNA, 307 bp, Homo sapiens
gcttcggggacgatgaggatgactctggcacggaggagtcctgacaccaccagaataaacttgccgagtttacctcactaggggcgctgctgggaacgtgggcggggggccgtttcctgacactaccagcctgggaggcccaggtgtagcggtccgaggggcccggtcctgcctgtcagctccaggtcctggagccacgtccagcacagagtggacggattccccgtggccgactcttttccctgctttggtttgtttgaaatctaaataaaactactttatgagaggccaaaaaaaaaaaaaaaaa

SEQ ID NO: 121862 - DNA, 972 bp, Homo sapiens
atggctcggccgctagtgcccagctgcagaaggcgctgctgctggagctcaaggggctgcaggaagagccggtcagggattccgcgtgacactggtggacgagggcgatctatacaactgggagtggccatcttcgggccccccaacacctactacgagggcggctacttcagcctttcggttcctgaccaagatgtggcccctaacatctacgaggtgagcgcggcccccacgggcctcaagtcctcacctccgggacccagggtgctgggagcctcacgtcctcatccttccgggaccggggcgctgggagcctcacgtcctcgtcctccgggacccggggcgctggagcctcacgtcctcgtccttccgggacccgaggcgctgggagcctcagtcctcgtccttccgggacccggggcgctgggagcctcacgtcctcgtctccacgtcctcatcctccgggacctggggcactgggagcccgtgctgactctgacctgttctgacctgtcttcttcttgtgcagacgggggacgtgtgatctccatcctccacccgccggtggacgacccccagagcggggagctgcctcagagaggtggaaccccacgcagaacgtcaggctgtggcgccaaggctgattcgggacctgccagctggcggtcctgggcctcgctgtacctgcacgtgctttcacggggcctgcggcaccgtgtgtcggtgcagactcccccaggaccccaggccggccccaccgtctggaaccacctagaggtgtcccccatcctcagtcctggggccttctccttacccagccgtctctgggttggcacctcgtgccacgtgtgccgcctgggcctcgtccccagcccaacacttctcgcccgcaaacgtggacgcctccgtgatgtacaggaagtggaaaagagcaaggggaaggatcgggagtacacagacatcatccggtga

SEQ ID NO: 121863 - DNA, 1803 bp, Homo sapiens
atggctcggccgctagtgcccagctcgcagaaggcgctgctgctggagctcaaggggctgcaggaagagccggtcgagggattccgcgtgacactggtggacgagggcgatctatacaactgggaggtggccatcttcgggccccccaacacctactacgagggcggctacttcaaggcgcgcctcaagttccccatcgactacccatactctccaccagcctttcggttcctgaccaagatgtggcaccctaacatctacgaggtgagcgcggcccccacgggcctcaagtcctcatcctccgggacccagggtgctgggagcctcacgtcctcatccttccgggacccggggcgctgggagcctcacgtcctcgtcctccgggacccggggcgctgggagcctcacacgggggacgtgtgtatctccatcctccacccgccggtggacgacccccagagcggggagctgccctcagagaggtggaaccccacgcagaacgtcaggctgtggcgccaaggcctgattcgggacctgccagctggcggtcctgggcctcgctgtacctgcacggtgctttcacggggcctgcggcaccgtgtgtcggtgcagactcccaccaggaccccaggccggccccaccgtctggaaccacctagaggtgtcccgccatcctcagtcctggggccttctccttacccagccgtctctgggttggtcacctcgtgccacgtgtgccgcctgggcctcgtccccaggaccattctcctgagtgtgatctccctcctgaacgagcccaacaccttctcgcccgcaaacgtggacgcctccgtgatgtacaggaagtggaaagagagcaaggggaaggatcgggagtacacagacatcatccggacccaggagcatccagggcaccttccatcctgcactcgctggtacctggtgtcgtggggtcatctcggggcagcatcctggtgctgggcggtctcggctctgagcagccatgcccaagtcccgctgagctgtgtcgggcaggctgccgtggagcccggcttggtcagggatgttggtcttgctgaacaggacctccagaccgtcctccagctcatgctggcggtgtgccggcggcacctccacggtgcagtgccgtccccggggcactgtcagtcacccccccagcccatcggagagcttggaaagcaaagcttggcgtccgctgggtcccgccacccagggacgtccctgaggccagacgcctgccctccacgcgtcatgcatccccataaaaagcactgggcttgtgggctgggcttggggctgtctgtctgctccctggtgccctcccatgcgggcactgtgggacccgcacaccctggtagcagccagccccagagcccagagccgtgcctggtcggtgataggggctcgagcccattgcctgcggctgcagcctcgttcctgttttctgtcaaatggggtcagcgtgccgcctggccctgctgtgccacccccggaagcccctttgcttccagtcctggggggacattcttgacgcgtgtcctggaggtggagccgggggcaggttcctcgaagcaggtcctggggaccaaggtggacgcggagcgtgacggcgtgaaggtgcccaccacgctggccgagtactgcgtgaagaccaaggcgccggcgcccgacgagggctcagacctcttctacgacgactactacgaggacggcgaggtggaggaggaggccgacagctgcttcggggacgatgaggatgactctggcacggaggagtcctga

SEQ ID NO: 121864 - DNA, 1515 bp, Homo sapiens
attgcggcggcgccagagctgctggagcgctcggggtccccgggcggcggcggcggcgcagaggaggaggcaggcggcggccccggtggctcccccccggacggtgcgcggcccggcccgtctcgcgaactcgcggtggtcgcgcggccccgcgctgctccgaccccgggcccctccgccgccgccatggctcggccgctagtgcccagctcgcacaaggcgctgctgctggagctcaaggggctgcaggaagagccggtcgagggattccgcgtgacactggtggacgagggcgatctatacaactgggaggtggccatcttcgggccccccaacacctactacgagggcggctacttcaaggcgcgcctcaagttccccatcgactacccatactctccaccagcctttcggtttcttaaccaagatgtggcaccctaacatctacgagacggggtacgtgtgtatctccatcctccacccgccggtggaacggacccccagagcggggagctgccctcagagaggtgggaaccccacggcagaacgtcagggaccattcttcctgagtgtgatcttccctcctggaacggaggcccaacacctttcttcggcccgcaaacgtgggacggcttccgtggatgttacagggaagttgggaaagagagcaagggggaaggattcgggagttacacagaacatcattccggaagcaggtcctggggaccaaggtggacgcggagcgtgacggcgtgaaggtgcccaccacgctgccccgagtactgcgtgaaagaccaaggccgccgggcgcccgacgagggctcagacctcttctacgacgactactacgagggacgcgagggtggaaggaggaggccgacagctgcttcggggacgatgaggatgactctggcacggaggagtcctgacaccaccagaataaacttgccgagtttacctcactagggccggacccgtggctccttagacgacagactacctcaacggaggttttgtgctggtccccgtctcctctggttgtttcgttttggcttttttctccctccccaatgtctgttctgggttttcaacgttgctttcaagaagaaagaaggggcttgccccccacccgcccaactcacgttcacttcggggctcggttggacggggccccagggtgggagcggccggcccaccttgtcccctcgggaggggagcttgagcccgacttctaccggggtcccccagcttccggactggccgcaccccggaggagccacgggggcagctgctgggaacgtgggcggggggcccgtttttctgacactacccagcctgggaagccccaggtgtaagcggtccgaggggcccggtcctgcctgtcagctccaggtcctggagccacgtccagcacagagtggacggattcaccgtggccgactcttttccctgctttggtttgatatgaaatctaaataaaactactttatgagaggccaaaaaaaaaaaaaaaaa

SEQ ID NO: 121865 - DNA, 296 bp, Homo sapiens
tctctctctctcttttttttttgttaaagcacatttctatgtaaagtccatgctccattctaaagatgcctctgggatttcagggatggatttttatgtagttcaatagttttcttggcagacagcttatgcaggagaggtgggccgttggctcagtccagccttgactgagcgcgggtcaggccagactctctgaacttggtgttggcgtgtgttttgtgtgtgtctggaggtgacatatgtgggtgacagaagcatatgttacagtgaaacattaaaactacagcaaagtgaaa

SEQ ID NO: 121866 - DNA, 415 bp, Homo sapiens
tgtttcgaccttggattccctcagtaacggcgagtgaacagggaagagcccatcgccgaatccccgccccgcggcggagcgcgggacatgtggcgtacggaagacccgctccccggcgccgctcgtggggggcccaagtacttctgatcgaggcccagcccgtgtacggagtgatgccggtaccgttcccaggcgcgccgcacccggatattcccgcacctggtttggttgttaaagcagcccgaagcgactggtaaactccatctaaggctaagtaccgcctctactcgggtgaggggttctgctgtatcagccgcctttatttaaaatttgggaagcccctcttctaccggatttacttcaacaatagaaattatattctctctggctcaataaagccctggggaaataaacg

SEQ ID NO: 121867 - DNA, 1392 bp, Homo sapiens
agagctctgtgccctggtcttcggggtcaacacgttctttgccaccatcgtcaagaccatcatcactttcattgtctcggacgtgcggggcctgggcctcccggtccgcaagcaggactcggtggtggtttttctagactgcccttccatctggtgacttcggtacattgacttactcatcctgagagttcacctgcagatccacttgtggggcttacgtgggagacgtgctgaatttaagcatattagtcagcggaggaaaagaaactaaccaggattccctcagtaaacggcgagtgaacagggaagagcccagcgcccgcaaactcccgccccgcgcggggcgcgggacatgtggcgtacgggaagacccgctccccggcgcccgctcgtggggggcccaagtccttctgatcgaggcccagcctctaccaccagtccagaacttgcagtgggtgcggtaaacggtggcccctcctcagcaaacatttccaggggattctggcagcagagtttccatgggaacatgtgctggttctgcgctgaacccggtgtggctggggttcccttcacagccaatattgcaggaactgagcctggtggcctcggccagggtaggcagtgctctttggccacccagtgtcacaaacctgaactcaagttacaggcaaaacctgcttttcctttttctttctctctctctctctttttttttttgttaaagcacattctaatgtaaagtccatgctccattctaaagatgcctctgggatttcagggatggatttttatgtagttcaatagttttcttggcagacagcttatgcaggagaggtgggccgttggctcagtccagccaggctgagtggcgtcactccattccttgcaatgccaggggatgtcatttgtccacctgagggggcttccccagtctcccttccctgacctgtggtcagaatgatggcctcagccttgactgagcgcgggtcaggccagactctctgaacttggtgttggcgtgtgttttgtgtgtgtctgccacctcccagcctccatacccgtcccctccccagtagtaaccaatcgggtcatttgggagtgttttcttcgtcgctgcttttatggcatctaggtgtctacctgtgaacatgtaaaatgtggagcgccgtgcgggcttccgaacagccgcgatgcattcattttgtaggtgttgtttgcacttgctttgttgatgcagccccacgtggtgggatctgccggagacagcacacaggagctgccagactccaattacagcaaaggatccctgaccttgggcctcttctacggctcccagcactgacttcaccaggctggagtcatcttccagttgttcaggggcaggcaccagct

SEQ ID NO: 121868 - DNA, 2871 bp, Homo sapiens
atgacgcccggcgagcgcagcctcattcaacgggccctgaaaaccctggaccgccatcttcatgaacccggcgtggccttcacctccacccgtgcagcacgggaatggctgattctgaacatggcgggactggagcgtgaagaattccgggtgctgtatctgaacaaccagaatcagctgattgccggtgaaaccctcttcaccggcaccatcaaccgcacggaagtccatccccgggaagtgattaaacgcgccctgtaccacaatgccgctgccgtggtactggcacacaatcacccgtccggtgaagtcacacccagtaaggcagaccggcttatcaccgaacgtctggtacaggcactgggcctggtggatatccgggagccggaccatctgatagtcggtggcaaccaggttttcacctttaacgaacatgggcaagacaagaggagtacatttctacagaacatcaagttcaagatagcaaaagtcacgagcaataccttcatcatggagccacaaatcgtcactcatggtgatttctcacttgataaccttatttttgacgaggggaaattaataggttgtattgatgttggacgagtcggaatcgcagaccgataccaggatcttgccatcctatggaactgcctcgaccgttccgtggcaaagcaaaagttcaaaatcaccaactggtccacctacaacaaagctctcatcaaccgtggctccctcactttctggctggatgatggggcgattcaggcctggcactgccccgttaaaacttattaccagtacactcctgtatcatcaaaagccatgtatgcgctttctggaacggtaattcagagactgcgcttccattcttggcttaatgaggatccattcgtttgtgaatatcaaggccaatcgtctgacctgcctcaacctcctgtcaatgctggcggcggctctggtggtggttctggtggcggctctgagggtggcggctctgagggtggcggctctgagggtggcggttctgagggtggcggctctgagggtggcggttccggtggcggctccggttccggtgattttgattatgaaaaaatggcaaacgctaataagggggctatgaccgaaaatgccgatgaaaacgcgctacagtctgacgctaaaggcaaacttgattctgtcgctactgattacggtgctgctatcgatggtttcattggtgacgtttccggccttgctaatggtaatggtgctactggtgattttgctggctctaattcccaaatggctcaagtcggtgacggtgataattcacctttaatgaataatttccgtcaatatttaccttctttgcctcagtcggttgaatgtcgcccttatgtcttaagcgcagggtccgagatcggggcggcgtgtgcaagccgatctgggtacgacaataaaggcgttcgtgatatagggtatacagactgcaagcgttcagaagatcttgatcccttgcgccatcagatccttggcggcaagaaagccatccagtttactttgcagggcttcccaaccttaccagagggcgccccagctggcaattccggttcgcttgctgtccataaaaccgcccagtctagctatcgccatcacgcactgctcatcctaacgcccatgtccggtacccgcttcccccccatccctggccccgtagtcaacatccgagtgtttcccttcgcccccagttctgaatgccggatctgctattcttggtcttgggtccctggatcccccgttcactgtcaatccgatggctccgttccgatcccatcttacgcgcctttggcgtctcagtattcttcctccttcctgttcttcaggaatagacagccctatgcgccttatgactaccttagcgtcatgaccccatctcgtacattgagggaacaaattcgcatcagatatgctcccagtgcccctcgtctcccgcccccggaggtgtactgctctaactccactatcgtctacgtgcgcaacaacccctcgggccccacaccgggtttcgcgggtggcacactgttggaaggccgatcgggcgggccctttcggttttacgccaagcgggcaaagggggatgttctcaagccatttagtttgaacctacccctccagaccctgatccggttcatggtggacattgcctgcggcatggagtacctgagctctcggaacttcatccaccgagacctggctgctcgaaaatgcatgtacgaattctggaggactcgagggtgggagacagcagcagcgtactacggcggcggcacgactttcttccgtaaagaaagccagaagcttcagcagagcgctaaaaaacgcgatgctgagttagcgaacggcgccctcggtatcatagagttaaataatgattacacattgaaaaaagtaatgaagccgctgatcacttcaaacacggtaactgatgaaatcgagcgcgcgaatgttttcaaaatgaacggcaaatggtacttgttcactgattcacgcggttcaaaaatgacgatcgatggtattaactcaaacgatatttacatgcttggttatgtatcaaactctttaaccggcccttacaagccgctgaacaaaacagggcttgtgctgcaaatgggtcttgatccaaacgatgtgacattcacttactctcacttcgcagtgccgcaagccaaaggcaacaatgtggttatcacaagctacatgacaaacagaggcttcttcgaggataaaaaggcaacatttgcgccaagcttcttaatgaacatcaaaggcaataaaacatccgttgtcaaaaacagcatcctggagcaaggacagctgacagtcaactaa

SEQ ID NO: 121869 - DNA, 478 bp, Homo sapiens
gcgtcgctttgtttcggcagacaactgccgctcattgcgctggaaatcactatatacgccactggacgccgacgcgtcagtgctgatttcaacaggcattgacgccacgcaaaccaatcacggtcgccaacatctcgacgaaacccaggtgcgggtgtttggtcagcatctgatgcaggggagctacaccacccaggatggacgcagtgatgtggccatcagctgtagctgtaagctagaaatgtgcgcgcagcagagctacgaccaacttcttgcagcatcaacagaaaactggcgtcaatggtggcagaaacgtcgtatcacggtaaatggcggcgaagcgcacgatcagcaagcgttagattatgcgctttatcatctgcgcatcatgacgcctgcccacgacgagcgcagcagcattgcggcaaaaggcttaaccggcgaaggctacaaaggccacgatcactgggatacagaa

SEQ ID NO: 121870 - DNA, 409 bp, Homo sapiens
  misc_feature (1)...(409): n = a,t,c or g
nctgctgttgttgctgctgttgctgctgcgnnnnnnnnnnnnnnnnnnnnnnnnnnnnnngctttggtcttcttagttctgttcttcaggtctctcttcttcagcccatccatgttagctctaaggaggtctgaataagccatctgaaacttattcacttccttggagctcaccacagtgctgatcttcttcttcccatcggtagctcttaacagacacttgttgtctgcgggctcaaagccctccacagtacctttctttggaatgggtttggttcgaccgtcatacttcttcaaggtgatatagacgctgcccgacgtccggcacttctggaaaagtctggtcagctccgtcaggaactgctcgctctccaacaacaccatcgcggcgacgctggctcgctcgtgcc

SEQ ID NO: 121871 - DNA, 539 bp, Homo sapiens
  misc_feature (1)...(539): n = a,t,c or g
ngcgcggtttttgcngtactgccggctgtatgaattcggcacgagcgcgatggtgttgttggagagcgagcagttcctgacggagctgaccagacttttccagaagtgccggacgtcgggcagcgtctatatcaccttgaagaagtatgacggtcgaaccaaacccattccaaagaaaggtactgtggagggctttgagcccgcagacaacaagtgtctgttaagagctaccgatgggaagaagaagatcagcactgtggtgagctccaaggaagtgaataagtttcagatggcttattcaaacctccttagagctaacatggatgggttgaagaagagagacaaaaagaacaaaactaagaagaccaaagcnnnnnnnnnnnnnnnnnnnnnnnnnnnnnncgcagcagcaacagcagcaacaacagcagcaacaacagcagcaacagcagcacagtaaagggcatacatttcctgctttcaccaattaaccactgaattgctattttttcttttgccagataactaagtttgttccc

SEQ ID NO: 121872 - DNA, 2187 bp, Homo sapiens; identical to SEQ ID NO: 115216

SEQ ID NO: 121873 - DNA, 445 bp, Homo sapiens
ttcccgggtcgacgatttcgtgttgttggagagcgagcagttcctgacggagctgaccagacttttccagaagtgccggacgtcgggcagcgtctatatcaccttgaagaagtgtaagcagcgggaggggagccgggcgatgctccctgggttcccggtgtctgggagccaccggagtctgtctgccgcggaccgccgccttcctctacctttccccaccctgtactgagcacattcggggcttcgggcccggaaaatagtagggattgtagctggctcagtccccagcactgagccgcctaggttgcttctggtaacaatgggccccaagcagcccagggctctttgtcagggatcccagacgccgccactttgagtggaatttaacgtgcttcgatattacatgtttccgtcgtggaaataataagttctccagggtttcgcc

SEQ ID NO: 121874 - DNA, 2655 bp, Homo sapiens
atgcgtgtactgggtattgaaacttcctgcgatgaaaccggcatcgccatttacgacgatgaaaaaggtttgttagccaaccaattgtatagtcaggtgaaattgcacgctgactacggcggcgtcgtgcctgaactggcctcccgcgatcatgtgcgtaaaaccgtaccgttgatccaggcggcgctaaaggagtctggtttaacggcaaaagacattgatgctgtggcctataccgcaggccctggattagtcggcgcgctactggttggcgcgaccgtggggcgttctctggcgtttgccctgggacgtttcggcgatccctgtacaccatattggagggcatctgttagcgcccgatgctggaagatacccgccccgaatttccgttgtgcgctgcttggttcggcggcatacgccgttaatcacgggactggcttgtcaaaaaaaccaaccaccctgggtagcgatcactcaaaaacgccggcacaacttgccaagcgcgcaggagaagcgcgacgcaacggctggcagggcgcgctatttccgtgggaaagcgcgcgcagcggcgaagaagagacgccggaatttgccgccattaacattcgcaccgggctgcggcaaaaagtggcctcggcgcaggcggaacatcatctggtggccgatatcgcctgggcggttattcaatactggcagaccacgggggatgaaagtttcattgcgcatgaaggcatggcgctacttctggagacggcaaagttctggattagccgcgcggtgagagttaacgatcgtctggaaattcatgatgttattgggccagacgaatataccgaacatgtcaataataatgcatacaccagctatatggcccgctacaacgttcaacaggcgctgaatattgcccgccagttcggctgtagcgacgatgcgtttatccatcgcgccgaaatgttcctcaaagagctatggatgccagaaattcagcccgacggcgttttgccgcaggatgattcgtttatggctaagccggcgattaatctggcgaaatacaaagcggcggcggggaagcaaaccatactgctggattattcacgcgcagaagtgaacgagatgcagatcctcaaacaagctgatgtggtgatgctcaattacatgctgccggagcagttctcagcggcatcgtgtcttgccaatctgcaattttatgaaccgcgcactattcacgactcgtcattacttagaacaacacacaacaagatcatcgccctgtgctctaacgagccagtggattgcgttctgtgggttaaaaacagccaacttatgcctaatgattacaacccaaacaacgtggcaccacccgaaaaaaaactgctgcaaaaatccattgaaatagatggttttacccaacccattgtggtcacacatacggataaaaatgccatggaaatcgtggatggttttcaccgccatgaaattggtaaaggctcatcatcattaaaattacgcttaaaaggttatttgccggtgacctgtctggaaggtacgcgtaatcaacgcatcgccgcgactattcgtcataatcgcgctcgtggacgccatcaaatcaccgccatgtcggaaatcgtccgtgaacttagccagttgggatgggacgataataaaattggcaaagagctgggaatggacagcgacgaagtgctgcgcctgaagcaaattaacggcctgcaagagttgtttgccgaccgtcaatattcccgcgcctggacgctaaagctggcgcaggcgttcagctgctgccagcaacgtcgattccttcttggcaaaacagagacgaatcagtttatgtgggaaaggatcggcgcaaaccccttggcgacggactcctatatgtgctcgacagatctcatcgcccgtatgcataatatcgtttacgcgcagcagaagtttacgacccagtgcgccgcctggcgcgacagcgagggcatcgcccataaccagcgtggcggtggtgctgctgtcggttcccgcttcccactgcttggcgagctgcaaagcatactcaaacaagccgtggaagaggcaaccgtcaaagcgccactacgtcacaatgcggtagaaatttttgacgaagtaaacaccggcaaaaataccggtagcggcgtaccgtgggtcacctgggacatcatccccgacaatgacgatgcggaaatcgaagtttacatggcaggcggcggctgcacgctacctggccgctcgaaagtgttaatgccgtcagaaggctacgaaggcgtggtgaaattcgtcttcgaaaatatctccaccctcgccgtaaacgcctgtccaccggtactggtgggcgtgggcatcgccacctcggtggaaaccgccgccgtactctcgcgtaaagccattttgcgcccgattggcagccgccatcccaatccaaaagcggcagaactggagctacgcctggaagaaggactcaaccgtctggggattggtcccacaagggctgaccggcaacagttcagtgatgggcgtacatatcgaatctgccgcccgccattcgtcaaccatcggcgttgctgtctctaccggctgctgggcgcattgacgcgggacgcttgctggtcatgccgatctcacctttga

SEQ ID NO: 121875 - DNA, 837 bp, Homo sapiens
atgttggacgagtcgaaatcgcagaccaataccaggatcttgccatcctatggaactgcctcggatcagatcacgcatcttcccgacaacgcagaccgttccgtggcaaagcaaaagttcaaaatcaccaactggtccacctacaacaaagctctcatcaaccgtggctccctcactttctggctggatgatggggcgattcaggcctgggtggcggctcctgagggtggcggctctgagggtggcggttctgagggtggcggctctgagggtggcggttccggtggcggctccggttccggtgattttgattatgaaaaaatggcaaacgctaataagggggctatgaccgaaaatgccgatgaaaacgcgctacagtctgacgctaaaggcaaacttgattctgtcgctactgattacggtgctgctatcgatggtttcattggtgacgtttccggccttgctaatggtaatggtgctactggtgattttgctggctctaattcccaaatggctcaagtcggtgacggtgataattcacctttaatgaataatttccgtcaatatttaccttctttgcctcagtcggttgaatgtcgcccttatgtctttggcgctgtacggcacgacgtacggcgaattcgggtcacaggagtgacccgcgtgacgccgccagaggaggtagatacaagtgtgcactcgcgcggtgcccatcgtatacgttctggattcgctccaaaacgaagtgtaagggtaacgacggacacgtgtataaaaagaaattccacctgcggggtcaagtccctctccctttgggatggcggtgggtttcgttga

SEQ ID NO: 121876 - DNA, 1047 bp, Homo sapiens
atggttcctgcgccgggttgcattcgattccctgttggtaattgtccttttaacagcgttcgcgtatttgttctcgttcaggcgcaatcaggaatgaatacgggtttggttaatcgaagtgattttgatgacgagcgtaatggctggcctgttgaacaagtctggaaagaaatgcataagcttttgccattctcaccggattcagtcgtcactcatggtgatttctcacttgataaccttatttttgacgaggggaaattaataggttgtattgatgttggacgagtcggaatcgcagaccgataccaggatcttgccatcctatggaactgcctcgccatgtatgacgcttactggaacggtaaattcagagattgcgctttccattctggctttaatgaggatccattcgtttgtgaatatcaaggccaatcgtctgacctgcctcaacctcctgtcaatgctggcggcggctctggtggtggttctggtggcggctctgagggtggcggctctgagggtggcggctctgagggtggcggttctgagggtggcggctctgagggtggcggttccggtggcggctccggttccggtgattttgattatgaaaaaatggcaaacgctaataagggggctatgaccgaaaatgccgatgaaaacgcgctacagtctgacgctaaaggcaaacttgattctgtcgctactgattacggtgctgctatcgatggtttcattggtgacgtttccggccttgctaatggtaatggtgctactggtgattttgctggctctaattcccaaatggctcaagtcggtgacggtgataattcacctttaatgaataatttccgtcaatatttaccttctttgcctcagtcggttgaatgtcgcccttatgtctttggcgctggacagttttgtgtttctggattcttggttgacataaaagaaaaagagaaggggggagaggaggaaaagggccagggagagattgagagagagagagaaagaaaagggaaaaaaggaagaaaagatatctcttag

SEQ ID NO: 121877 - DNA, 2285 bp, Homo sapiens
  misc_feature (1)...(2285): n = a,t,c or g
atggtgttgttggagagcgagcaggtatggctaggcctggccggccgagggaagggggcggctcaggcgttactcgagacctgtgcctcctgcaggaggaccagggccttgacgcggcaggacgaggatttggggctggctaacggggctgggcctgttgttttccagttcctgacggagctgaccagacttttccagaagtgccggacgtcgggcagcgtctatatcaccttgaaaaagtgtaagcagcgggaggggagccgggcgatgctccctgggttcccgtacactcctgtatcatcaaaagccatgtatgacgcttactggaacggtaaattcagagactgcgctttccattctggctttaatgaggatccattcgtttgtgaatatcaaggccaatcgtctgacctgcctcaacctcctgtcaatgctggcggcggctctggtggtggttctggtggcggctctgagggtggcggctctgagggtggcggctctgagggtggcggttctgagggtgacggctctgagggtgacggttccggtggcggctccggttccggtgattttgattatgaaaaaatggcaaacgctaataagggggctatgaccgaaaatgccgatgaaaacgcgctacagtctgacgctaaaggcaaacttgattctgtcgctactgattacggtgctgctatcgatggtttcattggtgacgtttccggccttgctaatggtaatggtgctactggtgattttgctggctctaattcccaaatggctcaagtcggtgacggtgataattcacctttaatgaataatttccgtcaatatttaccttctttgcctcagtcggttgaatgtcgcccttatgtctttggcgctggtaaaccatatgaattttctattgattgtgacaaaataaaaatattacgtggtgtctttgcgtttcttttatatgttgccacctttatgttaccggttattgccaacattgctatcccgcaaaagaggccgtttatgcaacaaaccaggtgcgaagttcaatgcagggaagacattgaggtgcaaaaactgaagagttacgacaaacttcttgcaagcatcaacaagaaacctggcgtcaatggttggcaaaaacgtcgtatcacggtaaatgccggcgaagcgcacgatcagcaagcgttagattatgcgctttatcatctgcgcatcatgacgcctgcccacgacgagcgcagcagcattgcggcaaaaggcttaaccggcgaaggctacaaaggccacgttttctgggatacagaagtatttttgttaccgtttcatctgtttagcgatccgacggttgcccgaagtttactgcgttatcgctggcacaacttgccagggcgcgccaggagaaagcgcgacggcaacggctgggcagggggcgcgcctatttccgttgggaaagcgcgcgcagcggcgaagaagnaaggacgccgggaattttgccgccccattaaccattctgcaccggggctggcggcaaaaagtggccctcgggcgcaggcgggaaccatcatctggngggcccgatatcgcctggggcggtttatttcaatactgggccagaccacggggggatgaaagtttcattggcgcatgaagggcatggcggctacttctgggagacggcaaagttctggattagccgcgcggtgagagttaacgatcgtctggaaattcatgatgttattgggccagacgaatataccgaacatgtcaataataatgcatacaccagctatatggcccgctacaacgttcaacaggcgctgaatattgcccgccagttcggctgtagcgacgatgcgtttatccatcgcgccgaaatgttggggatcgtcgctcacaaaaaggggatctgtcaccagcattcgaatgctcattcgagcgccaaccctgctcctaagaagtcagacacacaaacacacattcagagccagctgggctggggacacagtcccagaagtacagaatgtgttcgcttccaggtggcatgcctgtgcttcagctgtggctgtaccagcacggatgcagcctcaggctcctctcccagccttggcagccatccagaaagccagcccgaagaggaagggttaagtgcctggggacccagcccagacagcggctgctggaacagggaaggcagcctccaggccatggcacagagggctcctccagcacgagcctgccagccgccgcctttgttgatggactctgccacatgctcggctgacacgtga

SEQ ID NO: 121878 - DNA, 853 bp, Homo sapiens
ttttttttttttttttgataaacagacatgtttaatgatagcttgctcttcacagagatgtctacagagacttttaatctataatccaggagtatataaccatgcagcacagaccaattagccaaatgcaaaataaactagattcttaccacaactatcctataaacactgcaactattctttccaaaaggaccctaatcttatgtgaaaaacacctactgtgggggaaccagaaacctagctatctggccaaaaaggaaaaaatagcaattcagtggttaaattggtgaaagcaggaaatgtatgccctttaactgtgctgcttgtttgctggctggttggttggctggctggttggttggctggcttgtttggcttgcttgcgggcaaggtgcttgcttgcttgctgctgcctgttgttgactgctgttgctgcctgcctttgggtccttccttaattttgttctttttgtctctccttccttcaaaccccatcccatgttagcttcttaaggaggtttgaaataagccattctgaaaacttattcacattccttggaagctcaccacagtgctgatcttcttcttcccatcgggtagctcttaacagacacttgttgtcctggcgggctcaaagccatccaaaagtaccttttctttggaatgggtttggttcggaccgtcatacttcttcaaggtgatataggacgctggcccgacgtccgggcacttctggaaaaagtctggtcagctcccgtcaggaactgctcggctctccaacaacaccaactcgcggcgacgctggctcgactccctcggcttaagcccctagcagtgagagccggagtcgacc

SEQ ID NO: 121879 - DNA, 1024 bp, Homo sapiens
  misc_feature (1)...(1024): n = a,t,c or g
catggcgcaggggcagccaagtttcaggcgcacaaacccgcaaagagtaagacggccgcggagctctgaaaagaatcggggcccaagaaaaggcggtcgtgttatcgctcccaagaaggcgcgcgtcgtgcagcagcaaaagctcaagaaggtttcactatgctgctcgggctggtcttgaactcctggcctcaaggcatcctcccgcctctgcctcccaaaatgctgggattacaggcgtgacaccctatggttgtttttaagtgcaacatttatatgtagatggaacctaaggaagtcggaatccgggaaaaagatcgaacatgacgtggtgatgaaagcccagcagcagcctgccccaanaagctggcactgctgaaggcccccagcccaagaagaaatggggcagctgccgcccacctcctccaagacaccttccttgaggaccgctggcccccagttgcagggccaacatcccacccccttaccttccatatggggacctttgcaagttaattcccacaggctgtcactgttcaggatgaggaccctgtcccccagcgactgggcttcacctcgacactccagtgggggccccaagggtgctgagaacccaggcaatgaccagggaagatacagtcactaactttcatcttgtccccgttgcccctttcccagggtcctgccttccacaggttttaacccagaacaataaaactggccctgtcatccctcttgcagtcctgtgttcgggtgagcaggccaggtgagcccacaagtctccatgagtgacgtggcctggcgtgctccaccccaccccaccgcctttagcaaccatgtgcccgggggacagctgggcttctacacctctggccctggagcctgnagagccgggaaagagtcttttctgccatttaaccccgggtgaacttcactnccctgggnccagttcctgcacccctggggaacacaaccagagttcaagctgggacatcagttaggttcagatggccacctcacaggg

SEQ ID NO: 121880 - DNA, 2619 bp, Homo sapiens
atgaaggacctctacaaggagaactacaaaccactgctcaatgaaataaaagaggatacaaacaaatggaagaacattccatgctcacgggtaggaagaatcagtatcatgaaaatggccatactgcccaaggaaaaattttttcggattttgtcttttaaaaccaaagatacgaaaaaagcaaaaactgaaaacaaagggaaatctgaagaagaaagtgccgagactactaaagaaacagaaaataatgtggagaagccagataatgatgaagatgagagtgaggtgcccagtctgcccctgggactgacaggagcttttgaggatacttcgtttgcttctctatgtaatcttgtcaatgaaaacactctgaaggcaataaaagaaatgggttttacaaacatgactgaaattcagcataaaagtatcagaccacttctggaaggcagggatcttctagcagctgcaaaaacaggcagtggtaaaaccctggcttttctcatccctgcagttgaactcattgttaagttaaggttcatgcccaggaatggaacaggagtccttattctctcacctactagagaactagccatgcaaacctttggtgttcttaaggagctgatgactcaccacgtgcatacctatggcttgataatgggtggcagtaacagatctgctgaagcacagaaacttggtaatgggatcaacatcattgtggccacaccaggccgtctgctggaccatatgcagaataccccaggatttatgtataaaaacctgcagtgtctggttattgatgaagctgatcgtatcttggatgtggggtttgaagaggaattaaagcaaattattaaacttttgccaacacgtagacagactatgctcttttctgccacccaaactcgaaaagttgaagacctggcaaggatttctctgaaaaaggagccattgtatgttggcgttgatgatgataaagcgaatgcaacagtggatggtcttgaacagggatatgttgtttgtccttctgaaaagagattccttctgctctttacattccttaagaagaaccgaaagaagaagcttatggtcttcttttcatcttgtatgtctgtgaaataccactatgagttgctgaactacattgatttgcccgtcttggccattcatgtaagtgatgatgatgagctcattgaaaacaggggaaagcaaaagcaaaataagcgtacaaccacattcttccagttctgcaatgcagattcgggaacactattgtgtacggatgtggcagcgagaggactagacattcctgaagtcgactggattgttcagtatgaccctccggatgaccctaaggaatatattcatcgtgtgggtagaacagccagaggcctaaatgggagagggcatgccttgctcattttgcgcccagaagaattgggttttcttcgctacttgaaacaatccaagcttgagaaattgattgaaaagaattactttcttcataagtcagcccaggaagcatataagtcatacatacgagcctatgattcccattctctgaaacagatctttaatgttaataacctaaatttgcctcaggttgctctgtcatttggtttcaaggtaatgtataggaaagaacagagagagggttcagtgttgtccacagtttcagacatccactggggatccaggaatgtatccctggaggataagggggaactaccgtattcgctgggtgctgtttgtgattgtagtggcaggatggtccaggctagggacaagagacaaccagacttgaccagcctggccagattcagatatgaaggagccagttactggtatcacgtacaaaggcagtgctcaggacagtgccctggtgctgagtgctctgtccatggtaccggcctccgtgcatcctacgtgaaaaacttgctgccatacagcagcaggtacagaggctcatcccaaaccgtgagccagtctgggctttggcatacaggatttctaacagtctggatctcttggaattctggagagcagacttgggctttggaaagcggtccagtcctgcagcaccttcctaagcagagggctctcggctgtgccgactcaggacagctgctgcgacggggccggctacgcttgtcagagcagcagctggtgattttggacttgcctttgctggcaggggagcgctatcgagggttcattttatccagcttgaggaaagaaaggtcggagtgtaggggaagagtgggacaaacacgcgacccagtcatgccgagagcatgcgctgagggggacgtggagcgaggagtggggctccaggctgctgaggctccggaccaaccctgggaaggacagtcttacccggacgccacggtggtctcccggcagccctgggaaggacagtcttacccggacgccacggccgagctgcccttccctccctgctgcccccagggaaggctgctggtgtcctcagatgcgggcaggaggaacccgccagcgcctgagagcctggcccgaaccaggcctggaggtgctggggcgaagacacagaggatgtggcctccatccctggtaacagacggttaccagggcggctttgggtga

SEQ ID NO: 121881 - DNA, 507 bp, Homo sapiens
atgggtgggagtaacagatctgctgaagcatggaaacttgctaatgggatcaacatcattgtggccacatcaggccgtctgctggaccatatgcagaataccccagggtttatgtataaaaacctgcagtgtctggttattgatgaagctgatcgtatcttggatgttgggtttgaagaggagttaaagcaaattattaaacttttgctaactcatagacagactatgctcttttctgccacccaaactcaaaaagttgaagacctggcaaggatttctttgaaaaaggagccgtttatgttggtgatgatgatgataatgctaatgaaacagtatttgggaacactattgtgcacagatgtggcagcaagaggactggacattactgaagtggactgcattgttcagtatgaccctccggatgaccctaaggaatatattcatagtgtgggtagaacagccagaggcctaaatgggagagaaaattgggttttctttgctacttga

SEQ ID NO: 121882 - DNA, 1071 bp, Homo sapiens
atggctgaaattcagcataaaactatcagaccacttctggaaggcagggatcttctagcagctgtaaaaacaggcagtggtaaaaccttggctgttctcatccctgctattgaactcgttgttaagttaaagttcatgcccaggaatggaacaggggtccttattctctcacctactagacaactagccatgcaaacttttggtgttcttaaagagctaatgactcaccatgtgcacacctatgggttgataataggtggcagtaacagatctgctgaagcacagaaacttgctaatgggatcaacatcattgtggtcacaccaggccgtctgctggaccatacgcagaataccccagggtttatgtataaaaacctgcaggttgaggacctggcaaggatttctccgaaaaaggagccattgtatgttggtgttgatgaagataaagctaatgcaactgtggatggtcttgagcagggacactttgtttgtccctctgaaaagagataccttctgctctttacattccttaagaagaaccaaaagaagaagctcatggtcttcttttcagcttgtatgtctgtgaaatacccctacgggttgctgaagtacattgatttgctgtcttggccattcatggaaagcaaaagcaaaataagcatacaaccacattcttctagtactgcaacgcagattcaggaacactattgttctcagcttgagaaactgattgaaaagaactattttcttcataagtcagcacaggaaacatataagtcatacatacgagcttatgattcctattctctgaaacagatctttaacattaataacttaaatttgcctcacattgctctgtcatttggcttcaagttgcctccctttgttgatctgaacatgaacagcaatgaaggcaagcagaaaaagcaaggaggatttggctaccagaaaaccaagaaagttgagaagtccataatctttaaacacattagcaaaaagtcatctgcagcaggcagttccctcactcaagagatgcctgtctttatcttgaataactttgtcctgacatga

SEQ ID NO: 121883 - DNA, 3130 bp, Homo sapiens
aatcaaaacaaaagcccatgaatgtgggcttatcagaaactcaaaatggaggcatgtctcaagaagcagtgggaaatataaaagttacaaagtctccccagaaatccactgtattaaccaatggagaagcagcaatgcagtcttccaattcagaatcaaaaaagaaaaagaagaaaaagagaaaaatggtgaatgatgctgagcctgatacgaaaaaagcaaaaactgaaaacaaagggaaatctgaagaagaaagtgccgagactactaaagaaacagaaaataatgtggagaagccagataatgatgaagatgagagtgaggtgcccagtctgcccctgggactgacaggagcttttgaggatacttcgtttgcttctctatgtaatcttgtcaatgaaaacactctgaaggcaataaaagaaatgggttttacaaacatgactgaaattcagcataaaagtatcagaccacttctggaaggcagggatcttctagcagctgcaaaaacaggcagtggtaaaaccctggcttttctcatccctgcagttgaactcattgttaagttaaggttcatgcccaggaatggaacaggagtccttattctctcacctactagagaactagccatgcaaacctttggtgttcttaaggagctgatgactcaccacgtgcatacctatggcttgataatgggtggcagtaacagatctgctgaagcacagaaacttggtaatgggatcaacatcattgtggccacaccaggccgtctgctggaccatatgcagaataccccaggatttatgtataaaaacctgcagtgtctggttattgatgaagctgatcgtatcttggatgtggggtttgaagaggaattaaagcaaattattaaacttttgccaacacgtagacagactatgctcttttctgccacccaaactcgaaaagttgaagacctggcaaggatttctctgaaaaaggagccattgtatgttggcgttgatgatgataaagcgaatgcaacagtggatggtcttgaacagggatatgttgtttgtccttctgaaaagagattccttctgctctttacattccttaagaagaaccgaaagaagaagcttatggtcttcttttcatcttgtatgtctgtgaaataccactatgagttgctgaactacattgatttgcccgtcttggccattcatggaaagcaaaagcaaaataagcgtacaaccacattcttccagttctgcaatgcagattcgggaacactattgtgtacggatgtggcagcgagaggactagacattcctgaagtcgactggattgttcagtatgaccctccggatgaccctaaggaatatattcatcgtgtgggtagaacagccagaggcctaaatgggagagggcatgccttgctcattttgcgcccagaagaattgggttttcttcgttacttaaaacaatccaaggttccattaagtgaatttgacttttcctggtctaaaatttctgacattcagtctcagcttgagaaattgattgaaaagaattactttcttcataagtcagcccaggaagcatataagtcatacatacgagcctatgattcccattctctgaaacagatctttaatgttaataacctaaatttgcctcaggttgctctgtcatttggtttcaaggtgcctcccttcgttgatctgaacgtcaacagtaatgaaggcaagcagaaaaagcgaggaggtggtggtggatttggctaccagaaaaccaagaaagttgagaaatccaaaatctttaaacacattagcaagaaatcatctgacagcaggcagttctctcactgaacacatgccttcctttcatcttgaataactttgtcctaaaatgaattttttttccccttgatttaacaggatttttgtagactttagaatttggacttacctaacaagagtataaattgacttgggttgcaagcactgagcactgttacttctatcacgtctctcttttatttctgggatataaaacaggctttaagtttcttggttgcccaagggcagagcaaggaatatctggtgtttcttgtgatgataatattttaattttaaatatccctccctcatacaagtgtatgttaccattttaatataattctttttgtacctttccttcttgttttgtgaagatttttgtggcatggattgctgtgctcactgctgtaaaaggtgacctagtgtactgggcagctggtggcggtgcagaaaagagtctcaggttattttagatttgtttaattcaaggtggtttggatttggtaagcctttgcactctgtagagtacttagaagacaagggcaacttacttggagttagagccaagctgtcagacggtgcccagcacacattaatgttagcttctttctgagaaaaaaatacctcttccaggccctgaaacaaaaaatacatttgctgtgaagattgaaaatgaacaaagttagaaaaaaaaacagcaaaatcagtgatttagtcasatgagtttttcgttgtaggagcacttgatttctagtgtgttttgtacagtatataactacaagatagtacattttgtagcagttcaaagccaaagttgctagcatcattttgctgttgtgccagttaatcataggatcccattaaataagtgtgctaacatcgaatatagagaaaactggtaaagaacattccagtaggaaaagaaaagaacaatcttccatttctgggcttggccaccatcaccctggtcggacctgtcctggacttccaaccttgactgctgagctcctggcttagcttcttgggttcctaattcctggtgtttaataattctctccacgatcatgtttttctgattttttttttcagaaataatgttttttaaaagacaaaaacaaagggaagaatatttaattactgagcagaagtaaatactgttggtattttgtacataaacctaatttttatatgcatgtttatgctttttaatttttttatcaaaaattaagtcatctacctactacttgtaaccagcttgtttcataacatgttattttcctgtgtcattaaataattacttcaaaaaaaaa

SEQ ID NO: 121884 - DNA, 921 bp, Homo sapiens
atggtttttgatgccaaatatctgactggatggagatttgaggatactgttgtccagtctaatatgaagcatcagcccttcatagtggtgaataagcacaacgtccaagtagaatacaagggagagacaaaaagcttctatccagaggaagtgttttttatggttctgataaagatgaaggaaattgcagaaacctaccttggaaagactgttaccaatgctgtggtcacagtgccagcttactttaatgactctcagcatcaggctaccaaagatgctggaacaattgttagtctcaatgtacttagaattatcagtaagccaactgctgctgctactgcttatagacaaaaaggaattgacttcaatacctccattttccatgccttatttgaagaattgaatgcttacctgttccatggcactctagactccgtagagaaggcccttggaaatgccaaactagacaagtcacagatccatgatattgtcctgggccatttgagcaaggaagacattgaatgtatggtccaggaagctgagaaatacagagctgaagatgagaagcagaaggacaagatgtcatccaagaattcagttgaaagctatgcattcgatatgaaagcagctgttgaagatgagaaacttcaaggcaagattaacgttgaggacaaacagaagattcttgataagggtattaaaattatcaactggctggataagaatcagattcagaagaaggaagaatttcaacatcaaaatctggagaaagtctgcaaccacataattaccaacctgtaccagagtacaggaggcacaccagaaggaatgcctgggggattccctgatggtggagctccctctgctggagcttccccagggcccccattgaagaggctgactaagtcagctcaagtatag

SEQ ID NO: 121885 - DNA, 886 bp, Homo sapiens
ggcacgaggcgcctgcagctcttgggttttttgtggcttccttcgttattggagccaggcctacaccccagcaaccatgtccaagggacctgcagttggtattgatcttggcaccacctactcttgtgtgggtgttttccagcacggaaaagtcgagataattgccaatgtatcagggaaaccgaaccactccaagctatgtcgcctttacggacactgtaacggttgatcggtgatgccgcaaagaatcaagttgcaatgaaccccaccaacacagtttttggatgccaaacgtctgattggacggcagatttgatgatgctgttgtccagtctgatatgaaacattggccctttatggtggtgaatgatgctggcaggcccaaggtccaagtagaatacaagggagagaccaaaagcttctatccagacgaggtgctcttctatggttctgacaaagatgaaggaaatttgcagaagcctaccttggggaagactgttaccaatgcttgtggtcacagtgcccagtttactttaatgactctcagcgtcaggctaccaaagatgctggaactattgctggtctcaatgtacttagaattattaatgagccaactgctgctgctattgcttacggcttagacaaaaaggttggagcagaaagaaacgtgctcatctttgacctgggaggtggcacttttgatgtgtcaatcctcactattgaggatggaatctttgaggtcaagtctacagctggagacacccacttgggtggagaagattttgacaaccgaatggtcaaccattttattgctgagtttaagcgcaagcataagaaggacatcagtgagaacaagagagctgtaagacgcctccgtactacgaaa

SEQ ID NO: 121886 - DNA, 375 bp, Homo sapiens
  misc_feature (1)...(375): n = a,t,c or g
ggccagtattgagatcgattctctctatgaaggaatcgacttctatacctccattacccgtgcccgatttgaagaactgaatgctgacctgttccgtggcaccctggacccagtagagaaagcccttcgagatgccaaactagacaagtcacagattcatgatattgtcctggttggtggttctactcgtatccccaagattcagaagcttctccaagacttctatgaagctgttgcttatggtgcagctgtccaggcagccatcttgtctggagacaagtctggagaatgtttcaagatttgctgcnncttggatgtcactccnctttncccttggtattgaaactgctggtgggagtcatgactgttcctcat

SEQ ID NO: 121887 - DNA, 341 bp, Homo sapiens
aatgaaattatcaactggcttgataagaatcagactgccgagaaggaagaatttgaacatcaacagaaagagctggagaaagtttgcaaccccatcatcaccaagctgtaccagagtgcaggaggcatgccaggaggaatgcctgggggatttcctggtggtggagctcctccctctggtggtgcttcctcagggcccaccattgaagaggttgattaagccaaccaagtgtagatgtagcattgttccacacatttaaaacatttgaaggacctaaattcgtagcaaatttgtaagtggaaaatgcaatgtcttaaataaaactatttaaaattggcacc

SEQ ID NO: 121888 - DNA, 883 bp, Homo sapiens
ccagagacacccacttggtggagaagattttgacaaccgaatggtcaaccattttattgctgagtacaagcgcaagcataagaaggacatcagtgagaacaagagagctgtaagacgcctccgtactgcttgtgaacgtgctaagagtactgtctcttccagcacccatgccagtactgagatcgattctctctctgaaggaatcgacatctatacctccagtacctgtgcctcatttgaagaattgaatgctgacctgttccttagcaccctggacccggtagagaaagcccttcgagatgccaaactagacaagtcacagattcatgatattgccctgagcatcaaccctgatgaagctgttgcttatggtgcagctgtccaagcagccatcctgtctggagacaagtctgaaaatgttcaagatttgctgctcttggatgtcactcctctttcccttggtattgaaactgctggtagagtcataactgacctcatcaaacataatactaccattcctaccaagcagacacagaccttcactacctattctgacaaccagcctggtgtgcttattcagctttatgaaggtgagcataccatgaccaaggacgacaacctgcttgacaagtttgaactcacaggcatacctcctgcaccccgaggtgttcctcagattgaagtcacttttgacactaattccaatggcatcctcaatgtttctgctgtggacaagagtacaagaaaaaagaacaagattactatcactaatgacaagggccatttgagcaaggaagacattgaatatatggtccaggaagctgagaagtacaaagctgaagatcagaagcagagggaaagtgtcatccaagaactcacttga

SEQ ID NO: 121889 - DNA, 323 bp, Homo sapiens
gcacgagctgacaaccagcctggggtgcttattcaggtttatgaaggcgagcgtgccatgacaaaggataacaacctgcttggcaagtttgaactcacaggcatgccaggaggaatgcctgggggatttcctggtgggggagctcctccctctggtggggcttcctcagggcccaccattgaagaggttgattaagccaaccaagtgtagatgtagcattgttccacacatttaaaacatttgaaggacctaaattcgtagcaaattctgtggcagttttaaaaagttaagctgctatagtaagttactgggcattctcaata

SEQ ID NO: 121890 - DNA, 1485 bp, Homo sapiens
atggtttttgatgccaaacgtctgattgcacacagatttgatgatgctgttgtccagtctgagatgaagcattggcccttcatggtggtgaatgatgctggcaggcccaaggtccaagtggaatacaagggagagagcaaaagcttctatccagagaaggtatcctctatggttctgacaaatatgaaggaaattgcagaagcctaccttgggaagactgttacccatgctgtggtcgcagtgccagcttactttaatgactctcagcgtcaggctaccaaagatgctggaactattgttggtctcaatgtacttagaattattaatgagccaactgctgctgcttatggcttagacaaaagacacagatcctcactacctattctgacagccagcctggtgtgctggttcaggtttatgaagcacccaggccatattgagatcgattgtctctatgaaggaatcaacttctgtacctccattacccatgcccgatttgaagaactgaatgctgacctgttccgtggcaccctggaccccgtagagaaagcccttcgagatgccaaatttgacaagtcacagattcatgatattgtcctggctggtggttctactcgtatccccaagattcagaagcttctccaagacttcttcaatgggaaagaactgaataagggcatcaacgctgatgaagctgttgcatatggtatagctgtccaggcagccattctgtctggagacaagtctgaaaatgttcaagatttgctgctctttgatgttactcctctttcccttggtattgaaactgctggtggaacacagatcctcactacctattctgacagccagcctggtgtgcttattcaggcttatgaaggtaagcatgccatgaccaaggataacaacctgcttggcaagtttgaactcatgggcatacctcctgcaccccgaggtgttcctcagactgaagtcacttttgacagtgatgccaatggcatcctcaatgtctctgctgtggacaagagtacaggaaaagagaacaagattactatcactaatgacaagggctgtttgagcaaggaagacattgaacgtatggtccaggaagctgagaagtacaaagctgaagatgaaaagcagagggacaaagtgtcatccaagaattcacttgagtcctatgcattcaacatgaaagcaactgtcgaagatgagaaacttcaaggcaagattaacgatgaggacaaagagaagattctggacaagtgtaatgaaattatcatctggctcaatgagaatgagactgccaagaaggaagaatttgaacatcagcagaaagagctggagaaagtctgcaaccccatcatcaccaagctgtaccagagtgcaggaggcatgccgggacgaatgcctgggggattccctggtggtggagctcctccctctggtggtgcttcctcagggcccaccattgaagaggttgattaa

SEQ ID NO: 121891 - DNA, 2458 bp, Homo sapiens
  misc_feature (1)...(2458): n = a,t,c or g
cccacgcgtccgcccacgcgtccgctcgcctgcagctcttgggttttttgtggcttccttcgttattggagccaggcctacaccccagcaaccatggtccaagggacctgcagttggtattgatcttggcaccacctactcttgtgtgggtgttttccagcacggaaaagtcgagataattgccaatgtatcagggaaaccgaaccactccaagctatgtcgcctttacggacactgtaacggttgatcggtgatgccgcaaaggantcaagttgcaatgaaccccaccaacacagtttttgattgccaaaccgtctgattggacggcagatttgatgatgctgttgtccagtctgatatgaaacattggccctttatggtggtgaatgatgctggcaggcccaaggtccaagtagaatacaagggagagaccaagagccttgtatccagaagaaggtgtcttcttatggttctgacaaagatgaaaggaaatttgcagaagccttaccttggggaagactgttaccaatgcttgtggtcacagtgcccagtttactttaatgacttctcagcgtcaggctaccaaagatgctggaactattgctggtctcaatgtacttagaatttattaatgaggccaactgctgctgctattgctttacaaaagttcagacaaaaaaggtttggagcagaaagaaacgtgctcatctttgacctgggaggtggcacttttgatgtgtcaatcctcactattgaggatggaatctttgaggtcaagtctacagctggagacacccacttgggtggagaagattttgacaaccgaatggtcaaccattttattgctgagtttaagcgcaagcataagaaggacatcagtgaagaacaagagagctgtaagacgcctccgtactgcttgtgaacgtgctaagcgtaccctctcttccagcacccagggcaggtatcaagatcgattctctctaggaagggatcgacttctatacctccattacccgtgcccgatttgaagaactgaatgctgacctgttccgtggcgaccctggacccaggagagaaagcccttccgagatgccaaactagacaagtcacagatttcatgatatttgtcctgggttggtggttctacttcgtattccccaagattgcagaagtcttgctgccaagacttctttcaatgggaaaaagaacttgaattaaggagcatcaaccctggatggaaggctgttggtttattggtgcagctgttccagggcagccattcttgtctgggagacaagttctggagaatgtttcaagatttgctgctcttgggatgtcactcctctttccccttgggtattgaaaactgctggtggagtccatgactgtcctccatccaagcgtaataccaccattcctaccaagcagacacagaccttcactacctatttctggacaacccagcctgggtgtggcttattcaggttttatgaagggcgagcgttgccatggacaaaggataaccaaccggctttggcaagttttgaactcacaggcatacctcctggcaccccgaggtgtttcctcagatttgaagtcacttttgacattgatgccaatgggtatactccatggtctctggctgtggacaagaagtacgggaaaaagagaacaaagattactatcactaattgacaagggccgttttgagcaagggaagacattggaacgtatggttccagggaagctgaggaagttacaaagctggaaggtggaggaaggcaggaggggacaagggtgtcatccaacgatttcacttgaggtcctatgcctttcaacatgaaaagcaccttgttgaaagatgagaaactttcaaggccaggattaacgatgagggacaaaacagaagatttctggaccaagtgtaattgaaattatccaactggctttgataagaatcaagactgcttgagaaggaagaatttgaacatcaacaggaaagagctggagtatagtttgcaaccccaatcatcacccaagctggtacccagagtgccaggaggcattgccagggagggaatccctggggggntttcctgggtggtggagctcctcccctttggtgggtgcttcctacagggcccaccatttgaagaggttgatttaagcccaacccaagtgttagatgtagcattgtttccacacattttaaaaccattttgaagggacctaaatttcgtaggcaaaatttcttttgggcaagttttaaaaaagtttaaggctngcttattagttaaggtttacttgggcattcttcaattactttgaattttgggaacatatggcacagggggaaggaaataacattgcccttttataaacactgttttgttagttggaaaatgccatgtcttaaataaacctatttaaaattggccccataaaaaaaaaaaaaaag

SEQ ID NO: 121892 - DNA, 758 bp, Homo sapiens
ggcccttccctggtggccgtgtggtcaggctgcacccagtcattttggcctccactgtggacagctacgagagacgcaacaagggtgctgcccgagttatcgggaccctgttgggaactgtcaacaaacactcagtggaggtcaccagttgcttttcagtgtcacacaatgagtcagatgaagtggctgttgacatggaatttgctaagaacatgtatgaactgcctaaaaagtttctccaaatgagctcatcttggggtggccatgacatcacagagcactctgtgctgatccatgagtactacagccgagaggcccccaaccccatccacctcactgtggacacaagtctccagaacggccatatgagcatcaaagcctatgtcagcactttaatgggtgtccctgggaggatcgtgggagtgttcacacctctgacagtgaaatacgcattctatgacactgaatgcatcagagttgacctgatcatgaagacctgctttagccccaacagagtggttggactctcaagtgacttgcagcaagtaggaggggcatcagctcgcatccaggataccctgagcatagtgttgcaatatgcagaggatatactatctggaaaggtgtcagctgacaataccatcaggaaggtgggccacttcctgatgagcctggttaaccaagtaccaaaaatagttcccgatgacttcgagaccatgctccacagcaacatcaatgacctgttgatggtgacctaa

SEQ ID NO: 121893 - DNA, 1824 bp, Homo sapiens
atgagaaaaggaggacctccaaagcccttgttactgagcaccttaacaacccatgccaccttggcactgccacaagcttctacggccacaacacttaagcacccacagaggatcccctcttacattcgagttctgtttgccatcctgaagatgccatcaactactgggagacaaaaggccttttccacctgtgcctctcacctcacatctgtgaccctgttctatggcacagccaatatgacttatttacaacccaaatctggctactcacccgaaaccaagaaactgatctcattggcttacacgttgcttacccctctgctcaatccgctcatctatagcttacgaaacattgacctgatcatgaagacctgctttagccccaacagagtgattggactctcaagtgacttgcagcaagtaggaggggcatcagctcgcatccaggatgccctgagtacagtgttgcaatatgcagaggatgtactggtggctgttgacatggaatttgctaagaatatgtatgaactgcataaaaaagtttctccaaatgagctcatcctgggctggtacgctacgggccatgacatcacagagcactctgtgctgatccacgagtactacagccgagaggcccccaaccccatccacctcactgtggacacaagtctccagaacggccgcatgagcatcaaagcctacgtcaggtgcagcagctttggggttttcctagttatttatgtggtgaccctgatgggaaatgccatcattacagtcatcatctccttaaaccagagcctccacgttcccatgtacctgttcctcctgaacctatctgtggtggagaacgttgatcttaaagggttcgagcctgatgtacgtattttgcttaccaaatgggggggtagtaatggctctcagtccccgtggatggaggagcaaattggggatgcctggggaagcatggttctaaaaaatgttgtacgtgaaacggatgaagttggtaaagcagcctttgcacttctctgcgggactccttccccagccggctttggtcctctttcaccagctgctagggagcacagactcctcaggaccctgtgccgggaaagctcggagcagcccccatcatcatcgggccggcagaaaggtggaagacgtcgagccaatgaagatgattacagagaagtataccgagagcatgtgcgctgcctagaggaatggcaggaggcaggagtcaatggcagatacaaccaggtgctcctggtggccaagcccagctcagagagcgcagaatcacttgcctgccccttcccggagcaggagctggagtctgtcacggtggaggctctatttgattcaggggaaaagccctcactggccccatccttagttgtgctacaggggtcggctggcactggaaagacaactctcgccagaaaaatggtgttggactgggccaccggtactctgtacccaggccggtttgattatgtcttttatgtaagctgcaaagaagtggtcctgctgctggagagcaaactggagcagctccttttctggtgctgcggggacaatcaagcccctgtcacagagattctgaggcagccagagcggctcctgttcatcctggatggctttgatgagctgcagaggccctttgaaaaaaagttgaagaagaggggtttgagtcccaaggagagcctgctgcaccttctattaagagacatacactcccacgtgctcccttctataaccacccgacccttgcttttgaggatctggaagccttgcttgaaccagcaacagatgttcatatcctaa

SEQ ID NO: 121894 - DNA, 1318 bp, Homo sapiens
ggcacgagggacaagatggccacaccggcggtaccagtaatgtgctcctccggccacgccaaccccagtcccggcggcggccccagcctcagttccagcgccaacgccagcaccggctgcggctccggttcccgctgcggctccagcctcatcctcagaccctgcggcagcagcggctgcaactgcggctcctggccagacccccggcctcagcgcaagctccagcgcagaccccagcgcccgctctgcctggtcctgctcttccagggcccttccccggcggccgcgtggtcaggctgcacccaagtcattttgggcctccattgtggacaagctacgaagagacgcaacgaggcgtgctgccccgagttatcgggaccctgttgggaactgttcgacaaacactcaagtggaggtcaccaattgcttttcagtgccgcacaatgagtcagaagatgaagttggctgttgacatcggaatttcgctaagaatatgtatgaacttgcataaaaaagtttctccaaatgaagctcatccttgggcttggtaccgctacggggccattgacatcacagaggcactctgtcttggattccatgagtacttacagcccgagaggccccccaaccccatccaactcactgtggggacacaagtcttccaggaacgggccggcatggaggcattcaaaggcctaacgttcaggcacttttaatggggggagttccctgggggagggaccatgggggagttgattgtttcacggcttttgacagttgaaataccgcgtactacggacactgaacgcatcggagttgacctgatcatgaagacctgctttagccccaaccagagtgattggactctcaagtgacttgcagcaagtagggaggggcatcagctcgcatccaggatgcccctgagtacaagtgttgcaatatgcagaggatgtactgtctggaaaggtgtcagcttgacaataactgtgggccgcttcctgatgagcctggttaacccaagtacccgaaaaatagttcccgatgactttgagaccatgctcaacagcaacatcaatgaaccttttgatggtgacctacctgggcaacctcaaaaagtcacatgattgcactcaatgaaaaacttgtaaacctgtgaatggaccccaagcagtacacttgctggtctaggtattaaccccaggactcagaagtgaaggagaaatgggtttttttgtggtcttgagtcacactgagatagtcagttgtgtgtgactctgataaacggagcctaccttttgtaattaaaaagaagccccga

SEQ ID NO: 121895 - DNA, 524 bp, Homo sapiens
ggcaggctgggcctggcgctctccagcctcaacaagcacgtggaggccgtggcttactacaagaaggctctggagctggaccccgacaacgagacatacaagtccaacctcaagatagcggagctgaagctgcgggaggcccccagccccacgggaggggtgggcagcttggacatcgccggcctgctgaacaaccctggcttcatgagcatggcttcgaacctaatgaacaatccccagattcagcagctcatgtccggcatgatttcgggtggcagacgagcccacggcgccgtggtcccagcagcagggttgtcagtcggagcatcctggggctccctggctcctggccgtctgtgaggtaggcgcagtaccgtgtatcgtaggtagcagtaggaacgggggccgccgcggccctgcagccgctcatggcggtgaggtgtgtgccaagcccacccggggtgcagggcgtgacgtgtggggaataaataggcgttgtgacctctgaaaaaaaaaaaaaaaaa

SEQ ID NO: 121896 - DNA, 2361 bp, Homo sapiens
  misc_feature (1)...(2361): n = a,t,c or g
gggcgtcgcgccctggggccggggccgggcggcaccgcggtgcgcaagcgcaaccgtcggtgggtcggggatcggtcgcctgagatggtatcacctcttctgggctcatagatggacaacaagaagcgcctggcctacgccatcatccagttcctgcatgaccagctccggcacgggggcctctcgtccgatggctcaggagagcttkggaagtcgccatccagtgcctggagactgcgtttggggtgacggtagaagacagtgaccttgcgctccctcagactctgccggagatatttgaagcggctgccacgggcaaaggagatgccgcaggacctgaggagccccgcgcgaaccccgccttccgaggaaggactcagcagaggcagagcgcctcaaaaccgaaggaaaaccgaagcagatgaaaagtggaaaacttttgaagctgccgtgcattttcttacggaaaagccattcgagctcaaccccagccaacggccgtcttatttctgcaacagagccgcagcctacagcaaactcggcaactacgcaggcgcggtgcaggactgtgagcgggccatctgcattgacccggcctacagcaaggcctacggcaggatgggcctggcgctctccagccttcaacaacaccttggaggccgtggcttactacaagaaggctctggagctggaccccgacaacgagacatacaagtccaacctcaagatagcggagctgaaggctgcgggaggcccccagccccacgggaggcgtgggcagcttcgacatcgccggcctgctgaacaaccctgggcttcatgagcatggcttcgaacctaatgaacaatccccagattcagcagctcattgtccgggcatgatttcgggtggcaacaaccccttggaaactcccggcaccaagcccctcggcagaacgacctggccagcctcatccaaggcgggccagcagtttgcccagcagatgcagtcagtcagnatacccagagttgtatagtagtcagctcaggagtccagtatccggagtcggacgcccagcgccagcaacgacgaccagcaggagtgacgctgcctgctcccggtgtgaccgcgtccttccctgggccgacccgaaggaaggccttctggttgtctgccacttcctcctgttgggactgcctgagagaggggaagagagagacctcgggacctgcatgtcaagatggattttccccttttatctctgccctcctccactccctttttgtaactcccttacagcccccagacccttcttgaaacgagagccaagcaagctgagcacaagaccagcagcgacctcccttccaagcccccagaaagctcggtcacttgagtgttttctagaatcctggggtgctcccggggccgctctcagagaagtggcaggttttcacgttcagccgtgtggcggatcgtgtggcttccaaagccttttacagccccttttcccccattttgtggtctggctgcaggaactgtgccgtctgtgagaagcctctttccgagtcgacctcccggccaccccggccctgtgcctgctcggaagagctcactgccagctgcggcctggggcaccgcggggccatgtgtgtttgcatgagggaactctttagtgggcagacacctaagaagacggcttgcggtcaccccacgccctccgtggcgtcaggagccgtccgtgggtgcataggaccagtttctgtgacttttctccagttgggcatgttgacagacatgtttcccctcctcccaccctcattttctggtcctcgcgactgagagccaggggcgacatcatgaccttctgtcccggccgccttagccccgggcacagggaaggcagctgggccgtttctgtctgtgtcccatcctgctgtcctttctgtcctgggatgtttccaatggcccggggcccccccagggaaaacttaccccctcctgtgctgggtggaggcccacgggacacctccaggtgcccancccaccttggcccttaaaacagcccacccaggaaagcaagccggagagcccggacagcaggcagcctgtctgggtttcctgaggcctgggggtggcagacagagcccacggcgccgtggtcccagcagcagggttgtcagtcggagcatcctgggggctccctggctcctggcccntctgtgaggtaggcgcagtaccgtgtatcgtaggtagcagtaggaacgggggccgcccgcggccctgcagccgctcatggcggtgaggtgtgtgccaagcccacccggggtgcagggcgtgacgtgtaagagaacacctaggcgttgtgacctctgaaaaaaaaa

SEQ ID NO: 121897 - DNA, 405 bp, Homo sapiens
ctatacaacgtttttaatgaataagatatcattaagaatttatattctaaacaaacaatttaaataaattttggtatttactaacttaagtattcaagaacctggtttgaagagtccaacagactgaaagtctgcttttcaagagaactatgatcgtctatcaatggagagattttcgtatttctatattctaatagttcacgatccttgcttgatgtcagtaattcattatcgactataccaatagttgcatcttccaccagaatatttgcttgatatgctccaatcggaatttcaggcaatccaatgtagtcatgatctgccactactgaaccttgcaagagataaagactttctgttgaatgaattcatctctttggtccattattattttctgaggaggtc

SEQ ID NO: 121898 - DNA, 269 bp, Homo sapiens
ctctccaaacactgtgctgaccaccccaaacaattgggatgatcacccatcagctgtttcatttgccttcaatgtaactcacttggaacctactaaaaatacaccatattttcaaatgtttagtcgaaatccttatatgcctgagacttcagatagtcttcatgaagtggatggtgataatacaaatggagaacaacaatttggatgaactaaataaaagcaagatcattgttaaaaagaaacccaaacaattaaatccatttcattta

SEQ ID NO: 121899 - DNA, 501 bp, Homo sapiens
tcaacttgattggattgaaggatgcaaagtattgatcatgggtgtatctgtgagggtgctgccaaaggagataaacatttgagtcagtgttccgggaaaggcagacccacccttaatctgggtgggcaccatcttatcagctgccagtgcagcttgttcactggattctcttatgtagggcttaaggtgggacattttgataggtcttttcagtctaaccccagtgttgtctctcaggacagcacatccactttctgtaatatagtctatgacacaaggaccaacccattcagactgaaaacgaccatccttccaccaatttttcctttgtcttaaaacttcatgacccacttttaaatgaaatggatttaattgtttgggtttctttttaacaatgatcttgcttttatttagttcatccaaattgttgttctccattggtttagcatccctaatctgaaaacccaaaattctccaatgagtatttccttcgagtgtcat

SEQ ID NO: 121900 - DNA, 870 bp, Homo sapiens
atggcagtggagcattctgcttcctgcccctttctgatggatatagctgatgctaacacattaaagggaccacagataaagcagacaagttctcaagaatctcattgtcatctcgcagtgaaaactgaatgtggtagaacagaaaaaaagctgttttatgttggaaaagacagaaaacaaaatcgtttggtaattgtttcagaagaggaaaaaaagaaagtcttaagagaatgccatgaaaatgacagtggagctcatcatggtatatccaggaccctcactctggtagaatccaattattattggacatctgtgaccaatgatgtcaaacagtggcctagggacttggtacactgtgttctagctgctccagccatggaagaaaggggccagggtacagctcaggctgttgcttcagagggtggaagccccaattcttatcagcttctacacagtattgaatctgtaagtgcacagatgtcaagaattgaggtttgggaacctctgcctagatttcagaagatttatgaaaatgcctggatgcccaggaagaagtttgctgcaggggtggggccctcatggagaacctctgctacggcagtgcagaagggaaatgtggggtcagagatgccgtgcagagtccttactgggggagcacctagtggagcagtgagaagagggccaccatcctccagaccccagactggtagatccatggagagcttgcaccgtgtgcctgaaaaagccaaagacattcaatgccagcctgtgaaagcaactgggagagaggctataccctgcaagccacaggggtgcaggtgccaaagaatatgggaacctacctattgcatcagtgtgacttggatgtga

SEQ ID NO: 121901 - DNA, 1790 bp, Homo sapiens
cccacgcgtccgcgagataaatcacgacaggaagcttaaatctgtcgtttgaatttaggaccacctcgggtcacaatgggccgtattggaaaaaatggtgaccttcatcttaaacagattgcatattacaaacgaactggtgaatatcattcaactacactgtcaagtgagagaagtggcataagaagagcagcaaacaaatttggcttcaaagaagaaaagctgtattatgttggaaaagacagaaaacaaaatccgtttggtaattgtttcagaagaggaaaaaaagaaagtcttaaagagaatgccatgaaaaatgacagtgagagctcatcatggtatatccaggacccctcactcctgggtagaatccaatttattattgggacatctgtgaccaatggatgtcaaaccagtggggtatatgccttgtcagcattgccaagtggcaaaaaatacagttattgtagcaccgaaacagcaccttcttcaaggtgggaaaattccatggagtttagttactgttgatctgatgggggccttttcatacaagccacagaagtccatgtatatgctataatcatgacagatttgttcaccaaatggattgtgattttgcctctatgtgatgtttcagcatcagaagtttctaaagctattatcaatatatttttcttatatggacctcctcagaaaataataatggaccaaagagatgaattcattcaacagatcaatattgaactgtacagattgtttggcataaagcaaattgtaatttctcacacctctggaactgttaacccaacggaaagtacacctaacacaatcaaagcatttctctccaaacactgtgctgaccacccaaacaattgggatgatcacctatcagctgtttcatttgccttcaatgtaactcacttggaacctactaaaaatacaccatattttcaaatgtttaaagtcgaaaaaaatcccctttactacttgcctgagacttcagatagtcttcatgaagtggatggtgataatacaagtatgtttgccaaaattctagatgcaattaaagaagctgataaaataatggagaataagacaacttcactgggccagatggagaacaacaatttggatgaactaaataaaagcaagatcattgttaaaaagaaacccaaacaattaaatccatttcatttaaaagtgggtcatggaagttttaagacaaaggaaaaattggtgggaaggatggtcgttttccagtcctggaatggggttggtcccttgtgtcatagactatattacagaaagtggatgtgctgcccctgagagacaacactggggttagactgaaaagccctatccaaaatgcccccccccttaagccccctacataagagaatcccagtgaacaagaaagtcctttatccccttgccaaggttccagtagtggccagatccatgacctacattggattgccctgaaattcccgattggagcatatcaagcaaatattctggtggaagatgcaactattggtatagtcgataaagaatttactgacatcaagccaaggatcgtgaactattagaatatagaaatacgaaaatctctccattgatagacgatcatagttctcttgaaaaggcagactttcagtctgttggactcttcaaaccaggttcttgaatacttaagttagtaaataccaaaatttatttaaattgtttgtttagaatataaattcttaatgatatcttattcattaaaaaccgttgtatagaaaaaaaaa

SEQ ID NO: 121902 - DNA, 1865 bp, Homo sapiens
catggcggatcggctcacgcagctttcaggacgctgtgaattcgcttgcagatcagttttgtaatgccattgggagtattgcagcaatgtgtccctcctgcctctttcaataatattcagacagcaattaacaaagaccagccagctaaccctacagaagagtatgcccagctttttgcagcacctgattgcaccgaacagcaaaagacattgatgttttgatagattccttacccagtgaagaatctacagctgctttacaggctgctagcttgtataagctaggaagaagaaaaccatggaagctgctacatgtctgggagggatgttgtttatcgagggagacatgcttctgggaggaaggtacaaaggcgcacttgctggatattggcacagtcacagctggaaggccaaggaagtgggtacccataggccagtctttttccagactcataggcttcagtgggataccatgtgggcttgagaaaaggaactgttttgagtgccattaagaattctgcatcagacttagatacaagccttaccaacaattacagaaacattacaacactatgacacattacctttttagctatttttaatagtcttctattttcactcttgataagcttataaaatcatgattgaatcagctttaaagcatcataccatcattttttaactgagtgaaattattaaggcatgtaatacattaatgaacataatataaggaaacatatgtaaaattctgttatgacataatttatgtctccattttgttgtattggccagtacttttacaaatcaaaacatctctcaagccaaaggagaagacagtaagaacagacataagggacattttagtttaggctagtgtcctgcctcttagaggtggcattgtgtaaatctgagctttgagcaagaaagttttggaaattgtgttgcttttaagaaatagagttagtgtggctggataagaaagtcacatttatgcaaatgtttcttctgctagaacctcatacctgttctagttcatctccacgtttattttaccaagagatcctctgtcaagagaatttcctggctgttgtgaaagaatttttctacatcctgaactatttttcctatttcttttcaccttgctttttttcatccttaatttgcttgtcatcacaatgaagtatgttttttgaatcatcaattctttctcattctccatttatctgaaggttcttttgcccttattaacctctcaacttttattgctgtattctagtcagaccagaacatacttccactacatcagttacttggcatcatttcacctcagtttattattgcccaaataataatttgtgtcagcattttcaactaatggttattccatcccaacccttggatctctttgagtctactgataatcctccactggaaaggtggaattgaaatgtggtccacattttaactagctatttcctggggctgtatttttaagaatatgctgagctacatttgctgcaatctgttgctattcagagtttaagtttcaggagaaaacaggaacaatagaacactctgcctgttatttttgtcgtaatcaagcttttccacagttcttgaaaagtactatgtttcaaatttcaggaacaccagcgttagctgttaaaagttgcagcaatttattggctagtcatagaaaatttttgaacttttaactgtattttaattgatgtttattaaaaacaacaggcagagtgttctattgttcctgttttctcctgaaacttaaactctgaatagcaacagattgcagcaaatgtagctcagcatattctgaaaaatacagccccaggaaatagctagtt

SEQ ID NO: 121903 - DNA, 560 bp, Homo sapiens
attagaccagcgtggtggaattcggtaaaaacagcaaaaggagaaagcaaaagccaggcagggactctccataggctcttttttaaatcttggggaaatcatacccactgaggaatagaggccagggcagatcaggcctgcgtggattgtgggtcagctagggaagcagaaggaggaagacgctggaatcattgtcaggactgagaatatggtgtgagttgcttttgagggtggccatgtgagcaccttggccagattaatctctttcccccctccatgatggtggcaggggcaggagctgacttcgtgatgctgggtggcatgctggctgggcacagtgagtcaggtggtgagctcatcgagagggatggcaagaagtacaagctcttctatggaatgagttctgaaatggccatgaagaagtatgctgggggcgtggctgagtacaggtatgtgtggaggcccaggagcttagtaatagtatggaggcagaactcatggctgctgagagggggatggtacagttctcagagaagcatggtgaaccggggctcaatgct

SEQ ID NO: 121904 - DNA, 1080 bp, Homo sapiens
atgcctcatattgacaacgatgtgaaactggacttcaaggatgtccttttgaggcccaaacgcagtacccttaagtctcgaagtgaggtggatctcacaagatccttttcatttcggaactcaaagcagacatactctggggttcccatcattgctgccaatatggatactgtgggcacctttgagatggccaaggttctctgtaagttctctctcttcactgctgtccataagcactatagcctcgttcagtggcaagagtttgctggccagaatcctgactgtcttgagcatctggctgccagctcaggcacaggctcttctgactttgagcagctaaaacagatcctggaagctatcgcccagatgaagtatatatgcctggatgtggcaaatggctactctgaacactttgttgaatttgtaaaagatgtacggaagcgcttcccccagcacaccatcatggcagggaatgtggtaacaggagagatggtagaagagctcatcctttctggggctgacatcatcaaagtgggaattgggccaggggcaggagctgacttcgtgatgctgggtggcatgctggctgggcacagtgagtcaggtggtgagctcatcgagagggatggcaagaagtacaagctcttctatggaatgagttctgaaatggccatgaagaagtatgctgggggcgtggctgagtacaggtatgtgtggaggcccaggagcttagtaatagtatggaggcagaactcatggctgctgagagggggatggtacagttctcagagaagcatggtgaaccggggctcaatgctagggtctgtggaaaagtccctgggcttaaggaatccagaaggagaagataataaagtttttcctactttaagagcctcagagggaaagacagtggaagttccttttaaaggagatgtggaacataccatccgagacatcctaggagggatccgctctacgtgtacctatgtgggagcagctaagctcaaagagttgagcaggagaactaccttcatccgagtcacccagcaggtgaatccaatcttcagtgaggcgtgctag

SEQ ID NO: 121905 - DNA, 1242 bp, Homo sapiens
actggagatcactagacagtttgatggccctcggatgaggcggagggctactctgaacactttgttgaatttgtaaaagatgtacggaagcgcttcccccagcacaccatcatggcagggaatgtggtaacaggagagatggtagaagagctcatcctttctggggctgacatcatcaaagtgggaattgggccaggctctgtgtgtactactcggaagaaaactggagtggggtatccacaagctcagcgcagtgatggagtgtgcaaatgctgctcatggcctcaaaggccacatcatttcagatggaggttgcagctgtcctggggatgtggccaaggcttttggggcaggagctgacttcgtgatgctgggtggcatgctggctgggcacagtgagtcaggtggtgagctcatcgagagggatggcaagaagtacaagctcttctatgggaatgagttctgaaatggccatggaagaagtattgcttgggggcgtggctgagtacagaacctccagagggaaagaccagtggaagttcctttttaaagggagatgttggaacataccatcccgagacatccctagggagggatccgctcctacgtgtacctatgtgggagcacgctaagctcaaacgacgttgagcacggacgaactaccttcatcccgaagtccacccagcaaggtgaaatccaatcttcaagttgatggccgtgctagaccttgaagcagttctacccctcccaaggcaccaagtactctacccatggggccatcccaatgtgggggtcctcaccccatccccggctactgcagctctggtatttacttttgtcaatttcctgttgtctcacttcctgagggctcctgcagtaactctgtacttctctatctgcacacacaataatgccccaaggccactcacgtggggaggaagccaaggaagcaaacagtctgagaaaatgatgcaagaaaatccaaatgggaatctggggacccaacacaacatccctgaagattattaaaaggaaaagatgctgattggtacgataaatctgtgtacatggccttggtctagaggaggcaggcttttagaatccatgttttgttaattccgcttcactaaattggaccttgcacatatctaaaaagctctgaagtgtttgtatatttgaaatacctcaataaagaggagagctcattgactgtaaaaaaaaaaaccacacagggcggccgct

SEQ ID NO: 121906 - DNA, 1860 bp, Homo sapiens; identical to SEQ ID NO: 114720

SEQ ID NO: 121907 - DNA, 2028 bp, Homo sapiens
atgttctttgaaaccaatgagaacaaagacacaacataccaaaatctctgggacacattcaaagcagtgtgtagagggaaattcatagcactaaatgcccacaagagaaagcaggaaagatctaaaattgacaccctaacatcacaattaaaagaactagagaagcaagggcaaccacattcaaaagctagcagaaggcaagaaataactaagatcattgcagaactgaaggaaatagagacacaaaaaacccttcaaaaaatcaatgaatccaggagctggtttttcgaaaagatcagcaaaattgatagaccgctagcaagactaatgaagaaaagagagaagaatcaaatagacgcaataaaaaaagataaaggggatatcaccacctatcccacagaaatacaaactaccatcagagaatactataaacatctctatgcaaataaactagaaaatctagaagaaatggataaattcatcgacacatacatcctcccaagactaaaccaggaagaagctgaatctctgaatagactaataacaggctctgaaattgaggcaataattaatagcttaccaaccaaagaaagtccaggactagatggattcacagccgaattctaccagaggtacaaagaggagctgctaccattccttctgaaactactgcaatcaatagaaaaagagggaatcctccctaactcattttatgaggccagtatcaacctgataccaaagcctggcagagacacaaccaaaaaagagaattttagaccaatattcttgatgaacattgatgcaaaaatcctcaataaaatactggcaaaccgaatccagcagcacatcaaaaagcttatccaccacgatcaagtgggattcatccctgggatgcaaggctggttcaacatacgcaaatcaataaacataatccagcatataaacagaaccaaagacaaaaaccacatgattatctcaatagatgcagaaaaggcctttgacaaaattcaacaacccttcctgctaaaaactttcaataatgttggaaattctggccagggcaatcaggcaggagaaggaaatggtattcaattaggaaaagaggaagtcaagttgtccctgtttgcagatgacatgattgtatatttagaaaaccccatcgtctcagcccaaaatctccttaagctgataagcaacttcagcaaagtctcaggatacaaaataaatgtgcaaaaatcacaagcatttttatacaccaataacagacaaacagagagccaaatcatgagtgaactcccattcacaattgcttcaaagagaataaaatacctaggaatccaacttacaagggatgtgaaggacctcttcaaggagaactacaaaccactgctcagtgaaataaaggaggatacagacaaatggaagaacattccatgctcatgggggtccttccagagggctgccagaggaactgggaaaagaccacagggagaaggaaacctccagcagaactttgtaacaattccaaccaaacgcgaagtctcctggccagaacttgagggagagcatgaatccagtgtgcagactcaacaggcaaggaggcttcagcgattagccaaagatcttctaaaacaagtacaagttcaagacagtggctcatgggcaaacaataaagtgtctgctttggatcggaccctaggagagatcactagaatactggaaaaagagaggtcaagaagaggaaaaggacctagcaaagaagacttagaaggagcagccaatgagttagaaggacaatgtgatgtcaggaaacctagtgaaggagtctcagcctcaccctactcacaggccaaatatacttacctaatatccgagcatctttccttgaagaagtacattattgacattgtggttgaaagtacagctccagcagaagctttgaaagatggagaagagcggcaaaaaaataaaaaaaaagccaaaaagataaaagcccggatgaacttcaggtaccttaaatacccttaa

SEQ ID NO: 121908 - DNA, 678 bp, Homo sapiens
atgtggtggtcacttgggaccctgacttggtataatagcccaggctctatgaggctgggtccagtggcaacaaggagccaggaatggcaagatacagctgtatcttgggccctgtggggtagggaacaatgcagcaataaccactccttggagagagacagggaagaacgattggcagcactcacagctgctcaacaagaagctatggaagagttacagaaaaaaattcagctcaagcatgatgaaagtattcgaaggcacatggaacagattgaacaaagaaaagaaaaagctgctgagctaagcagtgggcgacatgcaaatactgattatgcccccaaactgaccccttatgaaagaaagaagcagtgttctctctgcaatgtcctgtgcggacttggatgcccaaacgaggtgcttccaggtggctgccaccgtagctcctaccccaggagaccctgcctgaccatcggagagcttctgtggatgggcccctgctggcgtgcaactacccacagcctctccccaccactttctggcagctgcatggactttgccaccatgctgctactggcaccggtgcaggtatggactccgttgccattgccctgccatcaccagtgtgcgaatactgttcacactctgccagctgcaactgcgtgcatgtggaacctgtga

SEQ ID NO: 121909 - DNA, 2835 bp, Homo sapiens
agcacaagaagaagaagctaaggtaaatgaaattgcctttataaatacccttgaagcccagaataaacgtcatgatgttttatcaaaattgaaggaatatgaacagaggcttaatgagctacaggaagagcgtcagagaagacaggaagaaaagcaagcacgtgatgaagctgtgcaggaacgcaagagagctctagaggcagagcggcaggcccgtgtagaagaattgttaatgaagaggaaagaacaagaagcccgaattgaacaacagaggcaagaaaaggaaaaagcccgtgagggtgcagcccgggaaagagctagagacagggaagaacgattggcagcactcacagctgctcaaccaagaagctatggaagagttacagaaaaaaattcagctcaagcatgatgaaagtattcgaaggcacatggaacagattgaacaaagaaaagaaaaagctgctgagctaagcagtgggcgacatgcaaatactgattatgcccccaaactgacccctttatgaaagaaagaagcagtgttctctctgcaatgtcctgatctcttcagaggtatatctttttagccatgttaaagggagaaaacaccagcaagccgtgagagagaataccagcatccaggggcgtgaactgtcagatgaagaagtggagcatctttccttgaagaagtacattattgacattgtggttgaaagtacagctccagcagaagctttgaaagatggagaagagcggcaaaaaaataaaaaaaaagccaaaaagataaaagcccggatgaacttcagggctaaggaatatgagagtttaatggaaaccaaaaattctggctctgattcaccttataaagcaaagcttcagcgattagccaaagatcttctaaaacaagtacaagttcaagacagtggctcatgggcaaacaataaagtgtctgctttggatcggaccctaggagagatcactagaatactggaaaaagagaatgtggcagatcagattgcatttcaagctgctggtggattaacagcccttgaacacatccttcaagcagtagtcccagccacaaatgtgaacacagttttaaggaattcctcctaagtctctctggcaatgcaattcaatgtttacaaccttcacctggcaattaactgtttcaggaaaacttgcagtgatgttctgtttagtaacaaggtttaccttcttaatggggcctcctgatacaccagttgacggtttatgttccagatgaaaataatactatttgggggagaaatacaaataaacaagttttgaaaggcttgacaactgggacttctcaaagtcagtgctgtgggttttggggctgcctggattgccaatcgaccaggtggggaaactgccagccaggctaccccaaaaataccaacacaggaaatgaaaaacaaaccctcacaaggtgatccttttaacaatcgagttcaggaccttatcagctacgtggtgaacatgggtctgattgacaaactgtgtgcctgcttcctctcggtgcaaggcccagtgggatgaggaatcccaagatgggccatatttctggcaggcatgccgcaggactcttacatgcaatgtgttacactgtgctttgctgtcactggaaggtcatacagcatatttgacaataatcgccaggatcccacagggctgacagctgctcttcaggcaaccgacctggctggagttcttcatatgctctactgtgtcctcttccatggcaccatcttggaccccagcactgccagtcccaaggagaattacactcaaaataccatccaagtggccattcagagtttacgtttcttcaacagctttgcagctcttcatctgcctgcttttcagtctattgtaggggcagagggcttgtcccttgcattccggcacatggccagctccctgctgggccactgcagccaagtctcctgtgaaagcctccttcatgaggtcatcgtctgtgtgggctacttcactgtcaaccacccagataaccagggtgatcgtgcagtccggccgccaccccacagtgctgcaaaaagctctgccagttgcccttccagtatttcagtgacccacggctgatcaaagtactgttcccctcactttatcgcagcttgttacaacaaccatcagaacaagatcattctggagcaagagatgagctgtgttttactggcccctttcattcaggatttggcacagactccaggtcaagcggaaaaccagccttaccaacccaaagggaaatgccttggtttcccaagactatcttgagctggctaacagattttcctcaggcagggcctggggaaagaagctcgacagtttttcttgaaaaaagagaaaaaataaatgttttggttgattctgtatttgagtacccttgttaatattttaaattgtccaaacaaacattctaattgttccttaagaactcattttcccatgtttatactcttcccacactggtagatatggcatgtactttacactatttataatgactgtagatacttgaatgttctacttgctaattttgcaagttgagtttatttcatttatgcagagtatcttggagtttggtaatttccatcttatgataatatatactttgcatttgtgatatgggtgaaaggagacataaaattagcaagtctgttttgttcttgtaataaagtaacttattctgttttcattgttgacttttcatgttaaggaaatacgaatctgaaagaaaaatgttaactccagctcttgaagtatcttaaataaagacttaattaaagtttaaaa

SEQ ID NO: 121910 - DNA, 425 bp, Homo sapiens
  misc_feature (1)...(425): n = a,t,c or g
attggcagcttagcattttgcaaaggaattgctttgcaggaaatatttaattttcaaaaacataatgattaatgttccaattatgcatcacttcccccagtataaatcaggaatgtttgtgagaaaccattgggaactatacnnnnnnnnnnnnnnnnnnnnnnnnnnnnnnnnannnnnnnnnngggnnnnnnnnnnnnnnnnnnnnnnnnnnnnnnnnnnnnnnnnnnnnnnnnnnnnnnnnnnnnnnnnnnnnnnnnnnnnnnnnnnnnnnnnnnnnnnnnnnnnnnnnnnnnnnnnnnnnnnnnnnnnnnnnnnnnnnnnnnnnnnnnnnnnnnnnnnnnnnnnnnnnnnnnnnnnnnnnnnnnnnnnnnnnnnnnnnnnnnnnnnnnnnnnnnnnnnnnnnnnnnnnnnnnnnnnnnnnn

SEQ ID NO: 121911 - DNA, 1134 bp, Homo sapiens; identical to SEQ ID NO: 119206

SEQ ID NO: 121912 - DNA, 1389 bp, Homo sapiens
  misc_feature (1)...(1389): n = a,t,c or g
atgcagaattggaagttatacctcactctacaggttcctaagccactcctacaagaagaagatagtagacgacatgcactgcaggacctgctgcccgtggacctgccctgtgagcatcacccaggccaggagcaagggcatgtggctctggtgaagcagggcatccaaacacccacagacactcagcaggggcttggacttggggcttccaagctagtcacttctactcccttaccatgggatccactgaaagatggtgaggcaaagatcaaaagcgactatgcacaacttcttgaagacatgcagaatgcattccgtagccttgaagattagaagccttgaagattacaactgtgatttccttttcctcaggcaagctcctatgtgtatattttcctgaaatttctcatctcaaaccctttgcttctttattgtgcagctttgagactagtgccctatgtgtgttatttgtttccctgttttttttggnaagggcttatataaaaccaaaccattccctttgttctagtgttgtgaagggcctccctcttcccttatctgaagtgggtgaatatagtaaatatacattctggggtacactactgtaaacttgtatgtaggggtgatgaccctctttgtcctagggggtaccctttcctcatctctattaaattgtaaacaggactactgcatgtactctctttgcagtgaatttggaatggaaggccaagtttctataacttttgaacaggtactttgtgaaatgactcaatttctattgtggtaagctcattggcagcttaacattttgcaaaggaatttgctttgcaggaaatatttaattttcaaaaaccataaatgattaatgttccaattatgcatcacattcccccaagtataaatccaggaaatgtttgtgagaaacccatttgggaactaatactctttttaatttttattttttattttttttaattattttttttttgggggacggaagtgtcccctccttgttgcccccaggctggaagtgcaaatggccgtgatcctgggctcactgcaagccttcgcctcccgggttcaaagtgattctccctgcctcagccctccccgagtagctgggattacaggcatgctcccacccatgcccagcctaattttgtatttttagtagaaacggggtttcaccatattggtcaggctggtctcgaactccagacctcaggtgatccgcccacctcggcctcccaaactgctgggattacaggcgtgagccaccgcgcctggccagggactatactctttttaaaatagacatttgtggggctcacacaatatatgaaatagtaccctctaaaaaagaaaaaaaaaaaaaaaagggcggccgct

SEQ ID NO: 121913 - DNA, 2374 bp, Homo sapiens
  misc_feature (1)...(2374): n = a,t,c or g
tttcgttgatatcttccagagatggaaagagtgcaggggaaagagccctgcccaggcggaactctcctatctgaataaagcgaagtggctggaaatgtatggggtagacatgcacgttgtcaggggaagagatggctgtgaatattctcttggactgaccccgacaggcatattaatctttgaaggagctaacaaaataggcttattcttttggcctaaaattaccaaaatggattttaaaaagagcaaattgacactcgtggtggtcgaggatgatgatcagggacgtgagcaagagcacacgtttgtgttccggttagacagtgccaggacctgcaaacacctttggaagtgtgcagttgagcaccacgcgttcttccgactgcggacgccaggaaacagcaaatccaatagatccgactttatcaggctgggctctcgcttcaaattcagtgggcggacagaatatcaagctacacatggctccaggttacgaagaaccagcacctttgagaggaagccatagtaaacgttatccatcccggagacattcaacgttcaaagcaagcaacccagtgatagcagcccagctctgctcttaaaacaaatccagaagtccataattaccagcctccaatatccatcctaatatccattcccagcccagcccccggtggcatcctcactctcccaaatgtcaggccatccctttcaggatgacaggtcgcattggaaagcatcggccagtggagatgacagccattttgaattatgccccacgacccagaacccagaaggaaccttaggagggatgccaaagtatgatgtatccgagataaacgtcatgactgcactttgagagactgaagcatctctcttcccattcaccttcatagtttcattgcattcccatgaaaagtgtcttggcctcagatggatggatgtgtttggacgagtgtctttaaggagtagtcctgaaaggtgtttttggtgtccatgtaaatatttgaagataaaaccactatagcttgtcataatttactgttgactgcattctcattaaaatgaaggtaaaggctcaggaatcatattgatgttctgattttaaaattggagtcaaagtctatgtttatcattttactatgttcctgatgttctttgttatttaattaatgggagcaaataaaaccagaagagcttgggaagattgctcagcatatattcctgtcgtagaagttgagattgctagggtccagtttccctagtgtggcctggacgagtcatttccccttcattgacctcattttccccatctgaaaagagagggttggactaagtgatctccaaggtcctttccaactctaaaattctgcaatttgttaacatttcattttgtttaggttgaggacatacattcaaactaattttatcacaaggaaaactgcaatacccacttccttgacagagttactcctttcagaagctaaataaagtatataacttattagatgttatatagatacagggggactttgaatttcacatcttaaagcagttgagctactttgaatttaagcagtcgtactaatcttaaattgcatagcatttgttttgatcgaatttgctgctcaagtatgggaataatttttaatgtcttaatgattggtgctgctaacttgcgtgatttcagaagacataattgtgaatacacactgtcagaattgggggattggtttttaccctagacttcactcttaaaaagcaacgtgcaatcaagatcatttatggctcaaatgaaagcatataaggttttcttgaagttgtgccaaagcattctgtagagtaggatgagatggttgttgccctagtctgttggtagaaccagaaatcaatatgttgtcttttaggttaaagcttgtaccaaaatatttatttcccccatttcaagccctgagtcaaacatttttttctcttaataatagacctgaaatgttttattagtatttctgtgaaatcagttgattcttgtgccatttttgtatatgtaattgtaattttgcccatgttagggccctctaaaaaatgtttgacatcctttgagatattttattactaaaatctgatcttttttgggcnactgcaaaaatctattcagcaagaaggtatcagctgcataccttgcacagtggagctgactacctataaactctccctaaggcatttgtttacaggtgtattccattttagcagacgttctgatgctcagtgtatgtgctgcatacaaataaatgtgttctgaatcttttcatcttattgatagcatttttacaaatgtgtttccaaggaataaagattattcttgctattaaaaaaa

SEQ ID NO: 121914 - DNA, 936 bp, Homo sapiens
atggagctcacccacctgcagccccatgagccccaggaggatgtgcatgcggtgggcctgcttcttggtttgcgtgaacagcatcacatggtcagtgaaggtcctcgtcaacaaagctggcaggaagagaggactgagctggcagctgtttctaggctcttattcaacatgtaccccctcctcatccacaaaaaccatgcttccccaggcatcccgaatttgctcctccatccacggggactgagagccattactattgctgtatttggtaagcaaaatacgtacatcaggctcgaaccctttaagatcaacgttcttgagcagatcacgaagcatatcgaaaaactgcagtgcggagaacacaactttcctgaacaggaaatccaagagggcaaaagccatcagaaccagcatgaggctcactttgtggtagagctgtgcaagtacttcctgtgccaggaatacctgccttcccagatcaccatcctcactacctataccgggcagctcttctgcctgcgcaaactgatgcctgccaagacatttgctggcgtcagggtccatgttgtggacaaataccaaggggaagagaatgacatcatcctcctctcgctaatatccaaccgcatctgtgtggccttgtcccgagccaagaagggaatgtactgcatcggaaacatgcagatgctggccaaggtgtccctgtggagcaagatcattcatacacttcgagagaacaatcaaataggccccatgctccggctctgctgccagaaccaccctgaaacccacaccttagtatccaaagcttctgacttccaaaaagttaccgaagagggctgcagctgccctgcgagtttcgcctgggctgtgggcatgtctgcacccgtgcctggcacccttatgactcttcacacaaggagtttcaatgcatga

SEQ ID NO: 121915 - DNA, 624 bp, Homo sapiens
ttactcgtcaggagatcgaaggttgtagatgtctgcacgtggcttccttggaggtccagtggtgactccctcttccaaaatccattctgtacccgctggctgctctaacctgtgaaccaacaaataaagggcgttaaccgccatcttcccacggtcagaaacgaacaaggccgggccttttgaggccgatgtatcagaactaactggcaaaatataagacgtcagcattgtcgatctgatggggaaaaaagtgaagtcatcatttacaccagccaagggcttctcaggcccgtgcagaaggcagtggcttttccagctccagaaactcatttctcccacgcccttaaggcctgtattctcaggtcctgctggagaaacactttgcgtgaaagaaccgacaccaagacctagccactccagcatcatggaatgcttccagtgctggaagcaaatccattcactatcctgcactggtccattcatgagactttcccagtgctggggtgagatgtacttctgcaggtactgttcccgtaggacaccacgcatggtgcactccagggtcttggctccttcatgaagctcttgctctgactccttcatctgtgtcatgatctgagccat

SEQ ID NO: 121916 - DNA, 1637 bp, Homo sapiens
gaacatctctcaagctccaccacagacctactgaaccagaatctgcatttttagctgagaagcatccaaaagcactgctccaacttacacagcagaacacatgctttggattttctgggcctttctatttagccccaggcaaaacctatgtgggtctaaaaattgttcaggccctcctaaccaacgagtctgtttggcaaattagcctccagaagttccccatcttggttgtgtgttatactaatcatgctttggaccagtttctggaaggcatctacaattgtcagaagaccagcattgtgcgggtgggtggaaggagcaacagtgaaatcctgaagcagttcaccctaagggagctgaggaacaagcgggaattcccccgcaacctccccatgcacctccgaagggcctacatgagtagctaccgaaccatgcccatttaccctacctacaatgaagtgcacttggatgagaggcccttccttcgccccaatatcatttctggaaaatacgacagcactgctatctatctggatacccacttccggctcctgcgagaagatttcgtcagacctttacgggaaggtattttggaacttctccaaagctttgaagaccagggcctgaggaagagaaagtttgatgacatccgaatctactttgacaccaggattatcacccccatgtgttcatcatcaggcatagtctacaaggtgcagtttgacacaaaaccactgaagtttgttcgctggcagaattccaaacgattgctctatgggtctttggtatgcatgtccaaggacaacttcgagacatttctttttgccaccgtatctaacagggagcaggaagatctctgccgaggaattgtccagctctgcttcaatgagcaaagccaacagctgctagcagaggtccagccctctgactctttcctcatggtagagacaactgcatactttgaggcctacaggcacgtcctggaaggactccaggtggtccaggaggaagatgttcccttccagaggaatatcgtggagtgtaactctcatgtgaaggagccaaggtacttgctaatggggggcagatacgactttacccccttaatagagaatccttcagccactggggaatttctaagaaatgtcgagggtttgagacatcccagaattaatgtcttagatcctggccagtggcccttaaaagaagccctgaagctggatgactcccaaatggaagccttgcagtttgctctcacaagggaactggctattattcaaggacctcctggaacagtactccacacagccagcccgctcttccagcagcgggaaggggacacccccattcctcggctcctgcaggacacgcctccggtgtacatggcagctacgggaaagagtgggaaaagtgagatagtcccaagaaacaggcaacagcagggtgggaagcagcagagacatttggatctttggctcgaccagccaccaagaacgggtcaagtgtgcagcaaggcccagagcacagcgtctgagggtgggcccttacaaaaagactgcaggggaggtttttctgagaactgggtcaccggttacttagatgcttcaaacctggcagaacagagaaacatcagataa

SEQ ID NO: 121917 - DNA, 6286 bp, Homo sapiens
gacgcgccggagccggttttccagataacagaaagtaacgtgaaggaattcaggtgactcagacatggaggagagaagacctcatctggatgccaggcccaggaattcccataccaaccacagaggccctgtggatggagagttaccaccaagagctagaaatcaggccaataacccaccagccaatgctctccgaggaggagccagccaccctggaaggcatcctagggccaacaaccatcctgctgcttactggcagagggaagagagatttagggccatgggcaggaacccacatcaaggaaggaggaaccaggaggggcatgccagcgacgaagctagagaccaaagacatgaccaggagaatgacaccaggtggagaaatggcaaccaggactgtaggaaccgcagaccaccatggtccaatgacaacttccagcagtggcggactccccaccagaagcctacagaacagccacagcaggcgaagaaactgggctacaagttcttagaaagtcttctgcagaaagacccttctgaggtggtcatcacacttgccacaagtttagggctgaaagagctcctttctcattcttccatgaaatctaacttccttgagctcatctgtcaggttcttcggaaggcttgtagctccaaaatggatcgccagagtgttctccatgtactgggcatattgaaaaactccaaatttctcaaagtctgcctgcctgcttatgtggtagggatgatcactgaacccatccctgacatccgaaaccagtatccagagcacataagcaacatcatctccctcctccaggaccttgtaagtgtcttccctgccagctctgtgcaggaaacttccatgctggtttccctcctgccaacctctcttaatgctctgagagcctctggtgttgacatagaagaggaaacggagaagaacctggaaaaggtacagatctatcattgaccatctgcaggaaaagaggcgagaggtcactttgagagtggatacgtacactctagtgcagcctgaggcagaagaccatgttgagagctaccgatccatgcccatttaccctacgtacaatgaagtgcacttggatgagaggcccttccttcgccccaatatcatttctggaaaatacgacagcactgctatctatctggatacccacttccggctcctgcgagaagaaatcgtcagacctttacgggaaggtattttggaacttctccaaagctttgaagaccagggcctgaggaagagaaagtttgatgacatccgaatctactttgacaccaggattatcacccccatgtgttcatcatcaggcatagtctacaaggtgcagtttgacacaaaaccactgaagtttgttcgctggcagaattccaaacgattgctctatgggtctttggtatgcatgtccaaggacaacttcgagacatttctttttgccaccgtatctaacagggagcaggaagatctctgccgaggaattgtccagctctgcttcaatgagcaaagccaacagctgctagcagaggtccagccctctgactctttcctcatggtagagacaactgcatactttgaggcctacaggcacgtcctggaaggactccaggaggtccaggaggaagatgttcccttccagaggaatatcgtggagtgtaactctcatgtgaaggagccaaggtacttgctaatggggggcagatacgactttacccccttaatagagaatccttcagccactggggaatttctaagaaatgtcgagggtttgagacatcccagaattaatgtcttagatcctggccagtggccctcaaaagaagccctgaagctggatgactcccagatggaagccttgcagtttgctctcacaagggaactggctattattcaaggacctcctgggaacaggcaaaacctatgtgggtctaaaaattgttcaggccctcctaaccaacgagtctgtttggcaaattagcctccagaagttccccatcttggttgtgtgttatactaatcatgctttgggaccagtttctgggaaggcatctacaattgtcaggaagaccaggcattgtgcgggtggggtggaagggagcaacagtggaaattcctgaaggcagtttcaccctaagggagctgaggaacaagcgggaattccgccgcaacctccccatgcacctccgaagggcctacatgagtatcatgacacagatgaaggagtcagagcaagagcttcatgaaggagccaagaccctggagtgcaccatgcgtggtgtcctacgggaacagtacctgcagaagtacatctcacccccagcactgggaaagtctcatgaatggccccagtgcaggatagtgaatggattttcttcccagcactggaagcattcccatgatgctggagtggcttaggtcttggtgtcggttctttcacgcaaagtgtttctccagcaggacctgagaatacagccccaggcagaaggggatgaggaggaagaaggggaggaggagagtttcgcttgattagagattcgcagagggaagctgaccctgatttcaagcagaccgggtgattgaggaggaagaggtggtgaggccccagcggcggaagaaggaagagagtggagcagaccaggagttggctaaaatgcttctggccatgaggctagaccattgtggcactgggacagcagctggacaggagcaagccacaggagagtggcagacccagcgcaaccagaaaaagaaaatgaaaaaaagagtgaaggatgagcttcgcaaactgaacaccatgactgcagccgaggccaacgagatcgaggatgtttggcagctggacctcagttctcgctggcagctttataggctctggctacagttgtaccaggctgacacccgccggaagatcctcagctatgaacgccagtaccgcacatcagcagaaagaatggccgagctgagactccaggaagacctgcacattcttaaagatgcccaggttgtaggaatgacaaccacaggtgctgccaaataccgccagatcctacagaaggtggagccgaggattgtcatagtggaagaagctgcggaagtccttgaggcccataccattgccacattgagcaaagcttgccagcacctcattttgattggggaccaccagcagctgcgccccagtgccaacgtgtatgatctggccaagaacttcaaccttgaggtgtccctttttgaacggctagtgaaagtaaacattccctttgtccgtctgaattaccagcaccgtatgtgccctgaaattgcccgccttttgaccccccacatttaccaggatctggagaatcatccatctgttcttaagtatgagaagattaagggggtgtcttccaaccttttctttgtagaacacaactttcctgaacaggaaatccaagaggcgcaaaagccatcagaaccagcatgaggctcacaatgtggtagagctgtgcaagtacttcctgtgccaggaatacctgccttcccagatcaccatcctcactacctataccgggcagctcttctgcctgcgcaaactgatgcctgccaagacatttgctggcgtcagggtccatgttgtggacaaataccaaggggaagagaatgacatcatcctcctctcgctagtgcggagcaaccaagaaggcaaggtgggttttctgcagatatccaaccgcatctgtgtggccttgtcccgagccaagaagggaatgtactgcatcggaaacatgcagatgctggccaaggtgcccctgtggagcaagatcattcatacacttcgagagaacaatcaaataggccccatgctccggctctgctgccagaaccaccctgaaacccacaccttagtatccaaagcttctgacttccaaaaagtacccgaaggaggctgcagcctgccctgcgagttccgcctgggctgtgggcatgtctgcacccgtgcctgccacccttatgactcttcacacaaggagttccaatgcatgaagccatgccagaaggtcatctgtcaggaagggcaccggtgtccccttgtttgcttccaggagtgtcagccttgtcaggtgaaggtgcccaaaaccattcctcggtgcggccatgaacaaatggtcccttgttccgtgcctgagtcagatttctgctgccaggagccttgctccaagtctctgagatgtgggcacagatgcagccacccatgtggtgaggactgtgtgcagctgtgttcagaaatggtcaccataaaactcaagtgtgggcacagtcaaccggtaaaatgtggtcatgtggaaggcctcctgtatggtggtctgctagtcaagtgtaccacaaagtgtggcactatcttggactgcgggcatccttgcccaggctcctgccacagctgcttcgaagggcgtttccatgaacgctgtcagcagccctgcaagcgcctgcttatctgctcacacaagtgcccagaaaccatgcattggtgagtgcccaccctgccagcggacctgtcagaaccgctgtgtccacagccagtgcaagaagaaatgtgaggagctgtgtagtccctgcgtggaacccatgtgctcgcgctgccagcactaccagtgcaccaaactctgctctgagccctgcaaccgacccccatgctatgtgccttgtactaagctgctagtttgtggccacccctgcattggtctctgtggggagccatgccccaagaaatgccggatctgccacatggatgaggtcacccaaatattctttggctttgaggatgagcctgatgcccgctttgtgcagctggaagactgcagccacaatttttgaggtgcaagccctagaccgctacatgaatgaacagaaggatgatgaagtcgccatcagattgaaagtctgccctatctgccaggtgcccatccgcaaaaacctgagttatggaactagcataaaacagcggctagaggagattgaaatcatcgaggaaaagtatccagggctcatcaggggaaatggcaaccagccaggaacggcttaaggccctgctggagaggaagagcctcctccaccagctgcttcctgaagacttcctgatgttaaaggagaagctggcccagaaaaatctgtcagtgaaggacctgggtctggttgagaattacatcagcttctatgaccacctggccagcctgtgggattccctgaaaaagatgcatgtcttagaagagaaaagagtgaggactcgactagaacaggtccatgagtggctggccaagaagcgcttgagcttcactagccaggaactaagtgacctccgaagtgaaatccagaggctcacatacctggtgaaccttctgacccgctacaagatagcagagaagaaggtgaaagatagcatagcagtagaggtctatagtgtccagaatatccttgagaaaacatgtaagttcacccaagaggatgaacaacttgtgcaggaaaagatggaagctctgaaagccacccttccctgctctggcctgggcatctcagaggaagagcgagtgcagattgtcagtgccataggttatcctcgtggtcactggttcaagtgccgcaatggccatatctatgtgattggcgattgtgggggagccatggagaggggcacgtgtcctgactgtaaggaagtgattggtggcacaaatcatactctggaaagaagcaaccagcttgcttctgaaatggatggagcccagcatgctgcctggtctgacacggccaacaacctgatgaactttgaggagatccaggggatgatgtaggaagatggtacaccactgccttttgccctcgccactgaatgactggggccagctccctaatgaaggaactgaagtttgttttttattatcatcctttttaggctgggcgcagtggcttacgcctgtaatcccagcactttgggaggccgaggcaggcggatcacctgaggtcaggagttcgagaccaagcctgaccaacatggcgaaaccccgtctctactaaaaatacaaaaataaaataaaataaaatcaaaataagccaggcgtggtggcgtgcgcctgtaatcccagctactccgggaggctgaggcaggagagtcacttgaaccggggaggcggaggttacagtgagccgagatcatgccattgcattccagcctgggcgacaggagcaagactctgtctcaaaaataaataaataaataaataaataaaa

SEQ ID NO: 121918 - DNA, 387 bp, Homo sapiens; identical to SEQ ID NO: 114599

SEQ ID NO: 121919 - DNA, 999 bp, Homo sapiens
cggacgcgtgggtttttttttcgccggaaatcccggaagtgacagctttgggggtttgctgctgggtctgactcccgtcctgcgatgggttgctgacgggggaacaatccccaagaggcatgaacctggtgaaggggccgaagaaggttgagaaggtcgacaaagatgactgaattagtggcccaatggaactattgtactctaagtcaggaaaatattaagacgaccaatagttgccctgtgaactttgcagacttttataacaaagatgcccgtcattgaatttctcttggacaaatctgcagaaaaaggctcttgggaaggcaggcatctcacattaaaacgcattaacgaattgttgacagagctgaaagctttcctgataatccctgccctgggaaggggataaagggaaacactaaaaggtggacaagcacgatgacctccaagcgggcgcgtcttcatcttcccccgttggtgggcctgggagatggaacggccgacacaggttcttgcttccttcgggtggttgcggcttgtgttgtttttcttgagcggagccttggaaagagataaaagcgggagttttgccacacgtgtggggctggcctttccaggaggatgatgataatcgtgctcaatggcaccaaggaggatgtggacttgctgaagacaatgatggaggagagaaggctgtagagcgaagctggaaaagaaaacaaagaaaacccaaggcagcagagtctgtttcaaaaccaggatgtcagtgaaagaagccccagggccatcaaaagttaagacaggggaagcctgaagaagccagcctttgattctagagagaagaaaaccaacttggctcccaaaagcacagcaatgaatgagagctcttctggaaaagctgggaagcctccgtgtggagccacaaagaggtccatcgctgacagtgaagaatcggaggcctacaagtccctctttatcactcacagctccgccaagcgc

SEQ ID NO: 121920 - DNA, 1497 bp, Homo sapiens
  misc_feature (1)...(1497): n = a,t,c or g
atgggttgcgacgggggaacaatccccaagaggcatgaactggtgaaggggccgaagaaggttgagaaggtcgacaaagatgctgaattagtggcccaatggaactattgtactctaagtcaggaaatattaagacgaccaatagttgcctgtgaacttggcagactttataacaaagatgccgtcattgaatttctcttggacaaatctgcagaaaaggctcttgggaaggcagcatctcacattaaaagcattaagaatgtgacagagctgaagctttctgagcgagccttgaaagagataaaagcggaagtttgccacacgtgtggggctgccttccaggaggatgatgtcatcatgctcaatggcaccaaggaggatgtggacgtgctgaagacaaggatggaggagagaaggctgagagcgacgtgggaaaaagaaaacaaagaaacccaaggcagcagaggtctgtttccaaaacccagatgtcagtggaaggaagccccagggcccatcaaaagttaagaccagggaagccctgaagaagcccagcccttgattctagagagaagaaaaccaacttggctcccaaaagcacagcaatgaatgagagctcttctgggaaaagctgggaaagcctccgtgtggagccacaaagaggtccatcgcttgacagtggaagaatcggaggcctacaagtccctcttttaccacttcacagctccgccaaagcgcctccaagggaggagtctggcccactggggttcaccccacacgtcctacttgcttctgaaagcccgcactgccaccggctcctgccccagaaggttgtttaagttttccacgtagggcaggtccgctttgtggcctctgagttgcgctgcttgtgtgttcttttctattagtttttgttgttcataaaaggtgttcctgggccagccttcaagctgggtgtgggccacctctttgatgtgagggcgtgttcggttcccaggggggggacatggggaggggcttgcacagtgggcccgaggttcatgctttgtttccaccttgcaggtgccatttgggtccttttccatggccccaggtaangcctgtgggcctggcactttttaatgccttggcagtaacaagagactcccagagtccctcacccggtgcaagagttggcacatattaattaactaaaattcctaatgatcttgctaccagcaataaaatcaagtaaggccaagtgaaactgggctttaaaaaggatggattttaaaaacccctgtgcccactagaagcttcggaagggcctcgtccctctgctaccagccctgggaggagccaggatccttgttggtctagctaaatactgttaggggagtgtgccccatctcatcattctcgaagatagcaaagtcatagttgggcacccggtgattgaggtcaaaaaataaagctggtctgtctcttcccaatattttgtgaaaaggtaaaacgggaaag

SEQ ID NO: 121921 - DNA, 443 bp, Homo sapiens
caggggtgggagcttcttctccagcgtggcacccacgatccagttgctatccacagagcctttgaagaggaggttggcccttgggcaagttccagctggtacccgaaggagacgctggtgtcctgcatccttgtgctggccttcaaactccacacccacctgcagctggtcactggctttgtggtagtatgttgcgtgcatgcccgcctggcccaacgttaccgttgccaaccagttgttcaatgtgtatttcccagctagagacatgacagtgccctcctctccaggccgccggtggtagaccagctctccacccagggccaggcaaggcgtgatgctctggaggtagtgggctacgaggattcctgaacccacgaggacgtctgggttccccagggtgacggctgctgtgaactcgtgccgaattcctgcagcgcggatca

SEQ ID NO: 121922 - DNA, 2402 bp, Homo sapiens
gatgtgacaaacagcatttattccagactccagtgtccacagatgatggggtggggcggaggtagggcgggggcaggagtgggaccaggggcggggtgaggggggggaatccagtgtcagactctgcagcaagacgtcaggtggggggaccagcaggggaggcgggaggtaaaaatagctccggccagccgaccctcggagccttgtcccaggctgggccttgggcttgggtccaggagctattctggggcctgggagagtcacattccctggaggaaggccccctcccacccacccaccctccctctccttccctcccggaggcaggcagccactgtgggtccctgccttgccggcagaggaaggaagggagggctgggcagggagagggaagagggaagagggaaggcgggggcgggcatggcgtgagcagggctggttctctgatgcctgcagctccaggtccagggacagcctctaggaggttcttggctcagcactcgtctccgaagcccccgctgccacccctggctcctccggaggcacctcccatgagaaggccggtctgctctggttgctccgaccccgagtggctcagccctggctcccctggcggcggagcccccttctcccgccgctggcggcagcaggggccccctttgcgtctcacgcagtagaagacagcaacgacgaggagcaggaggcccacgctgacggccacggccatgacggccactccagcctgggaggtctgggggctcacggcgccgaagtggaagacatggcgcttgttcccgtgggggttggaggcttcacaggagatgccatcgcggctcagggcgctggtcactttcagggtcagagagctgctcacccaaccctgccgtccggggattggctctgcggggctgccccccaattggctccagctgagtttggggtctggatggccgcgggcagagcagatgagtgtgacttcgtctccttccctccagctgccatctgccttgggctctatttccgctgtctttagctctggcgagccttggaccagcagcgtgaagttctgggtgcggctgaggaccgggactgtgggcagggaggcctcacatacgtaggtgccattggaatcgaaggtgatagaactgagcgacagcatggggccatcgcccaggggagtggagtccttggtccagcgtagggcaggggtgggcaggccgtgcacggagcagttcacgactgcactgctgtttagaggtaaggaaagcaccttcccctcgctgagctccagggggtccagataggccacgcgcagctccagcgtcttggagagctgcacgtcatctgccgcgtcgtaatcctccactctgcagccataggtcccgctctggccccgggtcactccctccagggtcaagttcccctcgagattcacattcagcacttcctcctgctcatcctgaaggcggaaaagcgtatactccgggctggggctgccgtccccccggcagagcagctggacagtgtcaccctcgcgtacccagcctgctggggtggacgggctgcccacccagaactgcacgtgctccgtgggatagtgcagggtgaggtggaaggtggggctgtccaggcggccgtggcggccctcgggcaggctgtagtgggcggcgcagtggaagctggcgtctcggtcatccttgcggagccgcaggtagagggtgctggtgagggagagcaggcccgaggcctcccggaccgtgcggctggtcatgtagccctctgggttcatctctacgggcacctccaggcgctgcccgttgcgataccacgtgatcttgggggccgggttcccgttccggctgttgcaggtggcgatctcctgggcagagtcctccatcacagacagtgtccctttgttgggggagacctcagtggcctctggctttgcaaacacgttgagccgcgcagtggcctcagcagtgcctgccgcccctgccctcaccacgcacacgtagtctcgctcgtcgcccacctgggcctcagccagcaccaggcgcccctgggagtccagctggtatgggggactgcggccccgggtgtcgtgcattgtgacctggagctcagagccctgcatctcagccgaggctaggcgggggcgagctcccgagcggtcggtaaggaaccattccagcatataatggtcgtgggttcccgtaggggtgcagtccagaatgacagactttcctcgcatcacctccaccagcgggggtacagacaagcgcacctccgcctgggcatctgggtgcgccgccagcaggactgcgagcaacagcagccgcggggccccgcgcgcctgggccggtgcgtccgggggctccatgttcacggcggcggcggagact

SEQ ID NO: 121923 - DNA, 932 bp, Homo sapiens
ttataaatcggaattggaggaacaactgacctcggtggcggaggagatgcgggcacggttgtctaaggagttgcaggcatagaaagaccggctgggagagaatatggagaaagtaagaggacgcttggttaagtatcgtggcgaggtgcaggccatgctcggagagagtatcgaggagctgcgggtgcgccttgctttatatcgtgcgcaagctgtgtacagggttcctccgcgatgccgatcacctttgaagaggaggttggccttgggcaggtccagctggtacccgaaggagacgctggtgtcctgcatccttgtgctggcctcaaactccacacccacctgcagctcctgggcagagtcctccatcacagacagtgtccctttgttgggggagacctcagtgcctctgctttgcacgcacacgtagtctcgctcgttcgccacctgggcgtcagccagcaccaggcgcccctgggagtccagctggtatgggggactgcggccccgggtgtcgtgcattgtgacctggagctcagagccctgcatctcacaccaaaaaactgatcggctgatgatcacgtagatgccatcggccggcggcgggctcgaccctgtcattactgtatgctttggtctgtgggtgtgtagaatgagggacaggaactttaactcttcgtcctcctctgccccctgcagcgtctgctccttccgctgctgccggcagataaggatgcccgtggcagccacagcagtagcaatgatggcggcgatgatgcccccgatgatgccgcctgtggcccctgcgcctgctgtgttgggggtctgagggtacgagaatcaggctcagggcgatgggctcgacctgcggggaggtcgcacaaccgggacgtgctgggggcagaaccgtaaagccccacgtcctcaggcaa

SEQ ID NO: 121924 - DNA, 3639 bp, Homo sapiens
atggaaacaagcagtgtaagttctggaacagatttcatccttctggggttttctgatcgaccccaattagagcacatcatctcagtggttgtcttcatcatctatattgtgactctgaaaacctacaacaaatacacggtgctgagattatcaccagcaatatcccagaactcaaatatgaagatggaacagtgcccgtggcaacaaagaagtaaaaaacttcaagcagacgctgttgtgctgttggatgagagttcaggaccaccaagccagctgctttggacccgccaggatacccagctccctcaggaaagcgctctattacctgctccatatcctgccttcactaaagatggaagccaaggaaacctgccgcaagcagatatcacactaatgagccaggcccaagatagcaggagcatattatttcaggagtcagtgacatttgaggatgtagctgtgaacttcactaacagggagtggcagtgtctgacctacgctcaaaggcatctctataaggatgtgatgttggaaaattatgggaacatggtatcacttggatttccatttcctaaacctcctttaatctctcatctggagcgagaagtagacccctgtgtgcaggatccacaggacagggagtccctaagctgctcctacccagtgtcagctgacaagatgtggcctgagaatgaaaaggcaagttcacaacaagagatttttgaaaatggagaagcctactggatgaaatttaacagtctcctaaaagttgattcccgggatcctaaggttagagaagtttgtgttcaggatgtcaaattagagaatcaatgggaaacatctataagggagaaactgagagaagagaaagaaggctctgaggaagtgacctgcaaaaaaggaaagaaccagaaagtgcttagtaaaaacttgaatccaaactcaaaacatagtcaatgtaataaagttcttatagcacagaaactccatgaatgtgccaggtgtggcaaaaacttcagttggcactcagatctaattctccatgagcaaattcattctggtgagaaaccccatgtgtgtaatgagtgtgggaaagcattcaagaccagaaatcagctttctatgcaccggataatccacacaggggagaaaccttttaattgcacccagtgtgggaaggctttcaacagtagatcagctctttgccgacataaaaaaacccacagtggggagaagcctcacgagtgcagggactgtgggaaggccttcaagaccaggaaccgtctctgtatgcatcagcttatccacaccggggagaagccttacaaatgtaactgctgtgggaaggccttccagtttaagcattcccttaccatccatggcagaatccacactggggagaagccatatgaatgtgaggagtgcgggaaggccttcagtgggagttcagacctcaccaaacacataagaatccacactggggaacgaccttatgagtgcagcaagtgtggaagggccttcagtcggagctcagacctaagcaaacacaaacgaatccatactcgggagaaacactatgggtgtccccagtgtggaaaagacttcagcatcaaggcagaactcaccaaacacagaaggatccacactgaagagaaacgttacaggtgtgaggagtgtgggaaagcctttcgtcataactgtaagcgcagggctcatgaacgagagcatacaggggagaagccctatcaatgcagggattgtgggaaaaccttccaagataagcactgccttaccatccatcagagaatccacactggagagaaaccttacaaatgtttagagtgtgggaaagctttcagtgggaagtcaaacttgaccaatcatcgaagaattcacactggagagaagcctcacaaatgtgaggtatgtggaatggccttccatcatagttcagtcctgaggcagcacaaaagaatccacactggtgagaagccatacacctgcagtgagtgtggcacgtccttccgtcagggctcagctctgattggacataagcgagttcatactggggagaaaccttatgaatgtgaggaatgtggaaaagcttttagacgccatcagagaacttcaggcagctgttcagccgccacacaccccgaacccccaacacgttgctttcgcactgatgggagcagtgaggaaggaaaccggcggatcctagacgcccttcccttgcgtcaccgatgttcgctgtggaaggtgacgcctggctggagccccgacgccgctgagcgagtttcaagtggttttggccgacggaactctacgaaaaaacggggcgccgtgcgaaagagcgcagtccttgctgtttatgaagctaggaggaaaggccaactgattaagcaattgcaagtcatcatcgtgactgaattggtgctgggtcacacagctcgggattggaacttagtgtcgatctggaaaggcctgcttggagaaattcacgaatgcactgaggaatggggtggggctcaatcaagccttcagaggaatggagtccttactgacatcatgtggagcagaatcacccagagtttaattggtcgtcagcaaagcctgagtcctgtcctctcgctctcctccccggacagcaagagcttcaccactcgctccaccttctccaccaactaccggtccctgggctctgtccaggcgcccagctacggttcccagccagtctgcagcgcggccagcgtctatgcaggcgccgggggctctggttcccggatctccgcgtccccctccaccagcttctggggcggcatggggtctggaggcctggcggcagggatggctggggttctggcaggaatgggaggcatccagaacgagaaggagaccatgcaaagcctgaaggaccgcctggcctcctacctggacagagtgagaagcatggagaccaagaaccggaagctggagagcaaaatccgggagcacctggagaagaagggacgccagtctgtggagagcgacatccatgggttccgcaaggtcattgatgataccaatgtcactcggctgcagctggagacagagatcgaggctctcaaggaggagctgctcttcctgaagaagaaccaagaagaggaagtaaaaggcctacaagcccagattgccatctctgggttgaccgtggaggagtgcgaggccctgctgaacatcaaggtaaagctggaggctgagatcgccacctaccgccgcctgctggaagatggcgaggacttcagccttcgtgatgccctggacagcagcaactccatgcaaaccatccgaaagaccaccacccgcccgatagtgagaagtggggggtcatcagttcagaataagaggggcaaaagcagcgggatcagcagcgactttcttcatctgattcaggttttggaagctgcccgagcctccccgacgagcgccgccccctgctccacggcacccagtcccatcgaccacccaagggatgaggagtgcgagcgcatggcgtggggttggcaggcaactccacctgcaaccccggtgcgggatccactgggtgaagccagctgggatcctgagtctggtggggacgtggagaatctttatgtctag

SEQ ID NO: 121925 - DNA, 1080 bp, Homo sapiens
atggctcccagcgtgccagcggcagaacccgagtatcctaaaggcatccaggccgtgctgctggggcctcccggggacggtaaaggcacccaggcacccatattggctgaaaacttctgtgtctgccattcggctactggggacaggctgagggccatggtggcttctggctcagagctagaaaaaaagctgaacgcaactatggatgctgggaaactggcagaaatgctcgatgacctcatggagaagaggaaaaagaagcttgattctgtgattgaattcagcatcccagactctctgctgatgattttagagtcaactgtgagacagagcctgccatgtgcacgcagtagagaacgacatccatgggctctgcgagctgcagctggagacagagatccaggctttcaaggaggagctgctcttatgaagaagaaccatgaagaggaagtaaaaggcctacaagcccagattgccagctctgggttgactgtggtggtagatgcccccatatctcaggacttcgccaagatcatggcagacatctgggcccaatatgacgaggtggctcagaagaacagagaggagctggacaataacaggtctcagcagattgaggagagcaccacagtggtcaccacacagtccaccgaggttggagctgctaaggcgatgctcacagagctgacacgtacagtccagttcttggagatcaacctagactccatgagaaatctgaaggccagtttggagaacagcctgagggaggtagtggcccgctatgccctgcagatggagcagctcaatgggatcctgctacacctggagtcagagctggcacaaacctgggcagagggacagtgccaggcccaggagtaccaggccctgctgaacatcaaggtcaagctggaggctgcgatcgccacctaccgccgcctgctggaagatggcaaggacttcaatcttggtgataccctggactgcagcaactccatgcaaaccatccaaaagaccaccacccgccagagaatggatggcaaagtgctgtctgagaccaatgacaccaaattgagacattaa

SEQ ID NO: 121926 - DNA, 891 bp, Homo sapiens
ggccttctgatactaggatgtggctttggagaaggctgctaggatgcttgcgaacacgacatcgggggtctgggatgcatcgatggcggagtggatcccccgtttcctgtagtactctatgagtggggtggtttgagtgtggtaggcttgcaggcggattttcaaggccttttcattatcatctgatcgacggatcaagggttccccggtgatgtcatctttcatgggctcttttggagggttgaactcctcgtggtaggaacggccactcttggggtgaatcagccttcctgtgattcttcggatcagcagagagtctgggatgctgaattcaatcacagaatcaagcttctctttcctcttctccatgaggtcatcgagcatttctgcctgcctcacagtccgagggaagccatccagaagaaaaccatttttgcacaagggggtctccaaattcttctcaatgagctccactaccatttcatcactcaccaagtttcccagcatcccatagttgccttcagcttttttccctagctctgagccatgaagccaccatggccctcagcatgtccccaggtagctaaatggcagacacagaagttttcagccaatctgggtgcctggggcagtagatagcatgcagaaatgagcaggagctttggagtcattcagatgcaagctctgtaaattacttgctatgtagcctagagaacaagccattcaaacttcagtttctccaactgggtccctttaccggccccgggaggccccagcagcacggcccggatgcctttaggatactcgggttctgccgctggcacgctgggagccatgtccgccgaagtctctcactgaacaccagttcgcacgcctcacaggtccacgaaa

SEQ ID NO: 121927 - DNA, 832 bp, Homo sapiens
gactgagctggagacagagatcgaggctctcaaggaggagctgctcttcatgaagaagaaccacgaagaggaagtaaaaggcctacaagcccagattgccagctctgggttgaccgtggaggtagatgcccccaaatctcaggacctcgccaagatcatggcagacatccgggcccaatatgacgagctggctcggaaagaaccgagaggagctagacaagtactggtctcagcagattgaggagagcaccacagtggtcaccacacagtctgctgaggttggagctgctgagacgacgctcacagagctgagacgtacagtccaggtctttggagattcgacctggacttccatgagaaatctgaaggccaagcttggagaacagccttgagggaggtggaggcccccgtacgcccttacagatggagcagcttcaacgggaatcctgctgcaccttgagtcagagctggcacagaccccgggcagagggacagcgccaggccccaggagtatgaggccctgcatgaacatcaaggtcaagcctggaggcttgagatcgccacctaccgccgcctgctggaagatggcgaggactttaatttttggtgatgccttggacagcagcaactccatgcgaaaccgatccaaaagaccaccaccccgcccggataagttggattgggcaaagtggtgtcttgagaccaattgacacccaaagttcttgaaggcatttaagcccagcaagaagcaagggtacccttttggggaagcaaggaaggccaataaaaagtttcagagttcaaaaaaaaaaaaaagaaaaagaaagttttg

SEQ ID NO: 121928 - DNA, 372 bp, Homo sapiens
ctaggcaaaataatatggtactgttctaatgtctaaagtcaatttcatattttcaaatgcttcaggtcctctgcgtgtaactgtgaccttggcagcaagcacaggaattggccattgaacatgtttcatgtacagcccctgaaatgctatgctccttttgccagccccacttttgcctgttttactgctgccgctgctagatttgccagatgattttgaagagaagagtcttgtcatgaactcagaaacatcaggcaactcatggttggaattcagcatattcattgactgctccatttcccgtctcatgtcaggatcacttgtgttgaccactttaggcagaagcacaaatatcaataaaggaagaaccat

SEQ ID NO: 121929 - DNA, 743 bp, Homo sapiens
tttttttttttgagacggagtttcactctgttgcccaaactggagtgcaatggcacgatcccagctcaccacaacctccgcctcccaggttcaagtgactctcccgccccagcctcccgagtagctgggactacaggcacgtgccatcacacccaggtaattttttgcattttcagtagaaacggggttccaccaaccaggctggtctcgaactcccgacctcaggtgatcttgctgcctttgccctccccaagtgctaggattacaggcgtaagccactgtgcccggcctaactaccaatgttttctggagtttaaatattaaaattcaaactagcaatctttactttttcctttacgagacaaatcaataaagaccaaagtcaaattcactgtgatttaaatagtttaccttctcaaaaagcataacattagcaaaagtaaaacttaatctccaaaaccatttaattatgtttcttatcccttgtttccatgagttcctcgtcttgttttctgatgctgtccttattggattctcaaaattttttcaaatacttttctctgattaaaaccctctgtaaatatcctctagcatagcatttcaggggctgtacatgaaacatgttcaatggccaattcctgtgcttgctgccaaggtcacagttacacgcagaggacctgaagcatttgaaaatatgaaattgactttagacattagaacagtaccatattattttgcctaga

SEQ ID NO: 121930 - DNA, 1474 bp, Homo sapiens
atgctgctgacgctggccgggggcgcgctcttcttcccggggctcttcgcgctctgcacctgggcgctgcgccgctcccagcccggatggagccgcaccgactgcgtgatgatcagcaccaggctggtttcctcggtgcacgccgtgctggccaccggctcggggatcgtcatcattcgctcctgcgacgacgtgatcaccggcaggcactggcttgcccgggaatatgtgtggtttctgattccatacatgatctatgactcgtacgccatgtacctctgtgaatggtgccgaaccagagaccagaaccgtgcgccctccctcactcttcgaaacttcctaagtcgaaaccgcctcatgatcacacatcatgcggtcattctctttgtccttgtgccagtcgcacagaggctccggggagaccttggggacttctttgtcggctgcatcttcacggcagaactgagcactccgtttgtgtcgctgggcagggttctgattcaggcatgtatgaatgaaatgacagagagtctaaagcagcagcacacccttctgtacaaggtgaatggaatcctcacgctgggcaacttcctttccttgccggaatccttctcttccccttcatggtactggtcctatggccgcaagaagggactaagcctggttccaagtacccttcagcatcccattctaactgcaacgtgggccaatgcctttcctcggtaagctcctcagatctactggttctgtctgctgttgcaggaaggcagtccggctctttgacactccccaagccaaaaaggatggctaaatgctcctgggagtcaggcgcagcctcacaccagctgcctcctccactcagcattccatggaccaaattgtgccctgggtagcctcagactttgggtattgataagccgatggatttgagtttttctaaagaatattcatattacctccttcttctaacttgccctatttgcaaacgcacttttgtagtaacaactattggggtcctgtcagacctccacggacagcaaagtggttttaatggcaagcccaagggatccttcttaaggtcttatctcaagagctctgggaggtggaagcatggggtgggatcggtggaccagggtggtaagtgtctgcacatctgcctgtccctgtatcagcggctacccaccttccaaaccactcaggacagtacccgtggcactgggcccgcagaagcaagggatgacttggttctttggaagtaatgtcgtcttgtgacattggcctgggacaatcattgtgggtaggtagttattgatcgtttactagataacccattggttctttgcctcatcctctcatccatgggtcagagttgaattcttatgtctatagacttccaatcagaagtctcactggtggggctgggggtggggtcaggcaggaggcatgggatggggaacctgagtaaggtagtgtt

SEQ ID NO: 121931 - DNA, 1534 bp, Homo sapiens
atcatgccactgcactccagcatggattcttgctctgtcgcccaggctagagtgcagtggcgctatcttggcccactgcaacctccatctttgggggtaaagcgattctcctgcctcagcctcccgagtggctgggactgcaggcgcacactgccgtgcctggctaattttttgtgttttagtagagatggggtttcaccgtgttgccccaggctagtgttgaactcctgagctcagacaatccgcttgcctcggcctcccaaagtgctaggattacaggcatgagccaccgcacccggccccggaatctgcatttcaacaagctcttctgatggttcctctgcatctggggagtcgagaagttcttgctgctatgggcctcttgaagtttgctttcgaaccccaatttcagaatctcaacccactcctctgcctcttctagacatagttacttttccttaagtgccacactggcataaaggcgttcgatgttccactatctttcctgcaggtgttcagcacatgatcggtggtttctagggtctgccatgggtcttactaattatttggaaccaaatataacagaaaacaagtttggaattctaaaaaatcccttaaaaacctttttaaaaaatcttggacacagcagctgtgaatggtctgggcctgcctgtgcagttattgctgaaattactggggctgttgagtatttggaaatcaaatcccagaagtgaattggctgtgccaatcagttgtaaaaggatctggccctgggaggtttgatgggtaggggcaaatggggacatgggaagagggtgggaggcttcatgactgcatgaactgagtagaaagatttggccttttgggacagagcatgcaacgggcagctgttcccggtgacctgggcatctgggacttactgagggagagacgtgatcttggcctagctgaccaccatcgaaaccactcatcggaggcgtggatgcagtttgctgggaagatgagcaccgatctgtctggtggtcacatggagggctttgcagatctctgacactggatatttccccttgccctggtgccaaggactaggggagagatcactctgggcttgagtcagggacagggatgccaggcacagcgaaagaagatgactgtggtacaaacccagctgatggaagtgggaaaattaaataaaaggaggaagggaatcaagctggttcatgtaggaagcatgcacacactcatcccatccattgttccacatcgggcacctccctgagctagctgccactcctgctgcactctgccactccttggaaggcagcacagggcagtggttagagccttctctttcagtgtcagacaggcctgggttcatgtccaggtctgccactttacttactagctgtgggatgctgatgagcccaagctctctcctagcctgcttcttgatcagtaaaatgacaatgactagagtacctgtcacttctgagcaactggtacttccagcagcccctcctgctgccccctccat

SEQ ID NO: 121932 - DNA, 1104 bp, Homo sapiens
ccgaaagtaagaagcccaaggataaagaggttggccccggccccagcttttcgtgaggaagcaggagcttaagaagattgttgacccccctgttgtagaaaaagtcttaagaatttgggcatttggacagggacatccagccccaaaagagacctcccccccttttgtgaaaatggccccggctatatcagggtgccagggcaggagagccatcctctataaagcggctgaaaggtcccttctgcgattaccccggtttcacccagggccctgggaccccgcaaaccagctaatccagcttgcttaagctgggcccacaagtacagacccagagacaaagcacagagaagcaaacagagacctgttagccccgggccgagaagaaggctgctgccaaaggggccgtcccccaagaaagagcccaccctgtcctcagagcaggagtttaaccccgtttcaccacccttggtgggagaacaagaaaagctcagcttggtggtgattgccacacgaccgtggatccccatcggagctggttgtcttcttgcctgccctgggtccgtaaaaatgggggtcccttactgcattatcaaggggaaaggcaagactggggacggtctagtccaccagaaggccctgcacccactgtcggccttcacacaaggtgaactcgggaagacaaaggcgcttttggctaaagctggtgggaagctaccagggaccaaattacaatgacagatacgatgaggtaagaggcagctttacccaaaatactgtcattcacaaatctttctcccaaataactggctggcttaacctatgagaagttctatctgacgatcagcttggaacagccaaacagaattaacgcaactaataaccttgaaaatctcagaaaacagtaagccaagctaactgcctctttttgtcttttcagatccgccgtcactggggtggcaatgtcctgggtcctaagtctgtggctcgtatcgccaagctcgaaaaggcaaaggctaaagaacttgccactaaactgggttaaatgtacactgttgagttttctgtacataaaaataattgaaataatacaaattttccttcaaa

SEQ ID NO: 121933 - DNA, 472 bp, Homo sapiens
gcggccgcggagtggcctaccggggaccctcccccagagggaccggcccggggcggggagatgaacggcttcagcacggaggaggacagccgcgaagggccccccgccgccccagctgccgccgccccgggctacggccagagctgctgcctcatcgaggacggcgagcgctgcgtccggcccgcgggcaacgcctccttcagcaagagggtccagaagagcatctcgcagaagaaactcaagctggacatcgacaagagcgttgatctgttccagctgcaggtgaacaccctacgacgttataaacgacactacaagttgcagaccagaccaggcttcaataaggcccagttagcagaaactgtgagtcgacacttcaggaacatacctgtgaatgaaaaagagacccttgcctacttcatctacatggtgaagagtaacaagagtagactggaccagaaatcggagggtg

SEQ ID NO: 121934 - DNA, 794 bp, Homo sapiens
gcggccgcggagtggcctaccggggaccctcccccagaggtaccggcccggggcgggtgagatgaacggcttcagcacggaggaggacagccgcgaagggccccccgccgccccagctgccgccgccccgggctacggccaagagctgctgcctcaatcgaggacggcgagcgctgcgtccggcccgcgggcaacgcctccttcagcaagaggggtcaggaagagcatctcgcagaagaaactcaagctggacatcgacaagagcgtaaggcacctatatattctgtgattttcacaaaaaatttcatccagaagtgtccgaaataaaaggaagaaggaagaccaagtgtacgatgggcgggagaattcttcccgagcacggacactgacattcctgaggttgatcctgttcccagcctgccaggtgaacacccctacggacgttataaacgacactaacaagttgccagacccagacccggcttcaataaggccccagttagcagacaactgtgagtcgacactttcaggaacatacctgtggattgaaaagagacccttgccctactttcatcttccatggtgaagagtaacaagagtagactggaccagaaatccggagggtggcaagcagcttgagtgaggatgaagcacatcttaaaggaatgaagtgtaaatgcttgatgcacaggtgatatctactacatttaagcccataaagactgtttaaatattattgtaaataaaaaagtttgaatgatgaaaaaaaaaaaaaaaaaacctcgtgccgaatt

SEQ ID NO: 121935 - DNA, 2448 bp, Homo sapiens
gggacacgcacatatcaagatttaaaactaaggtctgacacagtcactgaattgatttaaataattaaggcttctaaaaggttcagtgccaaaactctctacatcagtatttgaataaaatacatttctgcattttaggtttgtgctttttacagccatcttaattccacagaatttcattagtagtctcataagggcatgttagaattgtttactgatgttttacttttagtagctgttagactaaataatagcaataaaaattcaatgagtgaaccaatttatttctatcacctgggctgttggctcatttcactttcttttcatgtttaatatggccatttcttttgtacttgccattgaggattccattgtggtaatgtccattaactgtgctatgcttatttctagaccacagacttttgatttttctgtagataaattttgtcacccaagacaagagaaagtataacaaggcagcaccaagcaaaagcacaaaggcaatatccagtaaaaaatactgacaaaaggagatctgatggacagcggcacgtaggtgatgggctccattgtgacgaataatataatctatccaatagatagttcgattgacagggtgaccaggttgatccttgtgaatttccgaaagcttctgagccctctgacggtagctgggattattgataaccttcactagtgcttcatagagctctttttcagtaactgtcttccattctagcaatatccccatgccttttgcctgtactctggtcatagtatcataatggtctccaaagagtggaattcccactacaggcacaccatgatacatagtttcaaaaatactgttcaaaccaccatggctcaggaaggctttaatctttgaatgcccaagcaggtcattttgtggtaaccattctatgagtttagtgttgtttcctagattctttggtttgggtccagaaaacctccaaatcactttttgaggcaatctccccagagctcctgccagtttgttagcaatgtcttctgacagatacttgacaccagctccaaaagacaccaagacaaagccatgttcattagcaccatttacccatctttggagatcttctggtagtgggctggctggtttggttaggattcctcctacataaacaacattaggcagagtgggtcttgggaattccagtgctacgtcagtacacagcatccacaggctggacccatgaaccaaatcatacatggacttctccggcagcaggttgtacttctgcattatcctttcatatttgggaagaaccagaaagctgacccctaatctggaaatgaggtaaacaccggtatttttcatcctttgcagcaagttcatgcggtctgtgaggagtgagttaaactctgggacgtatgctaatggagcaggagcacccacttcagcaggataccaaaggccagttgaaaatacagcatatttaacccctaaaagatgagctatcacaaatccacacatatcattagggtccaccagcagcaggtcaaatttttctttcttcagaccctggatcagggcatggttgccaaccatcaggtcacagttcttagtatagtgatccagtatgtcaaacagttcgattgctgtcaatctcccagagaaaatattccgcatcttggactgtaggaaagcatctgaggtggtactgttaaagatccctgggtagcgctggaggctgtaatgattagatggggcgatgtctctgccttcagagaggaggaacactgtatggtggcctctctcgtgcaaggctgaggctagcgtcttgaaaatgtacatatggctttcaaacataattggcggcacgatgatgattttggcagccttcgctatcccaacagcactccacaggagaatgaaatatggagtgtaagacttcatagctgtaataacaaccagaaaacaacttaaaacaaaatacaatgctcaccattcaaaacaagcaatcacaaagcatttttccccaaaaatatctgatctaatactttgtctaaaaaaaaaaatcatgaacagacacttctcaaaagaagacatttatgcagccaaaaaacacatgaaaaaatgctcaccatcactggccatcagagaaatgcaaatcaaaaccacaatgagatatcatctcacaccagttagaatggcaatcattaaaaagtcaggaaacaacaggtgccggagaggatgtggagaaataggaacacttttacactgttggtgggactgtaaactagttcaaccattgtgcaagtcaatgtggcgattcctcagggatctagaacccagccatcccattactgggtatatacccaaaggactataaatcatgctgctataaagacacatgcacacgtatgtttattgcggcactattcacaatagcaaagacttggaaccaaccc

SEQ ID NO: 121936 - DNA, 1030 bp, Homo sapiens; identical to SEQ ID NO: 121005

SEQ ID NO: 121937 - DNA, 1875 bp, Homo sapiens
atgcagaacaagggaattgatgcaaaaatcctcaataaaatactggcaaaacaaatccagcagcacatcaaaaagcttatgcaccatgatcaagtgggcttcatccctgggatgcaaggctggttcaatatacgcaaatcaataaatgtaatccagcatataaacagagccaaagacaaaaaccacatgattatctcaacagatgcagaaaaagcctttgacaaaattcaacaacccttcatgctaaaaactctcaataaattaggtattgatgggatgtatttcaaaataataagagctgtctatgacaaacccacagccaatatcatactgaatgggcaaaaactggaagcattccctttgaaaactggcacaagacagggatgccctctctcaccactcctattcaacatagtgttggaagttctggccagggcaattaggcaggagaaggaaataaagggtattcaattaggaaaagaggaagtcaaattgtccctgtttgcagacgacatgattgtatgtctagaaaaccccattgtctcagcccaaaatctccttaagctgataagcaacttcagcaaagtctcaggatacaaaatcaatgtacaaaaatcacaagcattcttatacaccaacaacagacaaacagagagccaaatcatgagtgaactcccattcacaattgcttcaaagagaataaaatacctaggaatccaacttacaagggatgtgaacgacctcttcaaggagaactacaaaccactgctcaaggaaataaaagaggatacaaacaaatggaaaaacattccatgctcatgggtaggaagaatcaatatcatgaaaatggccataatgcccaaggtaatttacagattcaatgccatccccataaagctaccaatgactttcttcacagaattggaaaaaactactttaaagttcatatggaaccaaaaaagagcccgcatcaccaagtcaatcctaagccaaaagaacaaagctggaggcatcacactacctgacttcaaactatactacaaggctacagtaaccaaaacagcatggtactggtaccaaaacagagatatagatcaatggaacagaacagagccctcagaaataacaccgcatatctacaactatctgatctttgacaaacctgagaaaaacaagcaatggggaaaggattccctatttaataaatggtgctgggaaaactggctagccatatggagaaagctgaaactggatcccttccttacaccttatgcaaaaatcaattcaagatggattaaagatttaaatgttagacctaaaaccataaaaaccctagaagaaaacctaggcaataccattcaggacataggcatgggcaaggacttcatgtccaaaacaccaaaagcaatggcaacaaaagacaaaattgacaaatgggatctaattaaactaaagagcttctgcacagcaaaagaaactaccatcagagtgaacaggcaacctacaaaatgggagaaaattttcgcaacctactcatctgacaaagggctaatatccagaatctacaatgaactcaaacaaatttacaagaaaaaaacaaacaaccccatcaaaaagtgggcgaaggacatgaacagacacttctcaaaagaagacatttatgcagccaaaaaacacatgaaaaaatgctcatcatcactggccatcagagaaatgcaaatcaaaaccacaatgagataccatctcacaccagttagaatggcaatcattaaaaagacaggaaacaacagcaccacctactggcagagcctaacagggccagccggcaaacaagaaaactgttcacagtcccagccccaagatcccaagtataca

SEQ ID NO: 121938 - DNA, 809 bp, Homo sapiens
agaagtgcttaaaggagctgatggagctgaaagccaaggctcgagaactacgtgaagaatgcagaagcctcaggagccgatgcgatcaactggaagaaagggtatcagtgatggaagatgaaatgaatgaaatgaagcgggaagggaagtttagagaaaaaagaataaaaagaaacgaacaaagcctccaagaaatatgggactatgtgaaaagaccaactctacatctgattgatgtacctgaaacactaaatgcccacaagagaaagcaggaaagatctaaaaccgacaccctaacatcacaattaaaagaactagagaagcaagagcaaacacattcaaaagctagcagaaggcaagaaataactaaaatcagagcagaactgaaggaaatagagacagaaaaaacccttcaaaaaattaatgaatccaggagctggttttttgaaaggatcaacaaaattgatagaccgctagcaagactaataaagaagaaaagagagaagaatcaaatagatgcaataaaaaatgataaaggggatatcaccagcgatcccacagaaatacaaactaccatcagagaatactacaaacacctctacgcaaataaactagaaaatctagaagaaatggataaattcctcgacacatacaccctcccaagactaaaccaggaagaagttgaatctctgaatagaccaataacaggctctgaaattgtggcaataatcaatagcttaccaaccaaaaagagtccaggaccagatggatccacagctgaattctaccagaggtacaaggaggaactg

SEQ ID NO: 121939 - DNA, 2142 bp, Homo sapiens; identical to SEQ ID NO: 118316

SEQ ID NO: 121940 - DNA, 3819 bp, Homo sapiens; identical to SEQ ID NO: 118066

SEQ ID NO: 121941 - DNA, 3570 bp, Homo sapiens; identical to SEQ ID NO: 116242

SEQ ID NO: 121942 - DNA, 1641 bp, Homo sapiens
tctcaataaattaggtattgatgggacgtatctcaaaataataagagctatctatgacaaacccacagccaatatcatactgaatgggcaaaaactggaagcattccctttgaaaactggcacaagacagggatgccctctctcaccgctcctattcaacatagtgttggaagttctggccagggcaatcaggcaggagaaggaaataaagggtattcaattaggaaaagaggaagtcaaattgtccctgtttgcagacgacatgattgtttatctagaaaaccccatcgtctcagcccaaaatctccttaagctgataagcaacttcagcaaagtctcaggatacaaaatcaatgtacaaaaatcacaagcattcttatacaccaacaacagacaaacagagagccaaatcatgggtgaactcccattcacaattgcttcaaagagaataaaatacctaggaatccaacttacaagggatgtgaaggacctcttcaaggagaactacaaaccactgctcaaggaaataaaagaggacacaaacaaatggaagaacattccatgctcatgggtaggaagaatcaatatcgtgaaaatggccatactgcccaaggtaatttacagattcaatgccatccccatcaagctaccaatgactttcttcacagaattggaaaaaactactttaaagttcatatggaaccaaaaaagagcccgcatcgccaagtcaatcctaagccaaaagaacaaagctggaggcatcacactacctgacttcaaacgatactacaaggctacagtaaccaaaacagcatggtactggtaccaaaacagagatatagatcaatggaacagaacagagccctcagaaataatgccgcatatctacaactatcttatctttgacaaacctgagaaaaacaagcaatgggaaaaggattccctatttaataaatggtgctgtgaaaactggctagccatatgtagaaagctgaaactggatcccttccttacaccttatacaaaaatcaattcaagatggattaaagatttaaactttagacctaaaaccataaaaaccctagaagaaaacctaggcattaccattcaggacataggcgtgggcaaggacttcatgtccaaaacaccaaaagcaatggcaacaaaagccaaaattgacaaatgggatctaattaaactaaagagcttctgcacagcaaaagaaactaccatcagagtgaacaggcaacctacaacatgggagaaaattttcgcaacctactcatctgacaaagggctaatatccagaatctacaatgaactcaaacaaatttacaagaaaaaaacaaacaaccccatcaaaaagtgggcgaaggacatgaacagacacttctcaaaagaagacatttatgcagccaaaaaacacatgaagaaatgctcatcatcactggccatcagagaaatgcaaatcaaaaccactatgagatatcatctcacaccagttagaatggcaatcattaaaaagtcaggaaacaacaggtgctggagaggatgtggagaaataggaacacttttacactgttggtgggactgtaaactagttcccgcatattctcactcataggtgggaattgaacaatg

SEQ ID NO: 121943 - DNA, 3465 bp, Homo sapiens
tttgaataaagcatctaagagagaacacttgagttcaacagagaagtcacaggaaatactggagacatggaaggagtacaaagagacttagactcccacacattaataatgggagactttaacaccccactgtcaatattagacagatcaacgagacagaaagtcaacaaggatacccaggaattgaactcagctctgcaccaagcggacctaatcgacatctacagaactctccaccccaaatcgacagaatatacatttttttcagcaccacaccatacctattccaaaattgaccacatacttggaagtaaagctctcctcagcaaatgtaaaagaacagaaattataacaaactgtctctcagaccacagtgcaatcaaactagaactcaggattaagactctcactcaaagccactcaactacatggaaactgaacaacctgctcctgaatgactactgggtacataacgaaatgaaggcagaaataaagatgttctttgaaaccaacgagaacaaagacacaacataccagaatctctgggacgcattcaaagcagtgtgtagagggaaatttatagcactaaatgcccacaagagaaagcaggaaagatccaaaattgacaccctaacatcacaattaaaagaactagaaaagcaagagcaaacacattcaaaagctagcagaaggcaagaaataactaaaatcagagcagaactgaaggaaatagagacacaaaaaacccttcaaaaaatcaatgaatccaggagctggttttttgaaaggatcaacaaaattgatagaccgctagcaagactaataaagaaaaaaagagagaagaatcaaatagacacaataaaaaatgataaaggggatatcaccactgatcccacagaaatacaaactaccatcagagaatactacaaacacctctacgcaaataaactagaaaatctagaagaaatggatacattcctcgacacatacactctcccaagactaaaccaggaagaagtcgaatctctgaatagaccaataacaggagctgaaattgaggcaataatcaatagtttaccaaccaaaaagagtccaggaccagatggattcacagccgaattctaccagaggtacaatgaggagctggtaccattccttctgaaactattccaatcaatagaaaaagagggaatcctccctaactcattttatgaggccagcatcattctgataccaaagccaggcagagacacaaccaaaaaagagaattttagaccaatatccttgatgaacattgatgcaaaaatcctcaataaaatactggcaaaccgaatccagcagcacatcaaaaagcttatccaccatgatcaagtgggcttcatccctgggatgcaaggctggttcaatatacgcaaatcaataaatgtaatccagcatataaacaaagccaaagacaaaaaccacattattatctcaaggaagcattccctttgaaaactggcacaagacagggatgccctctctcaccgctcctattccatagtgttggaagttctggccagggcaatcaggcagaagaaggaaataaagggtattcaattaggaaaagaggaagtcaaattgtccctgtttgcagacgacatgattgtttatctagaaaaccccattgtctcagcccaaaatctccttaagctgataagcaacttcagcaaagtctcaggatacaaaatcaatgtacaaaaatcacaagcattcttatacaccaagaacagacaaacagagagccaaatcatgagtgaactcccattcacaattgcttcaaagagaataaaatacctaggaatccaacttacaagggatgtgaaggacctcttcaaggagaactacaaaccactgctcaaggaaataaaagaggacacaaacaaatggaagaacattccatgctcatgggtaggaagaatcaatatcgtgaaaatggccatactgcccaaggtaatttacagattcaatgccatccccatcaagctaccaatgactttcttcacagaattggaaaaaactactttaaagttcatatggaaccaaaaaagagcccgcatcgccaagtcaatcctaagccaaaagaacaaagttggaggcatcacactacctgacttcaaactatactacaaggctacagtaaccaaaacagcatggtactggtaccaaaacagagttatagatcaatggaacagaaaagagccctcagaaataacaccgcatacctacaactatctgatctttgacaaacctgagaaaaacaagcaatggggaaaggattccctatttaataaatggtgctgggaaaactggctagccatatgtagaaagctgaaactggatcccttccttacaccttatacaaaaatcaattcaagatggattaaagatttaaatgttagacctaaaaccataaaaaccctagaagaaaacctaggcattaccattcaggacataggcatgggcaaggacttcatgtccaaaacaccaaaagcaatggcaacaaaagccaaaattgacaaatgggatctaattaaactaaagagcttctgcacagcaaaagaaactaccatcagagtgaacaggcaacctacaacatgggagaaaattttcacaacctactcatctgacaaagggctaatatccagaatctacaatgaactcaaacaaatttacaagaaaaaaacaaacaaccccatcaaaaagtgggtgaaggacatgaacagacacttctcaaaagaagatatttatgcagccaaaaaacacatgaaaaaatgctcatcatcactggccatcagagaaatgcaaatcaaaagcttccagaggaaggatcaggcagcaatatttgctattctgcagcctccactggtgataaccaggcaaacagggtctggagtggacctgaagcaaactccaacagacctgaagctgagggacctaactgttagaagaaaaatgaacaaacagaaagaaagatagagagaaaccagaggagaagttaaaaattctaaaaaccagagcacctctgctcctccaaaggactgcagttccttggccgatcccaaaaaaatacaaactaccatcagagaatactataaacacctctatccaaataaactagaaaatcaagaagaaatggataaatttctggacacatacaccctcccaagattaaaccaggaagaagttgaatctctgaatagaccaataacaggttctgaaattgaggcaataggaaattatcaaagaaataattgaagaaatttacttccaaagaagtaagttttacttctttgcagaattaaagtcttctgcactgagagcttagcaaaatggataaaatggacccataccaagacattcatcatggaatttcacactattggaaatgcaaagattctgcaggcttcttcgtttacggaagta

SEQ ID NO: 121944 - DNA, 1419 bp, Homo sapiens; identical to SEQ ID NO: 119507

SEQ ID NO: 121945 - DNA, 1935 bp, Homo sapiens; identical to SEQ ID NO: 118420

SEQ ID NO: 121946 - DNA, 3441 bp, Homo sapiens; identical to SEQ ID NO: 118068

SEQ ID NO: 121947 - DNA, 1710 bp, Homo sapiens
atggatgaagctggaaaccatcattctcagcaaactattgcaagaacaaaaaaccaaacgctgcatgttctcactcacagtaaccttaacatctggacgcagacagccccagcaatcctggaggaaaccttggaaatacgcgggtcatcttctatgaagaccacagcagccctgagaaaccaatacagcgttccaatctttaaaagaagtgcaatcaaactagaactcaggattaagaaattcactcaaaaccgctcaactacatggaaactgaacaacctgctgctgaatggctactgggtacataacgaaatgaagggagaaataaagatgttttttgaaaccaacaagaacaaaaacacaacataccagaatctctgggacacattcaaagcagtgtgtagagggaaatttatagcactaaatgcccacaagagaaagcatgaaaggtctaaaattgacaccctaacatcacaattaaaagaactagagaagcaagagcaaacacattcaaaagctagcagaaggcaagaaatgactaagatcagaacagaactgaaggaaatagagacacaaaaaactcttcaaaaaatcaatgaatccaggagctggttttttgaaaagatcaacaaaattgatagaccactagcaagactaataaagaagaaaagagagaagaatcaaatagatgtaataaaaaatgataaaggggatatcaccactgatcccacagaaatacaaactaccatcagagaatactataaacacctctatgcaaataaactagaaaatcaagaagaaatggataaattcctcaacacatacactctcccaagactaaaccaggaagaagttgaatctctgaatagaccaataacaggctctcaaattgaggcaataattaatagcttaccaaccaaaaaaagtccaggaccagatggattcacagccgaattctaccagaggtacaaggaggagctggccacagtaaccaaaacagcatggtactggtaccaaaacagagatatagaccaatggaaaaggacagagctcttagaaataatgccgcacatctacaactatctgatctttgacaaacctgacaaaaagaagaaatggggaaaggattccctatttaataaatggtgttgggaaaactggctagacatatgtagaaagctgaaactggatcccttccttacaccttatacaaaaattaattcaagatggattaaagacttacatgttagacctaaaaccataaaaaccctacaagaaaacctaggcaataccattcaggacataggcgtgggcaaggacttcatgtctaaaacaccaaaagcaatggcaacaaaagccaaaattgacaaatgggatctaatcagactaaagagcttctgcacagcaaaagaaaccaccatcagagtgaacaggcaacctacagaatggaagaaaatttttgcaacctactcatctgacaaagggctagggctaatatccagaatctacaatgaactccaacaaatttacaggaaaaaaacaaacaaccccatcaaaaagtgggtgaaggatatgaacagacacttctcaaaagaagacatttatgcagccaaaaaacacatgggaaaaatgctcatcatcactggccatcagagaaatgcaaatcaaaaccacaatgagataccatccatctcacaccagttagaatga

SEQ ID NO: 121948 - DNA, 2265 bp, Homo sapiens; identical to SEQ ID NO: 116371

SEQ ID NO: 121949 - DNA, 2142 bp, Homo sapiens
atgggagactttaacaccccactgtcaacattagacagatcaacgagacagaaagttaacaaggatatccaggaattcaactcagctctgcaccaagcggacctaatagacatctacagaactctccaccccaaatcaacagaatatacattcttttcagcaccacaccacacctattccaaaactgaccacatagttggaagtaaagccctcctcagcaaatgtaaaagaacagaaattataacaaactgtctctcagaccacagtgcaatcaaactagaactcaggattaagaaactcactcaaaaccgctcaactacatggaaactgaacaacctgctcctgaatgactactgggtacataacaaaatgaaggcagaaataaagatgttctttgaaaccaatgagaacaaagacacaacataccagaatctctgggacacattcaaagcagtgtgtagagggaaatttatagcactaaatgcccacaagagaaagcagggaagatctaaaattgacaccctaacatcacaattaaaagaactagaaaagcaagagcaaacacattcaaaagctagcagaaggcaagaaataactaagatcagagcagaactgaaggaaatagagacacaaaaaaaccttcaaaaaatcaatgaatccaggggctggttttttgaaaagatcaacaaaattgatagactgctagcaagactaataaagaagaaaagagagaagaatcaaatagatgcaataaaaaatgataaaggggatatcaccaccaatcccacagaaatacaaactaccatcagagaatactataaacacctctacgcaaataaactagaaaatctagaagaaatggataaattcctggacacatacaccctcccaagactaaaccaggaagaagttgaatctctgaatagaccaataacaggctctgaaatcgaggcaataattaatagcttaccaaccaaaaaaagtccaggaccagatggattcacagccgaattctaccagaggtacaaggaggagctgaaaataaaatacctaggaatccaacttacaagggacgtgaaggacctcttcaaggagaacaacaaaccactgctctatgaaataaaagaggatacaaacaaatggaagaacattccatgctcatgggtaggaagaatcaatattgtgaaaatggccatactgcccaaggaaatttacagattcaatgccatccccatcaagctaccaatgactttcttcacagaattggaaaaaactactttaaagttcatatggaaccaaaaaagagcccacattgccaagtcaatcctaagccaaaagaacaaagctggaggtatcacactacctgacttcaaactatactacaaggctacagtaaccaaaacagcatggaatatggatgaagctggaaaccatcattctgagcaaactatcgcaaggatagaaaaccaaacaccgcatgttctcactcacaggtgggaatttaacaatgagaacacttggacacaggctgctgccctcgctaccgcaccgacttcgcccgtgtgctcgcctgcacttgcgctgcccgccatggccaccgcccagccgtcgcaggtgcgccagaagtacgacaccaactgcgacgccgccatcaacagccacatcacgctggagctctacacctcctacctgtacctgtctatggccttctacttcaaccgggacgacgtggccctggagaacttcttccgctacttcctgcgcctgtcggacgacaaaatggagcatgcccagaagctgatgaggctgcagaacctgcgcggtggccacatctgccttcacgatatcaggaagccagagtgccaaggctgggagagcgggctcgtggccatggagtccgccttccacctggagaagaacgtcaaccagagcctgctggatctgtaccagctggccgtggagaagggcgacccccagctgtgccacttcctggagagccactacctgcacgagcaagtcaagaccatcaaagagctgggtggctacgtgagcaacctgcgcaagatttgttccccggaagccggcctggctgagtacctgttcgacaagctcaccctgggcggccgcgtcaaagagacttga

SEQ ID NO: 121950 - DNA, 1794 bp, Homo sapiens
atggggaaaaaacagaacagaaaaactggaaactctaaaatgcagagcgcctctcctcctccaaaggaatgcagttcctcaccagcaatggaacaaagctggatggagaatgactttgacgagctgagagaagaaggcttcagactatcaaattactctgagctacaggaggacattcaaaccaaaggcaaagaagttgaaaactttgaaagaaatttagaagaatgtataagtagaataaccaatacagagaagtgcttaaaggagctgatggagctgaaaaccaaggctcgagaactacgtgaagaatgcagaagcctcaggagccgatgcgatcaactggaagaaagggtatcagcgatggaagacgaaatgaatgaaatgaaactaaaccaggaagaagttgaatctctgaatagaccaataacgggagctgaaattgtggcaataatcaatagtttaccaaccaaaaagagtccaggaccagatggattcacagccgaattctaccagaggtacaaggaggaacagctgataagcaacttcagcaaagtctcaggatacaaaatcaatgtacaaaaatcacaagcattcttatacaccaacaacagccaaacagagagccaaatcatgagtgaactcccattcacaattgcttcaaagagaataaaatacctaggaatccaacttacaagggatgtgaaggacctcttcaaggagaactacaaaccactgctcaaggaaataaaagaggatacaaagaaatggaagaacattccatgctcatgggtaggaagaatcaatatcgtgaaaatggccatactgcgcaaggtaatttacagattcaatgccatccccatcaagctaccaatgactttcttcacagaattggaaaaaactactttaaagttcatatggaaccaaaaaagagcccccgtcgccaaggcaatcctaagccaaaagaacaaagctggaggcatcacactacctgacttcaaactatactacaaggctacagtaaccaaaacagcatggtactggtaccaaaacagagatataggtcaatggaacagaacagagccctcagaaataacaccgcatgtctacaactatctgatctttgacaaacctgagaaaaccaagcaatggggaaaggattccctatttaataaatggtgctgggaaaactggctagccatatgtagaaagctgaaactggatcccttccttacaccttatacaaaaatcaattcaagatggattaaagacttaaacgttagacctaaaaccataaaaaccctagaagaaaacctaggcattaccattcaggacataggcatgggcaaggacttcatgtctaaaacaccaaaagcaatggcaacaaaagacaaaattgacaaatgggatctaattaaactaaagagcttctgcacagcaaaagaaactaccatcagagtgaacaggcaacctacggaatgggagaaaacttttgcaacctactcatctgacaaagggctaatatccagaatctacaatgaactcaaactaatttacaagaaaaaaacaaacaaccccatcaaaaagtgggcgaaggacatgaacagacacttctcaaaagaagacatttatgcagccaaaaaacacatgaaaaaatgctcatcatcactggccatcagagaaatgcaaatcaaaaccacagtgagataccatctcacaccagttagaatggcgatcattaaaaagtcaggaaacaacagggacatggatgaagttggaaatcatcattctcagtaa

SEQ ID NO: 121951 - DNA, 1881 bp, Homo sapiens
atgagtgaactcccattcacaattgcttcaaagagaacaaaatacctaggaatccaacttacaagggatgtgaaggacctcttcaaggagaactacaaaccactgctcaaggaaataaaagaggatacaaacaaatggaagaacattccatgctcatgggtaggaagaatcaatatcatgaaaatggccacactgcccaacgtactttatagattcaatgccatccccatcaagctaccagtgactttcttcacagaattggaaaaatctactttaaagttcatatggaaccaaaaaagagcccgcatcgccaagtcaatcctaagccaaaagaacaaagctggaggcatcacgctacctgacttcaaactatactacaaggctacagtaaccaaaacagcatggtactggtaccaaaacagagatatagatcaatggaacagaacagagccctcagaaataacgccgcatatctacaactacctgatcgttgacaaacctgagaaacacaagcaatggggaaaggattccctatttaataaatggtgctgggaaaactggctagctatatgtaggaagctgaaaccggatcccttccttacaccttatacaaaaattaattcaagatggattaaagacttaaacgttagacctaaaaccataaaaaccctagaagaaaacctaggtattaccattcaggacataggcatgggcaaggacttcatgtctaaaacaccaaaagcaatggcaacaaaagccaaaattgacaaatgggatctaattaaactaaagagcttctacacagcaaaagaaactaccatcagagtgaacaggcaacctacaaaatgggagaacattttcgcaacctactcatctgacaaagggctaatatccagaatctacaaagaactcaaacaaatttacaagaaaaaaacaaacaaccccatcaaaaagtgggcaaaggacatgaacagacacttctcaaaagaagacatttatgcagccaagaaacacatgaaaaaatgctcatcatcactggccatcagagaaatgcaaatcaaaaccacaacgagatatcatctcacaccacttagaatggcaatcattaaaaagtcaggaaacaacaggattcaaggctggttcaacataagcaaatcaataaacgtaacccatcacacaaacagaaccaaaaacaaaaaccacatgattatctcaatagatgcagaaaaggccttcaataaaattcaataccccttcatgctaaaaactctcaataaattaggtgttgatggaacatatctcaaaacagtaacagctatttatgacaaacccacagtcaatatcatactgaatgggcaaaagctggaagcattccctttgcaaaccagcacaagacaaggatgctctctctcaccactcctattcaacactgtattggaagttctagccagggcaatcaggcaagagaaagaaataaaaggtattcaaataggaggagaggaagtcaaattgtctctgtttgcagatgacatgactgtatatttacaaaaccctatcatctcagcccaaaatctccttaagctgataagcaacatcagcaaggtctcaggatacaaaatcaatgtacaaaaatcacaagcattcttatacaccaataacagacaaacagagagacaaattatgagtgaactcccattcacaattgcttcaaagcgaagaaaatacctaggaatccaacttacaagggatgtgaaggacctcttgaaggagaactacaaaccactgctcaaggaaataagagaggacacaaacaaatggaaaaacattccatattcatggataggaagaatcaatatcgtgaaaatggccatactgccctaa

SEQ ID NO: 121952 - DNA, 2094 bp, Homo sapiens; identical to SEQ ID NO: 120831

SEQ ID NO: 121953 - DNA, 2283 bp, Homo sapiens
atgattatctcaatagatgcagaaaaggcctttgacaaaattcaacaacccttcatgctaaaaactctcaataaattaggtatcgatgggacatatttcaaaataataagagctaactatgacaaacccacagccaatatcatactgaatgggcaaaaactggaagcactccctttgaaaaatggcacaagacagggatgccctctctcaccactcctattcaacacagtgttagaagttctggccagggcaattaggcaggagaaggaaataaagggtattcaattaggaaatgtggaagtcaaattgtccctgtttgcagacgacatgattgtatatctagaaaaccccattgtctcagcccaaaatctccttaagctgataagcaaattcagcaaagtctcaggatacaaaatcaatgtacaaaaatcacaagcattcttatacacaaacaacagacaaacagagagccaaatcatgagtgaactcccattcacaattgcttcaaagagaataaaatacctaggaatccaacttacaagggatgtgaaggacctcttcaaggagaactacaaaccactgcttaaggaaataaaagaggatacaaacaaatggaagaacattccatgctcatgggtaggaagaatcaatatcatgaaaatggccatactgcccaaggtaatttacagattcaatgccatccccatcaagctaccaatgcctttcttcacagaattggaaaaaactactttaaagttcatatggaaccaaaaaagagcccgcatcgccaagtcaatcctaagccaaaagaacaaagctggaggcatcacaccacctgacttcaaactatactacaaggctacagtaaccaaaacagcatggtgctggtaccaaaacagagatatagaccaatggaacagaacagagccctcagaaataacgccgcatatctacaactatctgatctttgacaaacctgagaaagacaagcaatggggaaaggattccctatttaataaacggtgctgggaaaactggctagccatatgtagaaagctgaaactggatccgttccttacaccttatacaaaaatcaattcaagatggattaaagacttaaaggttagacctaaaaccataaaaaccctacaagaaaacctaggctttaccattcaggacataggcatgggcaaggacttcatgtctaaaacaccaacagcaatgggaacaaaagacaaaattgacaaatgggatctaattaaactaaagagcttctgcacagcaaaagaaactaccatcagagtgaacaggcaacctacaaaatgggagaaaattttcacaacctactcatctgacaatgggctaatatccagaatctacaatgaactcaaacaaatttacaagaaaaaaacaaacaaccccatcaaacagtgggcaaaggacatgaacagacacttctcaatagaagacatttatgcagccaaaaaacacatgaaaaaatgttcatcgtcactggccatcagagaaatgcaaatcaaaaccacaatgagataccatctcacaccagttagaatggcaatcattaaaaagtcaggaaacaacagaaatcatcttgacttcaagcacattagaattctcggtatttgttatctggctagaagatttatcagccatgactacatctggtttcaagaaacagaaaacctgaaaaactatcgcctaaacaagcagcaggttttccttatcgttagtctacttgccctgaaagtagtacagatatgtaaatacctgagaggacctgcttatggcactgttagtagaccacagttgctgaaaatttccatttacagaataaacagcatagagaagaccttaaatgacctgatggagctgaaaaccatggtacgagaaatacgtgacgcatgcacaagcttcagtagccaattcaatcaagtggaagaaaggaaccaaagacaaattgtctcagtagatgaagaaaaagcctttgataaaattcaacagcgcttcatgctaaaaacgctcaataaactagaccctagcgagcggagacacaagcagctgggcgtcaagagaaacacaccagccgaagaacacacaagtggccgggcgtcgagaggaacacatcggtggaagagcacagcgacaggcgccggcagactgcggcaggccatcgaccggtggaacgacgcggggattgaccgaggcggactccggggggacaaccagccccttctggcctccccagccaccaccactcaatag

SEQ ID NO: 121954 - DNA, 2709 bp, Homo sapiens
atgggagactttaacaccccactgtcaacattagacagatcaacgagacagaaagtcaacaaggatacccaggaattgaactcagctctgcaccaaccagacctaatagacatctacggaactctccaccccaaatcaacagaatatacatttttttcagcaccacaccacacctattccaaaattgaccacatacttggaagtaaagctctcctcagcaaatgtaaaagaacagaaattataacaagctatctctcagaccacagtgcaatcaaactagaactcaggattcagaatctcactcaaaaccactcaactacatggaaactgaacaacctgctcctgaatgactactggttacataacgaaatgaaggcagaaataaagatgttctttgaaaccaacgagaacaaagacacaacataccagaatctctgggatgccttcaaagcagtgtgtagagggaaatttatagcactaaatgcccacaagagaaagcaggaaagatccaaaactaacaccctaacatcgatcaacaaaattgatagaccactagcaaggctaataaagaaaaaaagagagaagactcaaatagatgcaataaaaaatgataaaggggatatcaccaccgatcccacagaaatgcaaactaccatcagagaatactacaaacacctctatgcaaataaactagaaaatctagaagaaatggataaattcctcaacacatacactctcccaagactaaaccaggaagaagttgaatctctgaatagaccaataacaggagctgaaattgtggcaataatcaatagcttaccaaccaaaaagagtccaggaccagatggattcacagccgaattctaccagagttgcttcaaagagaataaaatacctaggaatccaacttacaaggatgtgaaggacctcttcaaggagaactacaaaccactgctcaatgaaataaaagaggatacaaacaaatggaagaacattccatgctcatggataggaagaatcaatatcgtgaaaatggccatactgcccaaggtaatttacagattcaatgccatccccataaagctaccaatgactttcttcacagaagtggaaaaaactactttaaagttcatatggaaccaaaaaagagcccgcatcgccaagtcaatcctaagccaaaagaacaaagctggaggcatcatgctatctgacttcaaactatactacaaggctacagtaaccaaaacagcatggtactggtaccaaaacagagatatagatcaatggaaaagaacagagccctcagaaataatgccgcatatctacaactatctaatctttgacaaacctgagaaaaacaagcaatggggaaaggattccttatttaataaatggtgctgggaaaactggctagccatatgtagaaagctgaaactggatcccttccttacaccttatacaaaaatcaattcaagatggattaaagacttaaacattagacctaaaaccataaaaaccctagaagaaaacctaggcattaccattcaggacataggcacgggcaaggacttcatgtctaaaacaccaaaagcaatggcaacaaaagccaaaattgacaaatgggatctaattaaactaaagaacttctgcacagcaaaagaaactaccatcagagtgaacaggcaacctacaaattgggagaaaatttttgcaacctacccatctgaccaagggctaataaccagaatctacaatgaactcaaacaaatttacaagaaaaaaacaaacaaccccatcaaaaagtgggcaaaggacatgaacagacacttctcaaaagaagacatttatgcagccaaaaaacacatgaaaaaatgctcagcatcactggccatcagagaaatgcaaatcaaaaccacaatgagataccatctcacaccagttagaatggcaatcattaaaaagtcaggaaataacaggtcctcaatggattggatgatgtccagctgtttaggtgaaataaacagccatgttgctcacacaaagcctgtttggtggtctcttcatacagacgtgcatgaagtttggtgtcgtgactcggattgggggacctcccttgggagatcaatcccccgtcctcctgctctttgctccgtgagaaagatccgcctacgacctcaggtcctcagacctaccagcccaagaaacatctcaccaatttcaaatccgcatgctttgaaaggattaaagcctgttatcactcgcctgctaaagcatggccttttaaagcctataaactctccttacaattcccccattttacctgtcttaaaaccagacaagccttacaagttagttcaggatctatgccttatcaaccaaatggttttgcctatccaccccatggtgccaaacccatatactctcctatcctcaatacctccctccacaatccattattctgttctggatctcaaacgtgctttctttactattcctttgcacccgtcatcccagcctctcttcgctttcacttgcactgaccctgacacccatcaggctcagcaaattacctgggctgcactgccgcaaggcttcacagacaacccccattacttcagtcaagcccaaatttcatcctcatctgttacctatctcaacataattctcgtaaaaacacacgtgctgtccctgctgatcatgtccagctga

SEQ ID NO: 121955 - DNA, 1593 bp, Homo sapiens
atggggaaaaagcagaacagaaaaactggaaactctaaaaagcagagcacctctcctcctccaaaggaacgcagttcctcaccagcaatggaacaaagctggatggagaatgactttgttgagctgagagaagaaggcttcagacgatcaaattactctgagctacaggaggacattcaaaccaaaggcaaagaagttgaaaactttgaaaaaaatttagaagaatgtatgactagaataaccaatacagagaagtgcttaaaggagctgatggagctgaaaaccaaggctcgagaactacatgaagaatgtagaagcctcaggagccgatgcgatcaactggaagaaagggtatcagcaatggaagatgaaatgaatgaaatgaagcgagaagggaagtttagagaaaaaagaataaaaagaaatgagcaaagcctccaagaaatatgggactatgtgaaaagaccaaatctacatctgatgggtgtacctgaaagtgatggggagaatggaagcaagttggaaaacacgctgcaggatattatccaggagaacttccccaatctagcaaggatcaacaaaattgatagaccgctagcaagactaataaagaagaaaagagagaagaatcaaatagacacaataaaaaatgataaaggggatatcaccaccaatcccacagaaatacaaaccaccatcagagaatactacaaacacctctacgcaaataaactagaaaatctagaagaaatggatacattcctggacacatacactctcccaagactaaaccaggaagaagttgaatctctgaatagaccaataacaggagctgaaattgtggcaataatcaatagcttaccaaccaaaaagagtccaggaccagatggatccatagctgaattctaccagaggtacaaggaggaactgctgataagcaacttcagcaaagtctcagcatacaaaatcaatgtacaaaaatcacaagcattcttatacaccaacaacagacaaacagagagccaaatcatgagtgaactcccattcacaattgcttcaaagagaataaaatacctaggaatccaacttacaagggatgtgaaggacttcttccaggagaattacaaaccactgctcaaggaaataaaagaggatacaaacaaacggaagaacattccatgctcatgggtaggaagaatcaatatcgtgaaaatggccatactgcccaaggtaatttttagattcaatgccatccccatcaagctaccaatgcctttcttcacagaattggaaaaaactactttaaagttcatatggaaccaaaaaagagcccgcatcgccaagtcaatcctaagccaaaagaacaaagctggaggcatcacactacctgacttcaaactatactacaaggctacagtaaccaaaacagcatggtactggtaccaaaacagggatatagatcaatggaacagaacagagccctcagaaataatgccgcatatctacaactatctgatctttgacaaacctgagaaaaacacgcaatggggaaaggttccctatttaataaatggtgctgggaaaactggctag

SEQ ID NO: 121956 - DNA, 2337 bp, Homo sapiens; identical to SEQ ID NO: 116373

SEQ ID NO: 121957 - DNA, 1677 bp, Homo sapiens
atgggagactttaacaccctactgtcaatattagacagatcaacaagacagaaggttaacaaggatatccaggacttgaactcagctctgcaccaagcagacctaatagacatctacagaaccctccaccccaaatcaacagaatatacattcttctcagcaccacatcgcacttattccgaaattgaccacatagttggaagtaaagcactcctcaccaaatgtaaaagaacagaaatcacagcaaactgtctctcagaccacagtgcaatcaaattagaactcaggattaagaaactccctcaaaaccacacaactacatggaaactgaacaacctgctcctgaatgactactgggtaaataacaaaatgaaggcagaaataaagatgttctttgaaaccaatgagaacaaagacacaatgtaccagcatctctgggacacatttaaagcagtgtgtagagtgttggaaattctggccagggcaatcaggcaagagaaagaaataaagggtattcaattaggaaaagaggaagtcaaattatccctgtttgcagatgacatgattgtatatttagaaaaccccaacgtctcagcccaaaatctccttaagctgataagcaacttcagcaaagtctcaggatacaaaatcagtgtgcaaaaatcacaagcattcctatacacaaataacagaaaaacagagagccaaatcacgagtgaactcccattcacaattgctacaaagagaataaaatacctaggaatgcaacttacaagggatgtgaaggacctcttcaaggagaactacaaaccactgctcaacaaaataaaggaggtcacaaacaaatggaagaacattccctgctcatggatgggaagaatcaatatcgtgaaaatggccatactgcccaagataatttacagattcaatgccattcccatcaagctgccaatgattttcttcacagaattggaaaaaactactttaaagttcatatggaaccaaaaaagagcccacataaccaagacaatcctaagcaaaaagaacaaagctggaggcatcacgctacctcacttcaaactatactacaagactacagcaaccaaaacagcatggtactggtaccaaaacagagatatagaccaagggaacagaacagaggcctcagaaatgacaccacacatctacaaccatctgatccttgacaaacctgacaaaaacaagaaatggggaaaggattccctatttaataaatggtgctgggaaaactggctagccatatgtagaaagctgaaactggatcccttccttacgccttatacaaaaattaattcaagatggattaaagacttaaatgatagacctaaaaccataaaagccctagaagaaaacctaggcaataccattcaggacataggcatgggcaaggacttcaagactaaagcaccaaaagcaatggcaacaaaagccaaaattgacaaatgggatctaattaaacaaaagagcttctgcacagcaaaagaaactaccatcagagtgaacaggcaacctacagaatgggagaaaaattttgcaatctacccatctcacaaaaggctaatatccagaatctttaaagaacttaaacaaatttacatgaaaaaaacaaccccatcaaaaagtgggcaaaggatatga

SEQ ID NO: 121958 - DNA, 1722 bp, Homo sapiens
atggccgggtacccctctgagatgaagcttccagaggaactatcaggcagcaacatttgctgttcagcagtattcactgttctgcagcctctgctgctgatacccaggcaaacagggtctggagtggacctccggcaaactccaacagacctgcagctgagggtcctgactgttagaaggaaaaataacaaacagaaaaggacatctacaccaaaaccccatctgtacgtcaccatcatcaaagaccaaaggagtaagaaactcactcaaaaccactcaactacatggaaactgaacaacctgctcctgaatgactactgggtaaataacgaaatgaaggcagaaataaagatgttctttgaaaccagtgagaacaaaggcacaatataccagaatctctgggacacatttaaagcagtgtgtagagggaaatttatagcactaaatgcccacaagagaaaacaggaaagatctaaaattgacaccctaacatcacaattaaaagaactagagaagcaagagcaaacacattcaaaagctagcagaaggcaagaaataactaagatcagagcagaacagaaggagatagagacccaaaaaacccttcaaaaaatcaatgaatccaggagctgcttttttgaaaagatcaacaaaattgatagactgctagcaagacgaataaagaagaaaagagagaagaatcaaatagatgcaataaaaaatgataaaggggatatcaccgccgatcccacagaaatacaaagtaccatcagagaatactataaacacctctacacaaataaactagaaaatctagaagaaatggataaattcctggacacatacaccctcccaagactaaaccaggaggaagatgaatccctgaatagaccaataacaggctctgaaattgaggcaataattaatagcttaccagcgaaaaaaagtccaggaccagacagattcacagccgaattctaccagaggtacaaggaggagctgcacataaacaggaccaaagacaaaaaccacatgactatctcagtagatgcagaaaacgcctttgacaaaattcaacaacccttcatgctaaaaactctcaataaattagtgttggaagttctggccagggcaatcaggcaggagaaggaaataaagggtattcaattaggaaaacaggaagtcaaattgtccctgtttgcagatgacgtgattgtatatctagaaaaccccatcgtctcagcccaaaatctccttaagctgataagcaacttcagcaaagtctcaggatacaaaatcaatgtgcagaaatcacaggcattcctatacagcaataacaggcaaacagagagccaaatcatgaatgaactctcattcacaattgcttcaaagagaataaaatacctaggaatccaacttacaagggatgtgaaggacctcttcaaggagaactacaaaccactactcaatgaaataaaagatgatacaaacaaatggaagaacattccatgctcatgggtaggaagaatcaatattgtgaaaatgggcatactgcccaaggtagtttatagattcaatgccatccccatcaagctaccaatgactttcttcacagaattggaaaaaaactactttaaagttcatatggaaccaaaaaagagcccgcattgccatgacaatcctaagctaaaagaacaaagctggaggcatcacgctacctga

SEQ ID NO: 121959 - DNA, 2313 bp, Homo sapiens
atgaacatcgatgcaaaaatcctcaataaaatactggcaaaccgaatccagcagcacatcaaaaagcttatccaccatgatcaagtgggcttcatccctgggatgcaaggctggttcaacatacgaaaatcaataaacatagtccagcatataaacagaaccaatgacaaaaaccacatgattatctcaatagatgcagaaaaggcctttgacaaaattcaacaacgcttcatgctaaaaactctcaataaattaggtattgatgggacgtatctcaaaataataagagctatctatgacaaatccacagccaatattgtactgaatgggcaaaaactggaagcattccctttgaaaactggcacaagacagggatgccctctctcaccacttctattcaacatagtgttggaagttctggccagggcaatcaggcaggagaaggaaataaagggtattcaattacgaaaagaggaaatcaaattgtccctgtttgcagatgacatgattgtacatctagaaaaccccattgtctcagcccaaaatctccttaagctgatagacaatttcagcaaagtctcaggatacaaaatcaatgtgcaaaaatcacaagcattcttatacaccaataacagacaaacagagagccaaatcatgagtgaactcccattcacaattgcttcagagagaataaaatacctaggaatacaacttacaagggacgtgaaggacctcttcaaggagaactacaaaccactgctcaatgacataaaagaggatacaaacaaatggaagaacactccacgctcatgggtaggaagaatcaatatcatgaaaatggccatactgcccaaggtaatttatagattcaatgccatccccatcaagctaccaatgactttcttcacagaattggaaaaaactactttaaagttcatatggaaccaaaaaggagcccgcattgccaagtcaatcctaatttatagattcaatgcccaagaattggaaaaaactactttaaagttcatatggaaccaaaaaggagcccgcattgccaagtcaatcctaagccaaaagaacaaagctggaggcatcacgctacctgacttcaaactatactacaaggctacagtaatcaaaacagcatggtactggtaccaaaacagagatatagaccaatggaacagaacagagccctcagaaataatgccacatatctacaaccatctgatctttgacaaacctgacaaaaacaagaaatggggaaatgattccctatttaataaatggtgctgggaaaactggctagccatatgtagaaagctgaaactggatcccttccttataccttatacaaaaattaattcaagatggattaaagacttaaatgttagacctaaaaccataaaaaccctagaagaaaacctaggcaataccattcaggacatagccatgggcaaggactttatgtctaaaacaccaaaagcaatggcaacaaaagccaaaattgacaaatgggatctaattaatctaaagagcttctgcacagcaaaagaaaccaccatcagagtgaacaggcaacctatagaatgggagaaaatttttgcaatctactcatctgacaaagggcgaatatccagaatctacaatgaactcaaacaaatttacaagaaaaaaacaaacaaccccatcaaaaagtgggcaaaggatatgaacagacacttctcaaaagaagacatttatgcagccaaaagacacatgaaaaaatgctcatcatcactggccattagagaaatgcatatcaaaaccacaatgagacaccatctcacatcagttagaatggcgatcattaaaaagttaggaaacgactggtgctggaggggatgtggagaaataggaagacttttacactgttggtgggactgtaaactagttcaaccattgtggaagtcagtgtggcgattcctcagggatctagaactagaaacaccatttgacccagccagcccattactgggtatacacccaaaggattatagatcatgctgctataaagacacatgcacacgtatgtttactgcagcactattcacaatagcaaagacttggaaccaacccaaatgtccatcaatgatagactggattaagaaaatgtggcacatatacaccatggaatactatgcagccataaaaaaggatgagttcatgtcctttgcagggacatggataaagctggaaaccatcattctcagcaaactatcgcaaggacaaaaaaccaaacaccacatgttctcactcatagatgggaattga

SEQ ID NO: 121960 - DNA, 791 bp, Homo sapiens
ttattagacagtctacatactttattgaaagtcacatgaatgagccccaggatctcgtttgttttattatttggatatagcatatgtctttcacacaggcaatctttctagccctctactaatgtccttggcatcaagtgcttcatttcccccaggaaaatgaaggcttttctttatcgaaaacttatctttaaggtatcttgtccttcgcgaaggacatgaacagacacttctcaaaagaagacatttatgcagccaaaaaacacatgaagaaatgctcatcatcactggccatcagagaaatgcaaatcaaaaccactatgagatatcatctcacaccagttagaatggcaatcattaaaaagtcaggaaacaacaggtgctggagaggatgcggagaaataggaacacttttacactgttggttggactgtaaactagttcaaccattgtggaagtcagtgtggcgattcctcagggatctagaactagaaataccatttgacccagccatcccattactgggtatatacccaaatgagtataaatcatgctgctataaagacacatgcacacgtatgtttattgcggcactattcacaatagccaagacttgtgaaccacccaaatgttccaacatgatagactggattaagaaatgtggcacaatacaccagggatactatgcggcctaaaaatgatgaggtccaatccttggtagggcatgggtgaattgggaaaccaccttctcagtaactatcgcggtacaaaaaccaacacggctttctcac

SEQ ID NO: 121961 - DNA, 987 bp, Homo sapiens
atgttctttgaaaccaacgagaacaaacacacaacataccagaatctctgggacgcattcaaagcagtgtgtagagggaaatttatagcactaaatgcccacaagagaaagcaggaaagatccaaaattgacaccctaacatcacaattaaaagaactagaaaagcaagagcaaacacattcaaaagctagcagaaggcaagaaataactaaaatcagagcagaactgaaggaaatagagacacaaaaaacccttcaaaaaattaatgaatccaggagctggttttttgaaaggatcaacaaaattgatagaccgctagcaagactaataaagaaaaaaagagagaagaatcaaatagatgcaataaaaaatgataaaggggatatcaccaccgatccaacagaaatccaaactaccatcagagaatactacaaacacctctgcgcaaataaactagaaaatctagaagaaatggataaattcctcgacacctacactctcccaagactaaaccaggaagaagttgaatctctgaatagaccaataacaggatctgaaattgtggcaataatcaatagcttaccaactaaaaagagtccaggaccagatggattcacagccgaattctaccagaggaatccaacttacaagggatgtgaaggaactcgtcaaggagaactacaaatcactgctcaaggaaataaaagaggttacaaacaaatggaagaacattccatgctcatgggtaggaagaatcaatatcatgaaaatggccatacggcccaaggaatccaacttacaagggacgtgaaggaccccttcaaggagaactacaaaccactgctcaatgaaataaaaggatacaaacaaatggaagaacattccatgctcatgggtaggaagaatcaatatcatgaaaatggccatactgcccaagatgccttggcggctaatcaacaaaagccattgaaagacttaatcctctaa

SEQ ID NO: 121962 - DNA, 2079 bp, Homo sapiens
atgggagactttaacaccccactgtcaacattagacagaccaacgagacagaaagttaacaaggatatccaggaactgaactcagctctgcaccaagcggacctaatagacatctacagaactctccaccccaaatcaacagaatatacattttttttggcaccacaccacacctattccaaaattgaccacatacttggaagtaaagctctcctcagcaaatgtaaaagaacagaaattataacaaactatctctcagaccacagtgcaatcaaactagaactcaggattaagaaactcactcaaaaccgctcaactaaatggaaactgaacaacctgctcctgaatgactactgggtacataatgaaataaaggcagaaataaagatgttctttggaaaaaatgagaacaaagacacaacataccagaatctctgggacacattcaaagcagtgtgtagagggaaatttatagcactaaatgcccacaagagaaagcaggaaagatctaaaattgacaccctaacatcacaattaaatgaactagaaaagcaagagcaaacacattcaaaagctagcagaaggcaagaaataactaagatcagagcagaacagaaagaaatggagacacaaaaagcccttcaaaaaatcaatgaagccaggagctggttttttgaaaagatcaacaaaattgatagactcctagcacgactaataaagaagaaaagagagaagaatcaaatagacacaattaaaaatgataaaggggatatcaccactgatcccacagaaatacaaactaccatcagagaatactacaaacacctctatgcaaataaactagaaaatccggaagaaatggataaattccttgacacatacactctcccaagactaaaccaggaagaagttgaatctctgaatagaccaataacaggatctgaaattgaggcaataattaatagcttaccaaccaaaaaaagtccaggaacagatggattcacagccgaattctaccagaggtacaaggaggagctagtaccattccttttgaaacgattccaatcaatagaaaaagagggaatcctccctaactcattttatgaggccagcatcatcctgataccaaagcatggcagagacacaacaaaaaaagagaattttagaccaatatacctgatgaacatcgatgcaaaaatcctcaataaaatactggcaaaccgaatccagcagcacatcaaaaagcttatccactatgatcaagtgggcttcatccctgggatgcaaggcagggcaatcaggcaggagaaggaaataaagggtattcaattaggaaaagaggaagtcaaattgtccctgtttgcagatgacatgattgtgtatctagaaaaccccatcgtctcagcccaaaatctccttaagctgataagcaacttcagcaaagtctcaggatacaaaatcaatgtgcaaaaaccacaagcattcttatacaccaataacagacaaacagagagccaaatcatgagtgaactcccattcacaattgcttcaaagagaataaaaaacctaggaatccaacttacaagggatgtgaaggacctcttcaaggagaactacaaaccactgctcaatgaaataaaagaggatacaaacaaatggaagaacattccatgctcatgggtaggaagaatcaatatcatgaaaatggtcatactgcccaaggggcttgctcctgcagacaaactgggagccgttctaaaggagagggtcacatttccaacacagctaataaagtggcatgcccaggatgcaggaaagggggcacagtgtgactgcggagtggtgatctgcagccgagtggcattgctgacaagcagacatcaccctatcctaccatctgactcacagaactgtaaagaattccaagttttcaccaaattaaatgcaaacagtaaaaagagaagcgctcaacagaagcattacaaagatgaggttctggccctgcttctgccacttgccccagcccatctagcaggctgtcatgatgctcagacacagagtcagcagcagcagggctag

SEQ ID NO: 121963 - DNA, 1875 bp, Homo sapiens
atggagctgaaaaccatggtacaagaactacgtgacacaagcacaagcttcagtagccaatttgatcaagtggaagaaagggtatcagagattgaagatcaaatgaatgaaatgaaaaccaatgacaaaaaccacatgactatctcaatagatgcagaaaaggccttcaacaaaattcaacagccattcatgctaaaaactctcaataaactaggtattgatgtgacatatctcaaaataataagagatatttatggcaaacccacagccaatatcatactgaatgggcaaaaactgggagcattccctttgaaaactggcacaagacagggatgccctctcccaccactcctattcaatgtagtgttggaagttctggccagggcaatcaggcaggagaaagaaatgaagaatattcaattagaaaaagaggaagtcaaattgtccctgtttgcagatgacatgattgtatatttagaaaaccccatcatcttagccccaaatctccttaagctgataagcaacttcagcaaagtctcaggatacaaaacccatgtgcaaaaatcacaagcattcttatacaccaataacagacaaacagagagccaaatcacgagtgaactcccattcgcaattgcttcaaagagaataaaatacctaggaatccaacttacaagggatgtgaaggacctcttcaaggagaactacaaaccacagctcaacgaaataaaagaggacacaaacaaatggaagaacattccatgctcatggataggaagaatcaatattgtgaaaatggccatattgcccaagaattggaaaaaaactactttaaagttcatatgggaccaaaaaagagcctgcattgccaagactatcctaagcaaaaagaacaaagctggaggcatcacactacgtgacttcaaactatactacaaggctacagtaaccaaaacagcatggtactggtaccaaaacagagatatagaccaatggaacagaatagagccctcaaaaattataccacacatctacaaccatctgatctttgacaaatctgataaaaacaagcaatggggaaaggattccctatttaataaatggttctgggaaaactggctagccatatgtagaaagctgaaactggatcccttccttacaccttatacaaaaattaattcaagatggattaaaaaagtaaatgttagacctaaaaccataaaaaccctagaagaaaacctaggcaataccaatcaggccacaggcatgggcaaggacttcatgactaaaacaccaaaagcaatggcaacaaaagccaaaattgacaaatgggatctaattaaactaaagaacttctgcacagcaaaagaaactaccatcagagtcaacaggcacactacagaatgggagaaaatttttgcaatctactcatctgacaaagggctaatatccagaatctacaatgaactcaaacgaatttacaagaaaacaaacaaccccatcagaaagtgggtgaaggatacgaacagacatttctcaaaagaagacatttatgcagccaaaagacacatgaaaaaatattcatcatcactggccatcagagaaatgcaaatcaaaaccacaatgagataccatctcacaccagttagaatggcgatcattcaaaagtcaggaaacaacaggtgctggagaggatgtggagaaatagaaatgcttttacactgttggagggaccgtaaactagttcaactattgtggaagacagtgtggcgattcctcaaggatctagaactagaaataccatttgacccagccatcccattactggacatatacccaaaggactataaatcatgctgctataaagacacatga

SEQ ID NO: 121964 - DNA, 3309 bp, Homo sapiens
atgaatgctggcaagggtatggagaaaggggaacccttttacactgctgattcagagaagactctgagaaatgtttgtggggaatctggtgatgcagtgacacaagggctgagattccctgaatctgcacaacgagtatcgcacccactgcttcagctcaggtttgggggcaatgtgagcccagctgcacaagctgaccacctggtgctctgcccacaggatgtttccagattactattggcagaattgcccaggtttgcaggggcagaggggctctctgacaattcacttctcagcagtttgtcacattgttctgatagtatcagcagtgatgaggaggagctaaggactttgggaagcagtggtagcgaaagcagtactccagagaatgtcggacctcctttcctcatggatgagaacagttggttcaacaagtgtaagagagttaaacaaaagtatcagcttaccctggaacagaagggttaccttgaagaactcttacgacttcgagagaaccaactatctgaatctgtctcccagaataaaatactacttcaaaggattgaagattccgatctggctcataaactggagaaggaacaattagaatatataattgtggagcttcaagatcagctgaacagacctaaccagctagatttgttccaagctttctgtgctgaaattgcggggctgtcccaagtgttccaggccatggggctccctcaagcagaagggttgaacaccagctgtgctggggaagctaaactgctcccaggtcactggcaaaacactcaggcggggcagtgcaggctgtgctctgtgcaccctcttacaggaatggcgaggcagaacagtgaagacaaaagcactcaccatcttaatattcacaggactgtgctaaagaataatgatttaagatcgagacaagagttaactgcccatctcaccaaccagtggccttctccaggagctctggatgtcaatgctgttgccttggatacgttgctttaccgaaaacacaataaacagtggtatgagaaaagttatcaaagtcttgaccagttatcagcagaagttagcctttctcagacttcactagatccaggccagtcacaagaaggagatggaaaacaagacacattaaatgtaatgagtgaagcaccacaccacacctattccaaaattgaccacatagttggaagtaaagcactcctcagcaaatgtaaaagaacagaaactacaacaaactgtctctcagaccacagtgcaatcaaactagaactcaggactaagaaactcactcaaaaccgctcaactacatggaaactgaacaacctgctcctgagtgactactgggtacataacgaaatgaaggcagaaataaagatgttctttgaaaccaacgagaacaaagacccaacataccagaatctctgggacacattcaaagcagtgtgtagagggaaatttatagcactaaatgcccacaagagaaagcaggaaagatccaaaattgacaccctaacatcacaattaaaagaactagaaaagcaagagcaaacacattcaaaagctagcagaagaccaataacaggatctgaaattgtgacaataatcaatagcttaccaaccaaaaagagtccaggaccagatggattcacagctgaattctaccagaggtacaaggaggaactggtaccattccttctgaaactattccaatcaatagaaaaagagagaatcctccctaactcattttatgaggccagcatcatcctgataccaaagccgggcagagacacaaccaaaaaagagaattctagaccaatatccttgatgaacattgatgcaaaaatcctcaataaaatactagcaaaccgaatccagcagcacatcaaaaagcttatccaccatgatcaagtgggcttcatccctgggatgcaaggctggttcaacatacgcaaatcaataaatgtaatccagcatataaacagaaccaaagacaaaaaccacatgattatctcaatagatgcagaaaaggcctttgacaaaattcaacagcccttcatgctaaaaactctcaataaattagtgttggaagttctggccagggcaattaggcaggagaaggaaataaagggtattcaattaggaaaagaggaagtcaaattgtccctgtttgcagatgacatgattgtatatctagaaaaccccattgtctcagcccaaaatctccttaagctgataagcaacttcagcaaagtctcaggatacaaaatcaatgtacaaaactcacaagcattcttatacaccaataacagacaaacagagagcgaaatcatgagtgaactcccattcacaattgcttcaaagagaataaaatacttaggaatccaacttacaagggatgtgaaggaccttttcaagcagaactacaaaccactgctcaatgaaataaaagaggatacaaacaaatggaagaacactccatgctcatgggtaggaagagtcaatattgtgaaaatggccatactgcccaaggtaatttacagattcaatgccacccccatcaagctaccaatgactttcttcacagaattggaaaaaactactttaaagttcatgtggaatcaaaaaagagcccgcatcgccaagtcaatcctaagccaaaagaacaaagccagaggcatcacgctacctgacttcaaactatactacaatgctacagtaaccaaaacagcatggtactggtaccaaaacagagatatagatcaatggaacagaacagaaccctcagaaataatgccgcatatctacaaccatctgatctttgacaaacctgacaaaaaccagcaatggggaaaggattccctatttaataaatggtgctgggaaaactggctagccatatgtagaaagctgaaactggatcccttccttacaccttatacaaaaattaattcaagatggattaaagacttacatgttagacctgaaaccataaaaaccctagaagaaaacctaggcaataccattcaggacataggcatgggcaaggacttcatgtctaaaacaccaaaagcaatggcaacaaaagccaaaattgacaaatgggatctaattaaactaaagagcttctgcacagcaaaagaaactaccatcagagtgaacaggcaacctacaaaatgggagaaaatttccgcaacctactcatctgacaaaggactaatatccagaatctacaatgaactcaaacaaatttacaagaaaaaaacaaccccatcaaaaagtgggcgaaggacatga

SEQ ID NO: 121965 - DNA, 3213 bp, Homo sapiens; identical to SEQ ID NO: 116408

SEQ ID NO: 121966 - DNA, 1364 bp, Homo sapiens; identical to SEQ ID NO: 121023

SEQ ID NO: 121967 - DNA, 3252 bp, Homo sapiens; identical to SEQ ID NO: 120702

SEQ ID NO: 121968 - DNA, 2760 bp, Homo sapiens
atgggagactttaacaccccactgtcaacattagacagatcaacgagacaggaagttaacaaggatacccaggaattgaactcagctctgcaccaagtggacctaatagacatctacagaactctccaccccaaatcaacagaatatacattcttttcagcaccacactacacctactccaaaattgaccacatagttggaagtaaagcactcctcagcaaatgtaaaagaacagaaattataacaaactgtctctcagaccacagtgcaatcaaactagaactcaggattaagaaactcactcaaaaccactcaactacatggaaactgaacaacctgctcctgaatgactactgggtaaataatgaagtgaaggcagaaataaagatgttctttgaaaccaacgagaacaaagacacaacataccagaatctctgggacacattcaaagcaatcaacaaaattgatagaccactagcaagactaataaagaagaaaagagagaagaatcaaatagatgcaataaaaaatgataaaggggatatcaccaccaatcccacagaaatacaaactaccatcagagaatattataaacacctctacgcaaataaactagaaaatctagaagaaatggataaattcctcgacacatacatcctcccaagactaaaccaggaagaagttgaacctctgaatagaccaataacaggctctgaaattgaggaaataatcaatagcttaccaaccaaaaaaactccaggaccagatggattcacagccgaattctaccagaggtacaaagaggagctggtaccaatccttctgaaactattccaatcaatagaaaaagagggaatcctccctaactcattttatgaggccagcatcatcctgataccaaagcctgacagagacacaaccaaaaaagagaatttcagaccaatatccctgatgaacatcgatgtaaaaatcctcaataaaatactggcaaaccgaatccagcagcacatcaaaaagcttatccaccatgatcaagtgggcttcatccctgggatgcaaggctggttcaacatacgcaaatcaataaatgtaatccagcatataaacagaaccaaagacaaaaaccacatgattatctcaatagatgcagaaaaggcctttgacaaaattcaacaacccttcatgctaaaaactctcaataaattaggtattgatgggacgtatctcaaaataataagagctatctatgacaaacccacagccgatatcatactgaatgggcaaaaactggaagcattctctttgaaaactggcacaagacagggatgccctctctcaccactcctattcaacatagtgttggaagttctggccagggcagtcaggcaggagaaggaaataaagggcattcgattaggaaaagaggaagtcaaattgtccctgcttgcagatgacatgattgtatatctagaaaaccccatcgtctcagccccaaatctcctcaagctgataagcaacttcagcaaaagaataaaatacctaggaatccaacttacaagggatgtgaaggacctcttcaagaagaactacaaaccactgctcaatgaaataaaagaggatacaaacaagtggaagaacattccatgctcatgggtaggaagaatcaatatcgtgaaaatggccatactgcccaaggtaatttatagattcaatgccatcccaatcaagctaccaatgactttcttcacagaattggaaaaaactactttaaagttcatatggaaccaaaaaagagcctgcatcgccaagtcaatcctaaaccaaaagaacaaagctggaggcatcatgctacctgacttcaaactatactacaaggctacaggaaccaaaacagcatggtactggtaccaaaacagagatatagatcaatggaacagaacacagccctcagaaataatgccacatatctacaactatctgatctttgacaaacctgacaaaaacaagaaatggggaaaggattccctatttaataaatggtgctgggaaaactggctagccatatgtagaaagctgaaactggatcccttccttacaccttatacaaaaattaattcaagatggattaaagacttaaacgttagccctaaaaccataaaaaccctagaagaaaacctaggcaataccattcaggacataggcatgggcaaggacgtcatgtctaaaacaccaaaagcaatggcaacaaaagccaaaattgacaaatgggatctaattaaactaaagagcttctgcacagcaaaagaaacgaccatcagagtgaacaggcaacctacagaatgggagaaaatttttgcaacctactcatctgacaaagggctaatattcagaatctacaatgaactcaaacaaatttacaagaaaaaaacaaacaacctcatcaaaaagtgggcgaagaacatgaacagacacttctcaaaagaagacatttatgcagccaaaaaacacatgaaaaaatgctcatcatcactggccatcagagaaatgcaaatcaaaaccacaatgagataccatctcacaccagttggaatggcaatcattaaaaagtcaggaaacaacagtctaagtaaccagatgtacagaatacaaaagatgcaggtacaagcccaaattcaagcttacaatgtgattacaaataataattataataacaatggcattcagctacgggacctgacactgaagatacctactgaatag

SEQ ID NO: 121969 - DNA, 2268 bp, Homo sapiens; identical to SEQ ID NO: 120370

SEQ ID NO: 121970 - DNA, 4729 bp, Homo sapiens
atgggagactttaacaccccactgtcaacagtagacagatcgatgagacagaaagttgacaaggatacccaggaattgaactcagctctgcaccaagcagacctcatagacatctacagaactctccaccccaaatcaacagaatatacatttttttcagcaccacaccacacctattccaaaattgacaacataattggaagtaaagctctcctcagcaaatgtaaaggaacagaaattataacaaactctctctcagaccacagtgcaatcaaactagaactcaggattaagaaactcactcaaaaccactcaactacagagaaactgaacaacctgctcctgaatgactactgggtacataacgaaatgaaggcagaaataaagatgttctctgaaaccaatgagaacaaagacacaacataccagaatctctgggacacattcaaagcagtgtgtagagggaaatttatagcactaaatgcccacaagagaaagcaggaaagatccaaaattgacaccctaacatcacaattaaaagaactagaaaaactaaaccaggaagaagttgaatctctgaatagaccaataacaggagctgaaattgtggcaataatcaatagcttaccaaccaaaaagagtccaggaccagatggattcacagccaaattctactggaggtacaaggaggaactggtaccattccttctgaaactattccaatcaatagaaaaagagggaatcctccctaactcatgttatgaggccagcatcatcctgataccaaagcctggcagagacacaacaaaaaaagagaattttagaccaatatccttgatgaacattgatgcaaaaatcctcaataaaatactggcaaaccgaatccagcagcacatcaaaaagcttatccaccatgatcaagtgggcttcatccctgggatgcaaggctggttcaatatatgcaaatcaataaatgtaatccagcatataaacagaaccaaagacaaaaaccacatgattatctcaatagatgcagaaaaggcctttgacaaaattcaacaacccttcatgctaaaaactctcaataaattagcccaaaatctccttaagctgataagcaacttcagcaaagtctcaggatacaaaatcaatgtacaaaaatcacaagcattcttatacaccaataacagacaaacagagagccaaatcatgagtgaactcccattcacaactgctttaaagagaataaaatacctaggaatccaacttacaagggatgtgaaggacctcttcaaggagaactacaaaccactgctcaaggaaataaaagaggatacaaacaaatggaagaacattccatgctcatgggtaggaagaatcaatatcttgaaaatggccacactgcccaaggtaatttatagattcaatgccatccccatcaagctactaatgactttcttcacagaattggaaaaaactactttaaagttcatatggaaccaaaaaagagcccgcatagccaagtcaatcctaaaccaaaagaacaaagctggaggcatcacactacctgacttcaaactatactacaaggctacagtaaccaaaacagcatggtactggcaccaaaacagagatagagaccaatggaacagaacagagccctcagaaacaatgctgcatatctacaactatctgatctttgacaaacctgacaaaaacaagcaatggggaacggattccctatttaataaatggtgctgggaaaactggctagccatatggagaaagctgaaactggatcccttccttacaccttatacaaaaattaattcaagatggattaaagacttacacattagagctaaaaccataaaaaccctagaagaaaacctaggcaataccattcagtacataggcatgggcaaggacttcatgtctgaaacaccaaaagcaatggcaacaaaagccaaaattgacgaatgggatctaattaaactaaagagcttctgcacagcgaaagaaactaccatcagagtgaacaggcaacccacaaaatgggagaaaattttcgcaacctactcatctgacaaagggctaatatccagaatctacaatgaactcaaacaaatttacaagaaaaaaacaaacaaccccatcaaaaaatgggcaaaggacatgaacagacacttctcaaaagaagacatttatgcagccaaaaaacacatgaaaaaatgctcatcatcactggccatcagagaaatgcaaatcaaaaccacaatgagataccatctcacaccagtcagaatggcgatcattaaaaagtcaggaaacaacaggtgctggagaggatgtggagaaataggaacacttttacactgttggtgggactgtaaactagttcaaccattgtggaagtcagtgtggcgattcctcagggatctagaactagaaataccatttgacccagccatcccattactgggtatatacccaaaggactataaatcatgctgctacaaagacacatgcacacgactgaagtgtggaattcgcatggtcaacatgaaaagtaaggaacctgccgtgggatctagattcttctctagaattagtagttggagaaattcaacagtgactggacatccatggcaggtctccctaaaatcagatgagcaccacttctgtggaggaagcttgattcaagaagatcgggttgttacagcagcacactgcctggacagcctcagtgagaagcagctgaagaatataactgtgacttctggggagtacagcctctttcagaaggataagcaagaacagaatattcctgtctcaaaaattattacccatcctgaatacaacagccgtgaatatatgagtcctgatattgcactgctgtatctaaaacacaaagtcaagtttggaaatgctgttcagccaatctgtcttcctgacagcgatgataaagttgaaccaggaattctttgcttatccagtggatggggcaagatttccaaaacatcagaatattcaaatgtcctacaagaaatggaacttcccatcatggatgacagagcgtgtaatactgtgctcaagagcatgaacctccctcccctgggaaggaccatgctgtgtgctggcttccctgattggggaatggacgcctgccagggggactctggaggaccactggtttgtagaagaggtggtggaatctggattcttgctgggataacttcctgggtagctggttgtgctggaggttcagttcccgtaagaaacaaccatgtgaaggcatcacttggcattttctccaaagtgtctgagttgatggattttatcactcaaaacctgttcacaggtttggatcggggccaacccctctcaaaagtgggctcaaggtatataacaaaggccctgagttctgtccaagaagtgaatggaagccagagaggaaagggtaaggtctgtggaaaaatattgccttcaccattgctggcagagaccagtgaggccatggttccatttgtttctgatacagaagacagtggcagtggctttgagcttaccgttactgctgtacagaagtcagaagcagggtcaggttgtgggagtctggctatattggtagaagaagggacaaatcactctgccaagtatcctgatttgtatcccagtaacacaaggtgtcattggttcatttgtgctccagagaagcacattataaagttgacatttgaggactttgctgtcaaatttagtccaaactgtatttatgatgctgttgtgatttacggtgattctgaagaaaagcacaagttagctaaactttgtggaatgttgaccatcacttcaatattcagttctagtaacatgacggtgatatactttaaaagtgatggtaaaaatcgtttacaaggcttcaaggccagatttaccattttgccctcagagtctttaaacaaatttgaaccaaagttacctccccaaaacaatcctgtatctaccgtaaaagctattctgcatgatgtctgtggcatccctccatttagtccccagtggctttccagaagaatcgcaggaggggaagaagcctgcccccactgttggccatggcaggtgggtctgaggtttctaggcgattaccaatgtggaggtgccatcatcaacccagtgtggattctgaccgcagcccactgtgtgcaattgaagaataatccactctcctggactattattgctggggaccatgacagaaacctgaaggaatcaacagagcagaattctacatcagctcaggccaaactgaatgacttcagctatgttggtacagagctacatctgaacttaaatacatttctaacaacactttctgcttacttcatcatcgagctctctctgaatgtttcttcattagatggtggcctagcaagtcgcctacagcagattcaagtgcatgtgttagaaagagaggtctgtgaacacacttactattctgcccatccaggagggatcacagagaagatgatctgtgctggctttgcagcatctggagagaaagatttctgccagggagactctggtgggccactagtatgtagacatgaaaatggtccctttgtcctctatggcattgtcagctggggagctggctgtgtccagccatggaagccgggtgtatttgccagagtgatgatcttcttggactggatccaatcaaaaatcaatg

SEQ ID NO: 121971 - DNA, 2685 bp, Homo sapiens
atgggagactttaacaccccactgtcaacattagacagatcaacaagacagaaagtcaacaaggatacccaggaattgaactcagctccacaccaggcagacctaatagacatctacagaactctgcaccccaaatcaacagaatatacatttttttcagcaccacaccacacctattccaaaactgaccacatacttggaagtaaagctctcctcagcgaatgtaaaagaacagaaattataacaaactatctctcagatgacagtgcaatcaaactagaactcaggattaagaatctcactcaaaaccgctcaactacatggaaactgaacaacctgctcctggatgactactgggtacataacgaaatgaaggcagaaataaagatgttctttgaaaccaatgagaacaaagacacaacataccagaatctctgggacgcattcaaagcagtgtgtagagggaaatttgtagcactaaatgcccacaagagaaagcagggaagatccaaaattgacaccctaacatcacaattaaaagaactagaaaagcaagagcaaacacattcaaaagctagcagaaggcaagaaataactaaaatcagagcagaactgaaggaaatagagacacaaaaaaccgttcaaaaaattaatgaatccaggagctggttttttgaaaggatcaacaaaattgatagacagctagcaagactaataaagaaaaaaagggagaagaatctaatagacgcaataaaaaatgataaaggggatatcaccaccgatcccacagaaatacaaactaccatcagagaatactacaaacacctctatgcaaataaactagaaaatctagaagaaatggataaattcctggacacatacactctcccaagactaaaccaggaagaagttgaatctctgaatagaccaataacaggatctgaaattgtggcaataatcaatagcttaacaaccaaaaagagtccaggaccagatggattcacagccgaattctaccagagggcaattaggcaggagaaggaaataaagggtattcaattaggaaaagaggaagtcaaattgtccctgtttgcagatgacatgattgtatatctagaaaaccccattgtctcagcccaaaagctgataagcaacttcagcaaagtctcaggatacaaaatcaatgtacaaaagtcacaagcattcttatacaccaacaacagacaaacagagagccaaatcatgagtgaactcccattcacaattgcttcaaagagaataaaatacctaggaatccaacttacaagggatgtgaaggacctcttcaaggagaactacaaaccactgctcaaggaaataaaagaggatacaaacaaatggaagaacattccatgctcatgggtaggaagaatcaatatcgtgaaaatggccatactgcccaaggtaatttacagattcaatgccatccccatcaagctaccaatgactttcttcacagaattaaaaaaaactactttaaatttcatatggaaccaaaaaaagagcccacatcgccaagtcagcctaagccaaaagaacaaagctggaggcatcacactacctgacttcaaactatactacaaggctacagtaaccaaaacagcatggtactggtaccaaaacagagatacagatcaatggaacagaacagagccctcagaaataatgccgcgtatctacaactatctgatctttgacaaacctgagaaaaacaagcaatggggaaaggattccctgtttaataaatggtgctggaaaaactggctagccatatgtagaaagctgaaactggatcctttccttacaccttatacaaaaattaattcaagatggattaaagacttaaacattagacctaaaaccataaaaaccctagaagaaaacctaggcattaccattcaggacataggcatgggcaaggacttcatgtctaaaacaccaaaagcaatggcaacaaaagccaaaattgacaaatgggatctaattaaactaaagagcttctgcacagcaaaagaaactaccaacagagtgaacaggcaacctacaaaatgggagaaaatttttgcaacctactcatctgacaaagggctaatatccagaatctacaatgaactcaaacaaatttacaagaaaaaaacaaacaaccccatcaaaaagtgggcgaaggacatgaacagacacttctcaaaagaagacatttatgcagccaaaaaacacatgaaaaaatgctcatcatcactggccatcagagaaatgcaaatcaaaaccacaatgagataccatctcacactagttagaatggcaatcattaaaaagtcaggaaacaacaggtgctggagaggacgtggagaaataggaacacttttacactgttggtgggactgtaaactagttcaatcattgtggaagtcagtgtggcaattcctcagggatctagaactggaaataccatttgacccagccatcccattactgggaaaactgtctcataaattagggaagtgctcaattacaagcctgacagagattgattttggttctgctgttggtcactaccagcaagtgaaggccgcagaaaccacaactccagctaatgctggaatcgcttcagaggtgctcactgaacaagtgttcattaagaagtga

SEQ ID NO: 121972 - DNA, 1205 bp, Homo sapiens; identical to SEQ ID NO: 121025

SEQ ID NO: 121973 - DNA, 2277 bp, Homo sapiens
atgaacagagacaaagaaggccattacataatggtaaagggatcagttcaacaagaagagctaactatcccaaatatatatgcacccaatacaggagcaccaatattgataaagcaagtcctgagtgacctacaaggacacttagactcccacacattaataatgggagactttaacacaccactgtcaacattagacagatcaacaagacagaaagccaacaaggatacccaggaattgaactcagctctgcaccaagcagacctaatagacatctacagaactctccaccccaaatcaacagaatatacatttttttcagcaccacaccacacctattccaaaattgaccacatacttggaagtaaagctctcctcagcaaatgtaaaagaacagaaattataacaaactatctctcagaccacagtgcaatcaaactagaactcaggattaagaatctcactcaaaaccgctcaactacatggaaactgaacaacctgctcctgaatgactactgggtacataacgaaatgaaggcagaaataaagatgttctttgaaaccaacgagaacaaagacacaacataccagaatctctgggacgcattcaaagcagtgtgtagagggaaatttatagcactaaatgcccacaagagaaagcaggaaagatccaaaattgacaccctaacatcacaattgaaagaactagaaaagcaagagcaaacacattcaaaagctagcagaaggcaagaaataactaaaatcagagcagaactgaaggaaatagagacacaaaaaacccttcaaaaaattaatgaatccaggagctggttttttgaaaggatcaacaaaattgatagaccgctagcaagactaataaagaaaaaaagagagaagaatctaatagatgcaataaaaaatgataaaggggatatcaccaccgatcccacagaaatacaaactaccatcagagaatactacaaacacctctacgcaaataaactagaaaatctagaagaaatggataaattcctcgacacatacactctcccaagactgaaccaggaagaagttgaatctctgaatagaccaataacaggatctgaaattgtggcaataatcaatagcttaccaaccaaaaagagtccaggaccagatggattcacagccgaattctaccagaggcacacagtatcaatactcatcagctattgtcagggtggaagcctgatgagccaagtatactggaaccagcaagagaaacccccttcctccagcaacgcccctccagggctctctgttaacaaagctcagcatcgtcatgtttgctgcagaggagaaatgctaaaaagggtccaggttcattatgtcagagcaggggaatctgacagtgctagctttcactgtgtggcccaaggcccaagagcctttggcaaaccactgatcctctccaaagagaatcatctcttgactgtcactgcaatagccaaattaaaccacaaattatgtgaaattaaaagcatgggtgtttttatcaacacagagcccctgtatgacagttgtttagaacagaaacatgctctttttgcctctcctccagccaccacccactccactaccatgatcagtaaggcaaaggtgataccgatgctttctctgacgccagggagtttccaaaccgtggaaagctctttggccccctctgctggtaagttccaggggacagaaacaagctctctgaagactctcattaatctttgctgtccgaagctaccttctccatctcctgctcacctgggaggactccctggaggaagccaggaaagaccatcaaggcagtacctctatgagtctgcaagaaccactgtgttactgggcttggggtgtcccctaaagcagatacagcttagatcacaacactcaagtcctttagaatacctggagagccttcccaagaaggacagaaaaaaaagagagaagatccaaataaataaagtcagagatgaaaaaggagacattacaaccaatagtgcagaaattcaaaggatggttattggctaccatgagcaactatatgccaataaattggaaaatctagaagaaatggacaaatttctagacacatacgacctaccaagattgaaccatgaagaaatccaaaagctggacagaccaataacaagtaacaagattgaagctgtaaaaaaaagtctcccagtaaagaaaagcctggaacctgatggcttcactgctgagtttcaccaaacatttagataa

SEQ ID NO: 121974 - DNA, 2310 bp, Homo sapiens; identical to SEQ ID NO: 120375

SEQ ID NO: 121975 - DNA, 3033 bp, Homo sapiens
atgaagcgagaaggaagtttagagaaaaaaagaataaaaagaaatgaacaaagcctccaagaaatatgtgactatgtgaaaagagcaaatctacgtctgattggtggacctgaaagtgacggggaaaatggaaccaagttggaaaacactctgcaagatatgcaggagaaattccccaatctagcaaggcaggccaacattcaaattcaggagatacagagaacgccacaaagatactcctcaagaagagcaactccaagacacataattgtcagattcaccaaagttgaaatgaaggaaaaaatgttaagggcagccagagagaaaggtcaggttacccacaaagggaagtccatcagactaacagctgatctctcggcagaaactctacaagccagaagagagtgggggccaatattcaacattcttaaagaaaagaattttcaacccagaatttcatatccaggcaaactaagcttcataagtgaaggagaaataaaatcctttacagacaagcaaatgctgagagattttgtcaccaccaggcctgccctaaaagagctcctgaaggaagcactaaacatggaaaagaacaagcagtaccagccaccacaaaaacatgccaaattaactagagaagcaagagcaaacacattcaaacctagcagaaggcgagaaataacaaagatcagagcagaactgaaggaaatagagacaccaaaaaccgctcaaaaaattaatgaatccaggagctggttttctgaaaggatcaacaaaattgatagaccgctagcaagactaagaaagaagaaaagagagaagaatcaaatagacacaataaaaaatgatgaaggggatatcaccacccatcccacagaaatacatactatcatcagagaatactataaacacctctatgcaaataaactagaaaatctagaagaaatggataaattcctcgacacctacaccctcccaagaccaaaccaggaagaagttgaatctctgaatggaccaatagcaggctctgaaattcaggcaataattaatagcttaccaaccaaaaaaagtccaggaccagatggattctaccagaggtacaaggaggagctggtaccattccgtctgaaactattccaatcaatagaaaaagagggaatcctccctaactcattttatgaggccagcatcatcctgataccaaagcctggcagagacacaacaaaaaaagagaattttagaccaatatccctgttgaacatcaatgcaaaaatcctcaataaaatactggcaaaccgaatccagcagcacatcaaaaagcttatgcaccatgatcaagtgggcttcatccctggaatgcaaggctggttcaatatacgcaaatcaataaatgtaatccagcatataaacagaaccaaagacaaaaaccacatgattatctcaatagatgcagaaaaggcctttgacaaaattcaacaacccttcatgctaaaaactctcaataaattaggtattgatgggacatatcacaaaataataagagctaactatgacaaacccacagccaatatcatactgaatgggcaaaaactggaagcattccctttgaaaactggcacaagacagggatgccctctctcaccactcctattcaacatagtgttggaagttctggccagggcaatcaggcaggagaaggaaacagagggtattcaattaggaaaagaggaagtcaaattgtccctgtttgcagatgacatgattgtatatctagaaaaccccattgtctcagcccaaaatctccttaagctgataagcaacttcagcaaagtctcaggatacaaaatcaatgtgcaaaaatcacaagtattcttatacaccgataacagacaaacagagagccaaatcatcagtgaactccccattcacaattgcttcaaagagaataaaatacctaggaatccaacttacaaggtacgtgaaggacctcttcaaggagaggtcaatgaaataaaagaggatacaaacaaatggaagaacattccatgctcatgggtaggaagaatcaatatcgtgaaaatggccatactgcccaaggtaatttatagattcaatgccatctccatccagctaccaatgactttcttcacagaattggaaaaaactactttaaagttcatatggaaccaaaaaagagcccacattgccaagtcaatcctgagcaaaaagaataaagctggaggcatcatgctacctgacttcaaactatactacaaggctacagtaaccaaaacagcatggcattggtaccaaaacagagatatagaccaaaggaacagaacagagccctcagaaataatgccgcatgtctacaaccatctgatctttggcaaacctgacaaaaacaagcaatggggaaatgattccctatttaataaatggtgctgggaaaactggctagccatatgtaaaaagctgaaactggatcccttccttacaccttatacaaaaattaattcaagatggattaaagatttaaatgttagacctaaaaccataaaaaccctagaagaaaacctaggcaataacattcaggacataggcatgggcaaggacttcacgtctaaaacaccaaaagcaatggcaacaaaagacaaaattgacaaatgggatctaatgaaactaaagagcttttgcacagcaaaagaaactaccatcatagtgaacaggcaacctacagaatgggagaaaatttttgcaatctactcatatgacaaagggctaatatccagaatctacaaagaattcaaacaaatttacaagaaaaaaacaaacaatcccatcaaaatgtgggcaaaggatatgaacagacacttctcaaaagaagacatttatgcagccaaaagacacatgaaaaaatgctcatcatcactggccatcagagaaatgcaaatcaaaaccacaatgagatatcatctcacgccagttagaatggcaatcattaaaaagtcaggaaacaacaggtacccttga

SEQ ID NO: 121976 - DNA, 3171 bp, Homo sapiens
atggggaaaaaacagaacagaaaaactggaaactctaaaaagcagagcgcctctcctcctccaaaggaacacagttccttaccagcaacggaacaaagctggatggagaaagactttgacgagctgagagaagaaggctacagacgatcaaattactctgagctatgggaggacattcaaaccaaaggcaaagaagttgaaaactttgaaaaaaatttagaagaatgtataactagaataaccaatacagagaggtgcttaaaggagctgatggagctgaaaaccaaggctcgagacctacgtgaagaatgcagaagcctcaggagccgatgcgatcaactggaagaaagggcccgccctaaaagagctcctgaaggaagagctaaacatggaaaggaacaaccggtaccagccgctgcaaaatcatgccaaaatgtaaagaccatcaagactaggaagaaactgcatcaactaatgagcaaaataaccagacacagactggcaaattggataaagagtcaagacccatcagtgtgctatattccggaaacccatctcacgtgcagagacacacataggctcaaaataaaaggatggaggaagatctaccaagccaatggaaaacaaaaacaggcaggggttgcaatccacatctctgataaaacagactttaaaccaacaaagatcaaaagagacaaagaaggccattacataatggtaaagggatcaattcaacaagaaaagctaactatcctaaatgtatatgcacccaacacaggagcacccagattcataatgcaagtcctgagtgacctacaaagagacttagactcccacacattaataatgggagactttaacaccccactgtcaacattagacagattaacgagacagaaagtcaacaaggatacccaggaattgaactcagctctgcaccaagtggacctaatagacatctatagaactctccaacccaaatcaacagaatatacattgttttcagcaccacaccacacctattccaaaattgaccacatacttggaagtaaagctctcctcagcaaatgtaaaagaacagaaattataacaaactatctctcagaccacagtgcaatcaaactagaactcaggattaagaaactcactcaaatccgctcaactgcatggaaactgaacaacctgctcctgaatgactactgggtacataacgaaatgaaggcagaaataaagatgttctttaaaaacaatgagaataaagacgcaacatgccagaatctctgggacacattcaaagcagtgtgtagagggaaattcttagcactaaatgcccacaagagaaagcaggaaagatccaaaatcaacaccctaacatcacaattaaaagaactagaaaagcaagagcaaacacattccaaagctagtagaaggcaagaaataactaaaatcagagcagaactgaaggaaatagagacacaaaaaacccttcaaaaaattaatgaatccaggagctggttttttgaaaggatcaacaaaattgatagaccactagcaagactaataaagaaaaaaagagagaagaatcaaatagacacaataaaaaatgataaaggggatatcaccaccgatcccacagaaatacaaactaccgtcagagaatactacaaacacctctacgcaaataaactagaaaatctagaagaaatggataaattcctcgacacatacacactcccaagactaaaccaggaagaatttgaatctctgaatagaccagtaacaggatctgaaattgtggcaataatcaatagcttaccaacgaaaaagagtccaggaccagatggattcacagccgaattctaccggaggtacaaggaggaactgcatataaacagagccaaagacaaaaaccacatgattatctcaatagatgcagaaaaagcctttgacaaaattcaacaacccttcatgctaaaaactctcaataaattaggtactgctgggacgtatttcaaaataataagagctatctatgacaaacccacagccaatatcatactgaatgggcaaaaactggaagcattccctttgaaaactggcacaagacagggatgccctctctcaccactcctattcaatatagtgttggaagttctggccagggcaattaggcaggagaaggaaataaagggtattcaattaggaaaagaggaagtcaaattgtccctctttgctgatgacatgattgtatatctagaaaaactcattgtctcagcccaaaatctccttaagctgataagcaacttcagcaaagtctcaggatacaaaattaatgtacaaaaatcacaagcattcttatacaccaataacagacaaacagagagccaaatcatgagtgaactcccattcacaattgcttcaaagagaataaaatacctaggaatccaacttacaaggaatgtgaaggacctcttcaaggagaactacaaaccactgctcaaggaaataaaagaggatacaaacaaatggaagaacattccatgctcatgggtaggaagaatcaatatcgtgaaaatggccatactgcccaagggaatttacagattcaatgccattcccatcaagctaccaaagactttcttcacagaattggaaaaaactactttaaagttcatatggaaccaaaaaagagcccacatcaccaagtcaatcctaagccaaaagaacaaagctggaggcatcacactgcctgccttcaaactatactacaaggctacagtaaccaaaacagcatggtactggtaccaaaacagagatatagatcaatggaacagaacagagccctcagaaataacgccacatatctacaactatctgatctttgacaaacctgagagaaacaagcaatggggaaaggattccctatttaataaatggtgctgggaaaactggctagccatatgtagaaagctgaaactggatcccttccttacagcttatacaaaaatcaattcaagatggattaaagacttaaacattagacctaaaaccataaaaactctagaagaaaatctaggcattaccattcaggacataggcatgggcaaggacttcatgtctaaaacaccaaaagcaatggcaacaaaagacaaattgacaaatgggatctaa

SEQ ID NO: 121977 - DNA, 2649 bp, Homo sapiens
atgggagactttaacaccccactgtcaacattagacagatcaacaagacagaaagtcaacaaggatacccaggaattgaactcagctctgcaccaagtggacctaatagacatctacagaattctccaccccaaatcaacagaatatacatttttttcagcaccacaccacacctattccaaaattgaccacatacttggaagtaaagctctcctcagcaaatgtgaaagaacagagattataacaaactatctctcagaccacagtgcaatcaaactagaactcaggattaagaatctcactcaacactgctcaacttcatggaaactgaacaaactgctcctgaatgactactgggtacataacgaaatgaaggcagagataaagatgttctttgaaaccaatgagaacaaagacacaacataccagaatctctgggatgcattcaaagcagtgtgtagagggaaatttatagcactaaacgcccacaagagaaagcaggaaagatccaaaattgacaccctaacatcacaattaaaagaactagaaaagcaagagcaaacacattcaaaagctagcagaagtcaacaaataactaaaatcagagcagaactgaaggaaatagagacacaaaaaacccttcaaaaaattaatgaatccaggagcttgttttttgaaaggatcaacaaaattgatagactgctagcaagactaataaagaaaaaaagagagaagaatctaatagacgcaataaaaaatgataaaggggatatcaccaccgatcccacagaaatacaaactgccatcagagaatattacaaacacctctacgcaaataaactagaaaatctagaagaaatggataaattccttgacacatacaccctcccaagactaaaccaggaagaagttgaatctctgaatagaccaataacaggatctgaaattgtggcaataatcaatagcttaccaaccaaaaagaatccaggaccagatggattcacagccgaattctaccagaggttcaaggaggaactgcatataaagagagccaaagacagaaaccacatgattatctcaatagatgcagaaaaagcctttgacaaaattcaacaacccttcatgctaaaaactctcaataaattaggtattgatgggacatatttcaaaataataagagctatctatgacaaacccacagccaatatcatactgaatgggcaaaaactggaagcattccctttgaaaactggcacaagacagggatgccctctctcaccactcttattcaatatagtgtttgaagttctggccagggcaattaggcaggagaaggaaataaagggtattcaattaggaaaagaggaaatcaaattgtctctgtttgccgatgacatgattgtatatctagaaaaccccattgtctcagcccaaaatctccttaagctgataagcaacttcagcaaagtctcaggatacaaaatcaatgtacaaaaatcacaagcattcttatacaccaacaacagacaaacagagagccaaatcatgagtgaactcccattcacaattgcttcaaagagaataaaatacctaggaatccaacttacaagggatgtgaaggacctcttcaaggagaactacaaaccactgctcaaggaaataaaagaggatacaaacaaatggaagaacattccatgctcatgggtaggaagaatcaatatcgtgaaaatggccatactgcccaagctaccaatgcctttcttcacagaattggaaaaaactactttaaagttcatatggaaccaaaaaagagcctgcatcaccaagtcaatcctaagccaaaagaacaaagctgaaggcatcacactacctgacttcaaactatactacaaggctacagtaaccaaaacagcatggtactggtaccaaaacagagatatagatcaatggaacagaacagagccctcagaaataatgccacatatctacagctatctgatatttgacaaacctgagaaaaacaagcaatggggaaaggattccctatttaataaatggtgctgggaaaactggctagccatatttagaaagctgaaactggatcccttccttacaccttatacaaaaatcaattcaagatggattaaagacttaaacgttagacctaaaaccataaaaaccctagaagaaaacctaggcattaccattcaggacataggcatgggcaaggacttcatgtctaaaacaccaaaagcaatggcaacaaaagccaaaattgacaaatgggatctaattaaactaaagagcttctgcacagccaaagaaactaccatcagagtgaacaggcaacctacaaaatgggagaaaattttcgcaacttactcatctgacaaagggctaatatccagaatctacaatgaactcaaagaaatttacaagaaaaaaacaaacaaccccatcaaaaagtgggcaaaggacatgaacagacacttctcaaaagaagacatttatggagccaaaaaacacatgaaaaaatgctcatcatcactggccatcagagaaatgcaaatcaaaaccacaatgagatatcatctcacactagttagaatggcaatcattaaaaagtcaggaaacaaaaggtgctggtga

SEQ ID NO: 121978 - DNA, 2214 bp, Homo sapiens
atgagagccaagtggaggaagaagcgaacgctcaggctgaagcgccaaagaagaaagatgaggcagaagtccaaagtgaaattaaaaatcccatctgctgtcaatgaggagtcccttcaggccctaaagtttagggagaggaatccctatcttgacttcttcactgtcatcctggcacatcagttacttcaaacaacccaatttcaagaactgatagaccttcatttctggacacaccaaaaacaagcaaattccagaggatcagcttcagggtggcagaatggaatgagtaaaagccaaccacgaggccagatgtctgatgctgtcaattctcaatggccagaagagggcatctgcccagatcagttcaggtgtctatccctggtcaatcgcctgtgcccagggcagcatatcaggactctggcagatacaaagaacccacagctgactgctgggtccccggcagacctagtgcatggctccacactgccatcttgggggctggcacatgctggcactgagtctggggaagggagctggggctggagggaaagaatcaacctgggagccaagcccaggaatcaggatgaccaagacatactcgacaaggagggaacaaagccatccaaggacaatcaaggacaaatcaagcaaatgaatttaagggagacctgctcatggacctttcataaaaaattcctcaagactgtagcatttcagataagccaccctcacaagaacacttgcctagcaatggctgtttctgccaacagatcaatgagacagaaattcaacaaggatacccaggaattgaactcagctctgcaccaagtggacctaatagacatctacagaactctccaccccaaatcaacagaatatacatttttttcagcaccacaccacacctattcaaaaattgaccacatacttggaagtaaagctctcctcagcaaatgtaaaagaacagagattataacaaactatctctcagaccacagtgcaatcaaactagaactcaggattaagaatctcactcaaaaccgatcaactacatggaaactgaacaagctgctcctgaatgactactgggtacataatgaaatgaaggcagaaataaagatgttctttgaaaccaatgagaacaaagacacaatataccagaatctctgggacgcattcaaagcagtgtgtagagggaaatttatagcactgaatgcccacaagagaaagcaagaaagatccaaaattgacaccctaacatcacaattaaaagaactagaaaagcaagagcaaacacattcaaaagctagcagaaggcaagaaataactaaaatcagagcagaactgaaggaaatagagacacaaaaaacccgtcaaaaaattaatgaatccagtagctggttttttgaagggatcaacaaaattgatagaccgctagcaagactaataaagaaaaaaagagagaagaatcaaatagacacaataaaaaattataaaggggatatcaccaccgatcccacagaaatacaaactaccatcagagaatactataaacacctctacgcaaataaactagaaaatctagaagaaatggataaattcctcgacacttacactctcccaagactaaaccaggaagaagttgaatgtctgaatagaccaataacaggagctgaaattgtggcaataatcaatactttaccaaccaaaaagagtccaggaccagatggattcacagccgaattctaccagagatgttcaaggtggattaaagacttaaacgttagacctaaaaccataaaaaccctagaagaaaacctaggcattaccattcaggacataggcacgggcaaggacatcatgtccaaaacaccaaaagcaatggcaacaaaagacaaaattgacaaatgggatctaattaaactaaagagcttctgcacagcaaaagaaactaccatcagagtgaacaggcaacctacaaaatgggagaaaattttcgcaacttactcatctgacaaagggttaatatccagaatctacaatgaactcaaacaaatttacaagaaaaaatcaaacaaccccatcaaaaagtgggcgaaggacatgaacagacacttctcaaaagaagacatttatgcagccaaaaaacacatgaaaaaacgctcatcactggccatcagagaaatgcaaatcaaaaccacaatgagatag

SEQ ID NO: 121979 - DNA, 3057 bp, Homo sapiens
  misc_feature (1)...(3057): n = a,t,c or g
atggggaaaaaacagaacagaaaaactggaaactctaaaacgcagagcgcctctcctcctccaaaggaacgcagttcctcaccagcaacagaacaaagctggatggagaatgattttgacgagctgagagaagaaggcttcagacgatcaaattactctgagctacgggaggacattcaaaccaaaggcaaagaagttgaaaactttgaaaaaaatttagaagaatgtataactagaataaccaatacagagaagtgcttaaaggagctgatggagctgaaaaccaaggctcgaaaactacgtgaagaatgcagaagcctcaggagccgatgcgatcaactggaagaaagggtatcagcaatggaagatgaaatgaatgaaatgaagcgagaagggaagtttagagaaaaaagaataaaaagaaatgagcaaagcctccaagaaatatgggactatgtgaaaagaccaaatctacgtctgattggtgtacctgaaagtgatgtggagaatggaaccaagttggaaaacactctgcaggatattatccaggagaacttccccaatctagcaaggcaggccaacgttcagattcaggaaatacagagaacaccacaaagatactcctcgagaagagcaactccaagacacataattgtcagattcaccaaagttgaaatgaaggaaaaaatgttaagggcagccagagagaaagacagatcaacgagacagaaagtcaacaaggatacccaggaattgaactcagctctgcaccaagcagacctaatagacatctacagaactctccaccccaaatcaacagaatatacatttttttcagcaccacaccacacctattccaaaattgaccacatagttggaagtaaagctctcctcagcaaatgtaaaagaacagaaattataacaaactatctctcagaccacagtgcaatcaaactagaactcaggattaagaatctcactcaaagccgctcaactacatggaaactgaacaacctgctcctgaatgactactgggtacataacgaaatgaaggcagaaataaagatgttctttgaaaccaatgagaacaaagacacaacataccagaatctctgggacgcactcaaagcagtgtgtagagggaaatttatagcactaaatgcccacaagggaaagcaggaaagatctgaaattgacaccctaacatcacaattaaaagaactagaaaagcaagagcaaacacattcaaaagctagcagaaggcaagaaataactaaaatcagagcagaactgaaggaaatagagacacaaaaaacccttcaaaaaatcaatgaatccaggagctggttttttgaaaggatcaacaaaattgatagaccgctagcaagactaataaagaaaaaaagagagaagaatcaaatagacacaataaaaaatgataaaggggatatcaccaccgatcccacagaaatacaaactaccatcagagaatactacaaacacctctacgcaaataaactagaaaatctagaagaaatggatacattccttgacacatacactctcccaagactaaaccaggaagaagttgaatctctgaatcgaccaataacaggctctgaaantgtggcaataatcaatagtttaccaaccaaaaagagtccaggaccagatggattcacagccgaattctaccagaggtacaaggaggaactggtaccattccttctgaaactattccaatcaatagaaaaagagggaatcctccctaactcattttatgaggccagcatcatactgataccaaagccgggcagagacacaaccaaaaaagagaattttagaccaatatccttgatgaacattgatgcaaaaatcctcaataaaatactggcaaaccgaatccagcagcacatcaaaaagcttatccaccatgatcaagtgggcttcatccctgggatgcaaggctggttcaatatacgcaaatcaataaatgtaatccagcatataaacagagccaaagacaaaaaccacatgattatctcaatagatgcagaaaaagcctttgacaaaattcaacaacccttcatgctaaaaactctcaataaattaggtattgatgggacgtatttcaaaataataagagctatctatgacaaacccacagccaatatcatactgaatgggcaaaaactggaagcattccctttgaaaaccggcacaagacagggatgccctctctcaccgctcctattcaacatagtgttggaagttctggccagggcaatcaggcaggagaaggaaataaaggctattcaattaggaaaagaggaagtcaaattgtccctgtttgcagacgacatgattgtttatctagaaaaccccatcgtctcagcccaaaatctccttaagctgataagcaacttcagcnaactctcaggatacaaaatcaatgtacaaaaatcacaagcattcttatacaccaacaacagacaaacagagagccaaatcatgggtgaactcccattcacaattgcttcaaagagaataaaatacctaggaatccaacttacaagggatgtgaaggacctcttcaaggagaactacaaaccactgctcaaggaaataaaagaggagacaaacaaatggaagaacattccatgctcatgggtaggaagaatcaatatcgtgaaaatggccatactgcccaaggtaatttacagattcaatgccatccccatcaagctaccaatgactttcttcacagaattggaaaaaactactttaaagttcatatggaaccaaaaaagagcccgcattgccaagtcaatcctaagccaaaagaacaaagctggaggcatcacactacctgacttcaaactatactacaaggctacagtaaccaaaacagcatgtgggtaccagaagcagggagcagacacctcggagcctgcaggggcagtgaggggaaaccttccgaacttcccaagcccccaagagtgcagagatgccaggtccacagccatggcttggctggctgcagctgtgcctaagaag

SEQ ID NO: 121980 - DNA, 1833 bp, Homo sapiens
atgacgactttggaccatgtgattgccacccaccagtcagaatgggtctccttcaatgaagagccaccctttcctgcccactcgcaggtgcttagagcagtgcctggcacgtggaaagagctcagtacggtcatccttgatcataaggaggatgactatattgactttggagaacttgtgctcagggatgaaggtcaagggggcacggaagagcacctcccaggactgtcatcttccccagaccagtccgagagctcctccggggagaaccatgtggtggatggaggctctcaagaccattcccactcggagcaggatgactcctctgaaaagatgggcctcatctctgaagcagcttccccacctgggagccctgagcagcccccacctgacctggcctcggccatcagcaactgggttcagtttgaagatgacacaccctgggccagcacatctccacctcatcaggaaacagctgagacagccctaccattgaccatgccctgctggacatgcccttcctttgactccctggggagatgccctctgacttctgagagcagctggaccacccattctgaagacaccagcagtcctagctttggatgttcgtatacagatctgcagctcatcaatgctgaggagcagacgagtggccaggcttctggggctgactcaactgtagatcctagcctgaggccaaaggacatgaagccctggggaagcagcccacagaggtcagtcgccagagcagatagagtggatctgaggttggaagcggcaaacaggtgtgttggaatagccagcacacttgatcctcaccagaaactaactggcccctacgccagagtttacaccagagactcaaaggcaaatctgggactagagaatgaggagggatgctcttattcaacaagaggcagtttctatggctacaaggagggtagaggcttgtggcagtgccaacctctgggagagccctgctttgaggctggatggttccagttgggtaaaccgaaaccccctggggttatggggcagattcccatcagtctgtcctccgggatcaacaaaattgatagacagctagcaagactaataaagaaaaaaagagagaagaatcaaatagatgcaataaaaaatgataaaggggatatcactaccgatcccatagaaatacaaactaccatcagagaatactacaaacacctctacgcaaataaactagaaaatctagaagaaatggataaattcctcaacacatacactctcccaagactaaaccaggaagaagttgaatctctgaatagaccaataacaggagctgaaattgtggcaataatcaatagcttaccaaccaaaaagagaccaggaccagatggattcacagccgaattctaccagaggtgttcttttgtagaggtaggccttcactgtttagtgattccgattttacagctggtaaggaccctggaaagacagaacttgctttcagattctctagatggctgggctgcttcctttgccttgcatttggatggggcagctggctgggctccagtatctggagagaatgacttcacaactttcattgggtcaaagggacgaaacatcataaaaagttcaggagaccgagctactggaaaagagcagctttctctgatagaatttactgctgctgagcacatctgccatgagactcaagaacaaatcacatcaccactttgtgatgcatctggaaactcagacaagtgttgcaaacagggctgtcaacaagatgtcagcccttccagtggcagtaccaaggatgctcattggacttttcttctgtga

SEQ ID NO: 121981 - DNA, 3192 bp, Homo sapiens; identical to SEQ ID NO: 118064

SEQ ID NO: 121982 - DNA, 3485 bp, Homo sapiens
atgggaacctctgaagtgcagaatggagaggagagagctggcaccagcggccagggcagcgtggagcagctcagcggcagctcagtccagctccctcctggcctcaaactctgctttgagccctacttttccagctgtgcttctgactgcattcttcatgccagccccctctccttaatggctgcatcaggctcccaaaaccccaatctgtgggcttcctggttgtgctgcaaatgggttcagtgcccagaacgtcagcttggctgccacctgacttcaagtgtcatctatggcctcaggtactacccccaggccaaacgcagtgaattagaactcagggactgtgagggcctctgcaatcagacatctcccctcagctcacttgatgggatgggctggaaagcagcagcagaagagagcaactctggaatcagaaacatctggattccaattccagcatttgctactcacaagcaatacaatgtcagacaggtgataagcccctctccaccttactggtctcatcgaggaaatggaaataacagcctctgtgtcacaaggttatcaggaggactgaagcaaccagtagcaggcacaggaagaggtttagaaggtgggagcggaacaagggacctgatgccattcttgtcagcagcacccaaggaacagcccccaatcctggcacctgcacgtaggagctggttttttgaaaagatcaacaaaattgatagactgctagcaagactaataaagaagaaaagagagaagaatcaaatagatgcaataaaaaatgataaaggggatatcaccactgatcccacagaaatacaaactatcatcagagaatactataaacacctctatgcaaataaactagaaaatccacaagaaatggataaattcctcaactcttacaccctcccaagactaaaccaggaagaagctgaatctctgaatagaccaataacaggctctgaaattgaggcaataattaatagcttaccaaccaaaaaaagtccaggaccagatggattcacagccaaattctaccagaggtacaaggaggagcttgtacccattccttctgaaactattccaattaatagaaaaagagggaatcctccctaactcattttatgaggccagcatcatcctgataccaaagcctggcagagacacaacaacaacaaaaaaagaattttagaccaatatccttgatgaacattgatgcaaaaatcctcaataaaatactggcaaaccgaatccagcagcacatcaaaaagcttatccaccatgatcaagtgggcttcatccctgggatgcaaggctggttcaacatacgaaaatcaataaacgtaatccagcatataaacagaaccaaacacaaaaaccacatgattatctcaatagatgcagaaaaggcctctgacaaaattcaacaacccttcatgctaaaaactctccgtaaattaggtattgatgagacacaaacagagagccaaatcatgagtgaactcccattcacaattgcttcaaagagaataaaatacctaggaatccaacttacaagggacgtgaaggacctcttcaaggagaactacaaaccactgctcaatgaaataaaagaggatacaaacaaatggaagaactttccatgctcatgggtaggaagaatcaatattgtgaaaatggccatagtgcccaaggtaatttatagattcaatgccagccccatcaagctaccaatgactttcttcacagaattggaaaaaactactttaaagttcatatggaaccaaaaaagagcctgcattgccaagtcaatcctaagccaaaagaacaaagctggaggcatcatgctacctgacttcaaactatactacaaggctacagtaaccaaaacagcatggtactggtaccaaaacagagatatagaccaatggaacagaacagagccctcagaaataacgccgcatatctacaactatctgttctttgacaaacctgacaaaaacaagcaatggggaaaggattccctatttaataaatggtgctgggaaaactggctagccatatgtagaaagctgaaattggatcctgtacttacaccttatacaaaaattaattcaagatggattaaagacttacatgttagacctaaaaccataaaaaccctagaagaaaacctaggcattaccattcaggacataggcatgggcaaggacttcatgtctaaaacaccaaaagcaatggcaacaaaagccaaaattgacaaatgggatctaattaaactaaagagcttctgcacagcaaaagaaactaccatcagagtgaacaggcaacctacagaatgggagaaaatttttgcaacctactcatctgacaaagggctaatatccagaatctacaatgaactcaaacaaatttacaagaaaaaaacaaacaaccccatcaaaaagtgggcgaaggacatgaacagacacttctcaaaagaagacatttatgcagacaaaaagcacatgaaaaaatgctcatcatcactgatcatcagagaaatgcaagtcaaaaccacaatgagataccatctcacaccagttagaatggcgatcattaaaaagtcaggaaacaacagcctctttagaggtcatggagccaaagaatcttatgttgacaaggacaagaggggccatctacattcaggagttccttttcaaaagtccccagcaggatttgcaaaagctgagagaggatccaggagaagtgtagtagctgcaggcctgctgccgtctctcaccagcaacatgagccggcagacaaatgacaacacatgcacggctgccacagtgccgagctaccgaatgcacagacaatatgatgctgtcctgtcctgtgcaagatgtctcttgtggcccaccctaactggaattatgcagaaaagggaattctgggaagcacagttcagccttgccatggtgacatgtaacaatgtggcaggccagaccccaccccatacaacagaaccaagaaagaaaaaaggtgtgatggcaaaactctctggggctttcactggcaaatctgtcttctcaggtgagagctcaatgggagaggaaagccctgcaggaatgcgaaatggaacaggtgctagggtggggcaggaggagagggtgggagttgggaaggaaaggcagctgaggaagaaagaactggaggtgggactccctgaattagaatctccagggagtgaggccagagtggtgtcgagctgcatgtccccctctgatgcgcaggcatatttgggacaccactccccgcccccagctgtgggccacctgggaacttgcttggctacctctagatatactgattcctgtaccttccagtggttctgtttgctgtctggatacatttggtctttgcctactcaatgtgaagatggcgaggatgaagacctttatgatggtccacttccatttaatgaatggtaa

SEQ ID NO: 121983 - DNA, 1948 bp, Homo sapiens
aatctcactcaaaaccgctcaactacatggaaactgaacaacctgctcctgaatgactactgggtacataacaaaatgaaggcagaaataaagatgttctttgaaaccaacgagaacaaagatacaacataccagaatctctgggacacattcaaagcagtgtgtagagggaaatttatagcactaaatgcccacaagagaaagcaggaaagatctaaaattgacaccctaacatcacaattaaaagaactagaaaagcaagagcaaacacattcaaaagctagcagaaggcaagaaataactaaaatcagagcagaactgaaggaaatagagacacaaaaaacctttcaaaaagttaatgaatccagcagctggttttttgaaaggatcaacaaaattgatagaccgctagcaagactaataaagaaaaaaagagagaagaatcaaatagatgcaataaaaaatgataaagggtatatcaccaccgatcccacagaaatacacactaccatcagagaatactacaaacacctctatgcaaataaactagaaaatctagaagaaatggataaattcgtcggcacatacactctcccaagactaaaccaggaagaagttgaatctctgaatagaccaataacaggctctgaaattgtggcaataatcaatagcttaccaaccaaaaagagtccaggaccagatggattcacagccgaattctaccagaggtacaaggaggaactggcgggcagagacacaaccaaaaaagagaattttagaccaatatccttgatgaacattgatgcaaaaatcctcaataaaatactggcaaaccgaatccagcagcacatcaaaaagcttatccaccatgatcaagtgggcttcatccctgggatgcaaggctggttcaatatatgcaaatcaataaatgtaatccagcatataaacagaaccaaagacaaaaaccacatgattatctcaatagatgcagaaaaggcctttgacaaaattcaacaacctttcatgctaaaaactctcaataaattagtgttggaagttctggccagggcaattagtcaggagaaggaaataaagggtattcaattaggaaaagaggaagtcaaattgtccctgtttgcagacgacatgattgtatatctagaaaaccccattgtctcagcccaaaatctccttaagctgataagcaacttcagcaaagtctcaggatacaaaatcaatgtacaaaaatcgcaagcattcttatacaccaataacagacaaacagagagccaaatcatgagtgaactcccattcacaattgcttcaaagagaataaaatacctaggaatccaacttacaagggatgtgaaggacctcttcaaggagaactacaaactactgagcaaggaaataaaagaggatacaaacaaatggaagaatattccatgctcatgggtaggaagaatcaatatcgtgaaaatggccatactgcccaaggtaatttacagattcaatgccatccccatcaagctaccaatgactttcttcacagaattggaaaaagctactttaaagttcatatggaaccaaaaaagagcccgcattgccaagtcaatcctaagccaaaagaacaaagctggaggcatcacactacctgacttcgaactatactacaagactacagtaaccaaaacagcatggtactcataccaaaacagagataatagatcaatggaacagaacagagccctcagaaataacgccgcatatctacaactatctgatctttgacaaacctgagaaaaacaagcaatggggaaaggattccctatttaataaatggtgctgggaaaactggctagccatatgtagaaagctgaaactggatcccttccttacaccttatacaaaaatcaattcaagatggattaaagacttaaaacgttag

SEQ ID NO: 121984 - DNA, 4802 bp, Homo sapiens
atgggagactttaacaccccactgtcaacattagacagatcaacgagacagaaagtcaacaaggatacccaggaactgaactcagctctgcaccaagcggacctaatagacatctacagaacactccaccccaaatcaacagaatatacatttttttcagcaccacaccacacctattccaaaattgaccacatactgggaagtaaagctctcctcagcaaatgtaaaagagcagaaattataacaaactatctctcagaccacagtgcaatcaaactagaactcaggattaagaatctcactcaaagccgctcaactacatggaaactgaacaacctgctcctgaatgactactgggtaaataacgaaatgaaggcagaaataaagatgttctttgaaaccaaaagagaacaaaggacacaacataccagaatctctgggacgcattcaaagcagtgtgtagagggaaatttatagcactaaatgcgcacaagagaaagcaggaaagatctaaaattgacaccctaacatcacaattaaaagaactagaaaagcaagagcaaacacattcaaaagctagcagaaggcaagaaataactaaaatcagagcagaactgaaggaaatagagacacaaaaaacccttcaaaaaatcaatgaatccaggagctggttttttgaaaggatcaacaaaattgatagaccgctagcaagactaataaagaaaaaaagagagaagaatcaaatagacacaataaaaaatgataaaggggatatcaccactgatcccacagaaatacaaactaccatcagagaatactacaaacacctctacgcaaataaactagaaaatctagaacaaatggatgcattcctcgacacatacactctcccaagactaaaccaggaagaagttgagtctctgaatagaccaataacaggagctgaaattgtggcaataatcaatagtttaccaaccaaaaagagtccaggaccagatggattcacagccgaattctcccagaggtacaaggaggaactggtaccattccttctgaaactattccaatcaatagaaaaagagggaatcctccctaactcattttatgaggccagcatcattctgataccaaagccaggcagagacacaaccaaaaaagagaattttagaccaatatccttgatgaacatcgatgcaaaaatcctcaataaaatactggcaaaccgaatccagcagcacatcaaaaagcttatccaccatgatcaagtgggcgtcatccctgggatgcaaggctggttcagtatacgcaaatcaataaatgtaatccagcatataaacagagccaaagacaaaaaccatatgattatctcaatagatgcagaaaaagcctttgacaaaattcaacaacccttcatgctaaaaactctcaataaattagcccaaaatctccttaagctgataagcaacttcagcaaagtctcaggatacaaaatcaatgtacaaaaatcacaagcattcctatacaccaacaacagacaaacagagagccaaatcatgagtgaactcccattcacaattgcttcaaagagaataaaatacctaggaatccaacttacaagggatgtgaaggacctcttcaaggagaactacaaaccactgctcaaggaaataaaagaggatacaaacaaatggaagaacattccatgctcatgggtaggaagaatcaatatcgtgaaaatggccatactgccccaggtaatttacagattcaatgccatccccatcaagctaccaatgactttcttcacagaattggaaaaaactactttcaagttcatatggaaccaaaaaagagcccgcatcgcccaagtccaatccctaagcccaaaagaacaaaagccgggggcatcaaccctacctgacttcaaactatactacaaggctactgtaaccaaaacagcatggtactggtaccaaaacagagatatagatcaatgggacagaacagagccctcagaaataacgccgcacatctacaactatgtgatctttgacaaacctgagaaaagcaagcaatggggaaaggattccctatttaataaatggtgctgggaaaactggatagccatatgtagaaagctgaaactggatcccttccttacgccttatacaaaaatcaattcaagatggattaaagacttaaatgttagacctaaaaccataaaaaccctagaagaaaacctaggcattaccattcaggacataggcacgggcaaggacttcatgtctaaaacaccaaaagcaatggcaacaaaagccaaaattgacaaacgggatctaattaaactaaacagcttctgcacagcaaaagaaactaccatcagagtgaacaggcaacctacaaaatgggagaaaattttcacaacctactcatctgacaaagggctaatatccagaatctacaatgaactcaaacaaatctacaagaaaaaaacaaacaaccccatcaaaaagtgggcgaaggacatgaacagacacttctcaaaagaacacatttatgcagccaaaaaacacatgaaaaaatgctcaccatcactggccatcagagaaatgcaaatcaaaaccacaatgagataccatctcacaccagttagaatggcaatcattaaaaagtcaggaaacaacaggtgctggagaggatgtggagaaataggaacacttttacactgttggtgggactgtaaactagttcaaccattgtggaagtcagtgtggcgattcctcagggatctagaactagaaataccatttgacccagccatcccattactgggtatatacccaaaggactataaatcatgctgctataaagatacatgcacacctctcaagaaacacatcagctttcatctttatcagtatgacactgacatgataggaaatgctgggctggtgattcagcagccatccattttacagtcagaggacaagtcgtacaatggtggaggaataggttcttcaaataggatcatggacttcttggaggagccaatccctggtgtagggacctatgatgatttcaatacaattgattgggtgagagagaagtctcgagaccgggataggcaccgagagggagcctttgcctacatagtcaattatttcatgtacgtcctctgggctctcctatttgccttccttgccgtatctcttgtcaaggtgtttgcgccttatgcctgtggctctggaatccctgagataaaaactatcttgagtggtttcattattaggggctatttgggtaagtggactctggttatcaaaaccatcaccttggtgctggcagtgtcgtctggcttgagcctgggcaaagagggccctctagtgcacgtggcttgctgctgtgggaacatcctgtgccactgcttcaacaaatacaggaagaatgaagccaagcgcagagaggtcttgtcggctgcagcagcagctggtgtatctgtagcctttggagcacctataggtggagtattattcagccttgaagaggtcagctactattttcccctcaaaacattgtggcgttcattctttgctgccttggtggcagcattcactctacgctccatcaatccatttgggaacagccgcctggtactattttatgtggagtttcacaccccatggcatctctttgagctcgtgccattcattctgctgggcatatttggtggtctgtggggagcactgtttatccgcacaaacattgcctggtgtcggaagcgaaagaccacccagttgggcaagtatcctgttatagaggtactcgtcgtgacagccatcactgccatcctggctttccccaatgaatacactcggatgagcacaagtgagctcatttctgagctgtttaatgactgtggccttctggactcctccaagctctgtgattatgagaaccgtttcaacacaagcaaagggggtgaactgcctgacagaccggctggcgtgggagtctacagtgcaatgtggcagctggctttaacactcatactgaaaattgtcattactatattcacctttggcatgaagatcccttctggcctctttatccctagcatggctgttggtgctatagcaggtcgacttctaggagtaggaatggaacagctggcttattaccaccaggaatggaccgtcttcaatagctggtgtagtcagggagctgattgcatcacccccggcctttatgcaatggttggggctgcagcctgcttagccaaagaagagtttgctcataagaccctggcaatggatgtgatgaaaccccggagaaatgatcctttgttgactgtccttactcaggacagtatgactgtggaagatgtagagaccataatcagtgaaaccacttacagtggcttcccagtggtggtatcccgggagtcccaaagacttgtgggctttgtcctccgaagagatctcattatttcaattgaaaatgctcgaaagaaacaggatggggttgttagcacttccatcatttatttcacggagcattctcctccattgccaccatacactccacccactctaaagcttcggaacatcctcgatctcagccccttcactgtgactgaccttacacccatggagatcgtagtggatattttccgaaagctgggactgcggcagtgcctggttacacacaacgggcgattgcttggaatcattaccaaaaaggatgtgttaaagcatatagcacagatggcgaaccaagatcctgattccattctcttcaactag

SEQ ID NO: 121985 - DNA, 3148 bp, Homo sapiens
atgggagactttaacaccccactgtcaacattagacagatcatcgagacagaaagttaacaaggatacccaggaattgaactcaactctgcaccatgcggacctaatagacatctacagaactctccacccgaaatcaactgaatatacatttttttcagcaccacaccacacctattccaaaattgaccacgtagttggaagtaaagctctcctcagcaaatgtaaaagaacagaaattataacaaactgtctctcagaccacagtgctatcaaaccagaactcaggattaagaaactcactcaaaaccgctcaactacatggaaactgaataacctgctcctgaatgactactgggtgcataacaaaatgaaggcagaaataaagatgttctttgaaaccaacgagaacaaagacacaacataccagaatctctgggacacattcaaagcagtgagtagagggaaatttatagcactaaatgcccacaagagaaagcagaaaagatgcaaaattgacaccctagcatcacaattaaaagaagtagaaaagcaagagcaaacacattcaaaagctagcagaaggcaagaaataactaaaataagagcagaactgaaggaaatagagacacaaaaaacccttcaaaaaattaatgaatccaggagctggtttcttgaaaggatcaacaaaattgatagaccactagcaagactaataaagaagaaaagagagaagaatcaaatagatgtaataaaaaatgataaaggggatatcaccactgatcccacagaaatacaaactaccatcagagaatactacaaacacctctacgcaaataaactagaaaatctagaagaactggataaattcctcgacacacacaccctccaaagactaaaccaggaagaagttgaatccctgaatagaccaataacaggctctgaaattgtggcaataatcaatagcttaccaaccaaaaagagtccaggaccagatggatccacagccgaattctaccagaggtacaaggaggagctgttaccattccttcttaaattattccaatcaatagaaaaagagggaatcctccctaactcattttatgaggccagcatcatcctgataccaaagccgggcagagacacagccaaaaaagagaattttagaccaatatccttgatgaacattgatgcaaaaatcctcaataaaatactggcaaaccaaatccagcagcacatcaaaaagcttatatacaccatgatcaagtgggcttcatccctgggatgcaaggctgtgttggaagttctggccagggcaattaggcaggagaaggaaataaagggtattcaattaggaaaagaggaagtcaaattgtccctgtttgcagatgacatgattgtatatctagaaaaccccatcgtctcagcccaaaatctccttaagctgataagcaacttcagtaaagtctcaggatacaaaatcaatgtacaaaaatcacaagcattcttatacaccaataacagacaaacagagagccaaatcatgagtgaaatcccattcacaattgtttcaaagagaataaaatacctaggaatccaacttacaagggacatgaaggacctcttcaaggagaactacaaaccactgctcaatgaaataaaagaggatacaaacaaatggaagaacattccatgctcatggctaggaagaatcaatatggtgaaaatggccatactgcccaaggtaatttatagattcaatgccatcctcatcaagctagcaatgactttcttcacagaatcggaaaaaactactttaaagttcatatggaaccaaaaaagagcctgcatcgccaagtcaatcctaagccaaaagaacaaagtcataggcatcacgctacctgacttcaaactatactacaaggctatagtcaacaaaacagcatggtactggtaccaaaacagagatatagatcaatggaacagaacagagccctcagaaataacaccgcatatctacaactatctgatctttgacaaacctgagaaaaacaagcaatggggaaaggattccctatttaataaatggtgctgggaaaactggctagccatatgtagaaagctgaaactggatcccttccttacaccttatacaaaaattaattcaagatggattaaagacttccatgttagacctaaaaccataaaaaccctagaagaaaacctaggcattaccattcaggacataggcatggacaaggacttcatgtctaaaacaccaaaagcaatggcaacaaaagccaaaattgacaaatgggatctaatcaaactaaagagcttctgcagagcaaaagaaactaccatcagagtgaacaggccacctacagaatgggagaaaattttcgtaacctactcatctgacaaagggctaatatccagaatctacaatgaactcaaacaaatttacaagaaaaaaacaaacaaccccatcaaaaagtgggcaaaggacatgaacagacacttctcaaaagaatacatttatgcagccaaaaaacacgtggaaaaaacgctcatcatcactggccatcagagaaatgcaaatcaaatccacaatgagataccatctcacaccagttagaatggtgatcattaaaaagtcaggaaacaacaggtgctggagaggatgtggagaaataggaacacttttacactgttggtgggactgtaaactagttcatccattgtggaagtcagtgtggcgattcctcagggatctagaactagaaataccatttgacccagccatcctattactgggtatatacccaaaggattataaatcatgctgctataaagacacatgcacacatgagaaagcagagatccagaaaagtaaaggaatcagagattatggagaaataggtactagaactgaggatatggactcccagttcagacctctttccgttgttcgggcacaaattatcccctttgaatttccctgggaaggaatacctctgggtggacccttcccccggcattcctgcagctaccctgtgggcctagcccttttgtaccacagtagctcagcagctggaccagtgagaggacacctctccctgcagtggaattccaggatgactagttga

SEQ ID NO: 121986 - DNA, 2671 bp, Homo sapiens
atgcacaatacagatggaaacagatttctgagccactggggctaccgtcaagctctctccatctccaagccagcaagtgcttctttgcaccccagctctaaaacaaagcccttggggacacaatcaaagacagtagttgccaagaggaatagggagcatggaaagaaggaacgcagttcctcaccagcaatggaacaaagctggatggagaatgattttgacgagctgagagaagaaggcttcagacgatcaaattactctgagctacgggaggacattcaaaccaaaggcaaagaagttgaaaactttgaaaaaaatttagaagaatgtataactagaataaccaatacagagaagtgcttaaaggagctgatggagctgaaaaccaaggctcgagaactacgtgaagaatgcagaagcctcaggagccgatgcgatcaactggaagaaaggagaaagcaggaaagatccaaaattgacaccctaacatcacaattaaaagaactagaaaagcaagagcaaacacattcaaaagctggcagaaggcaagaaataactaaaatcagagcagaactgaaggaaatagagacacaaaaaacccttcaaaaaatcaatgaatccaggagctggttttttgaaaggatcaacaaaattgatagaccgctagcaagactaataaagaaaaaaagagagaagaatcaaatagacacaataaaaaaatgataaagggaatatcaccaccgatcccacagaaatacaaactaccatcagagaacactataaacacctctatgcaaataaactagaaaatctagaaggaatggataaattcctggacacatacaccctcccaagattaaaccagaaagaagttgaatccctgaatagaccaataacaggctctgaaattgtggcaataatcaatagtttaccaaccaaaaagagtccaggaccagatggattcacagccgaattctaccagaggtacaaggaggaactgcatataaacagagccaaagacaaaaaccacatgattatctcaatagatgcagaaaaagcctttgacaaaattcaacaacccttcatgctaaaaactctcaataaattagtgttggaagttctggccagggcaatcaggcaggagaaggaaataaagggtattcaattaggaaaagaggaagtcaaattgtccctgtttgcagacgacatgatcgtttatctagaaaaccccatcgtctcagcccaaaatctccttaagctgttaagcaacttcagcaaagtctcaggatacaaaatcaatgtacaaaaatcacaagcattcttatacaccaacaacagacaaacagagagccaaatcatgagtgaactcccattcacaattgcttcaaagagaataaaatacctaggaatccaacttacaagggatgtgaagcacctcttcaaggagaactacaaaccactgctcaaggaaataaaagaggacacaaacaaatggaagaacattccatgctcatgggtagaaagaatcaatatcgtgaaaatggccatactgcccaaggtcatttatagattcaatgccatccccatcaagctaccaatgactttcttcacagaattggaaaaaactactttaaagttcatatggaaccaaaaaagagcccgcatcgccaagtcaatcctaagccaaaagaacaaagctggaggcatcacgctacctgacttcaaactatactacaaggctacagtaaccaaaacagcatggtactcgtaccaaaacagagatatagaccaatggaacagaacagagccctcagaaatactgccacgtatctacaactatctgatctttgacaaacctgagaaaaacaagcaatggggaaaggattccctatttaataaatggtgctgggaaaactggctagccatatgtagaaagctgaaactggatcccttccttaaaccttatacaaaaattaagtcaggatggattaaagacttaaatgttagacctaaaaccataaaaaccctagaagaaaacctaggcattaccattcaggacataggcatgggcaaggacttcatgtctaaaacaccaaaagcaatggcaacaaaagcaaaaattgacaaatgggatctaattaaactaaagagcttctgcacagcaaaagaaactaccatcagagtgaaccggcaacctacagaaagggagaaaatttttgcaacctactcatctgacaaagggctaatatccagaatctacaaagaactcaaacaaatttacaagaaaagaacaaacaacctcatcaaaaagtgggtgaaggatatgaacagacacttctcaaaagaagacgtttatgcagccaaaaaacacatgaaaaaatgctcatcatcactggccatcagagaaatgcaaatcaaaaccacaatgagataccatctcacaccagttagaatggcaatcattaaaaagtcaggaaacaacagaataaccattgttctgctccccggttcactaatagtgcggtcatttcacgtaactttaaatgcgattcttcttcatccgggtctcaccctctttagtccgtctgctggccgcagagatatcccaagagtagcattctcctacttggctttttcagctcaaccttctcacaacaccccagttaattaa

SEQ ID NO: 121987 - DNA, 2963 bp, Homo sapiens
atgaataattcaatcaaggaaaaagtgaaactcagtttaactaaatgggaaatgcaaacaaaacctaacaataatactgttgatcttaaagatgcccaagaggtcaatctcacaagcacggattacagaaagcaacatgtcatgctgcctaccgaaatcaattcagacgactctcttttaaaaattggggttattagactggcaaattggataaagagtcaagacccatcagtgtgctgtaatcaggaaacccatctcacgtgcagagacacacataggctcaaaataaaaggatggaggaagatctaccaagcaaatggaaaacaaaaaaaggcaggggttgcaatcctagtctccgataaaacagacttcaaaccaacaaagatcaaaagagacaaagaaggccattacataatggtaaagggatcaattcaacaagaagagctaactatcctaaatacatatgcacccaatacaggagcacccagattcataaagcaagtcctgagtgacctacaaagagacttagactcctacacattaataatgggagactttaacaccccactgtcaacattagacagatcaacgagacagaaagtcaacaaggatacccaggaattgaactcagctctgcaccaagtggacctaatagacatctacagaactctccaccccaagtcaacagaatatacatttttttcagcaccacaccacacctattccaaaattgaccacatacttggaagtaaagctctcctcagcaaatgtaaaagaacagaaattataacaaactatctctcagaccacagtgcaatcaaactagaactcaggattaagaatctcattcaaaaacgctcaactacatggaaactgaacaaactgctcctgaacgactactgggtacataacgaactgaaggcagaaataaagatgttctttgaaaccaacgagaacaaagacacaacataccagaatctctgggacgcattcaaagcagtgtgtagagggaaatttatagcactaaacgcccacaagagaaagcaggaaagatccaaaattgacaccctaacattacaattaaaagcactagaaaagcaagagcaaacacattcaaaagctagcagaaggcaagaaataactaaaatcagagcagaactgaaggaaatagagacacaaaaaacccttcaaaaaattaatgaatccaggagctggttttttgaaaggatcaacaaaattgataaaccgctagcaagactaataaagaaaaaaagagagaagaatcaaatagacacaataaaaaatgatagaggggatatcaccaccgatcccacagaaatacagactaccatcagagaatactacaaacacctctatgcaaataaactagaaaatctagaagaaatggataaattcctcgacacatacactctcccaagactaaaccaggaagaagttgaatctctgaatagaccaataacaggatctgaaattgtggcaataatcaatagcttaccaacgaaaaagagtccaggaccagatggattcacagccgaattctaccagaggtacaagcaggaactgcatataaacagagccaaagacaaaaaccacatgattatctcaatagatgcagaaaaagcctttgacaaaattcaacaacccttcatgctaaaaactctcaataaattaggtattgatgggacgtatttcaaaataataagagctatctatgacaaacccacagccaatatcatactgaatgggcaaaaactggaagcattccctttgaaaactggcacaagacagggatgccctctctcaccggtcctattcaacatagtgttggaagttctggccagggcaattaagcaggagaaggaaataaagggtattcaattaggaaaagaggaagtcaaattgtccctgtttgcagacgacatgattgtatatctagaaaaccccattgtctcaggccaaaatctccttaagctgataagcaacttcagcaaagtctcaggatacaaaatcaacgtacaaaaatcacaagcattcttatacaccagcaacagacaaacagagagccaaatcatgagtgaactcccattcacaattgcttcaaagagaataaaatacctaggaatccaacttacaagggacgtgaaggacctcttcaaggagaactacaaaccactgctcaaggaaataaaagaggatacaaacaaatggaagaacattccatgctcatgggcaggaagaatcaatatcgtgaaaatggccatactgcccaaggtaatttacagattcaatgccatccccatcaagctaccaatgcctttcttcacagaaatggaaaaaaactactttaaagttcatatggaaccaaaaaagagcccgcatcaccaagtcaatcctaagccaaaagaacaaagctggaggcatcacactacctgacttcaaactatactacaaggctacagtaaccaaaacagcatggtactggtaccaaaacagagatatagatcaatggaacagaacagagccctcagaaataatgctgcatatctacaactatgtgatctttgataaacctgagaaaaacaagcaatggggaaaaggattccctatttaataaatggtgctgggaaaactggctagtcatatgtagaaagctgaaactggatcgcttccttacaccttatacaaaaattaattcaagatggcttaaagacttagacattagacctaaaaccataaaaaccctagaagaaaacatacgcattaccattcaggacataggcatgggcaaggacttcatgtctaaaacaccaaaaggaatggcaatgaaagccaaaattgacaaatgggatctaattaaactaaagagcttctgcacagcaaaagaaactaccatcagagtgaacaggcaacctacaaaatgggagaaaattttcgcaacctaa

SEQ ID NO: 121988 - DNA, 4220 bp, Homo sapiens
atgggagactttaacaccctactgtcagcattagacagatcaacgagacagaaagttaacaaggatattcaggaattgaactcagctctgcaccaagcagacctaatagacatctacagaactctccaccccaaatcaacagaatatacattcttctcagcaccacaccgcacttattccaaaattgaccacttagttggaagtaaagcactcctcaggaaatgtaaaagaacagaaattataacaaactgtctctcagaccacagtgcaatcaaactagaactcaggattaagaaactcactcaaaaccactcaactacatggcaactgaacaacctgctcttgaatgactactgggtacataacgaaatgaaggcagaaataaagatgttctttgaaaccaatgaaaacaaagacacaacataccagaatctctggtatgtcaaagataccagaatctctggtatgctctggtatgtgaaagcagtgtgtagagggaaatttatagcactaaatgcccacaagagaaagcaggaaagatctaaaattgacaccctaacatcacaattaaaagaactagagaagcaagagcaaacacattcaaaaactagcagaaggcaagaaataactaagatcagagcagaactgaaggaaatagagacacaaaaaacccttcaaaaaatcaatgaatgcaggagctggttttttgaaaagatcaacaaaattgatagaccgctagcaagactaattaagaagaaaagagagaagaatcaaatagatgcaataaaaaatgacaaaggggatatcatcaccgatcccacagaaatacaaactaccatcagagaatactataaacacctctacggaaataaactagaaaatctagaagaaatggataaattcctggacacatacaccctcccaagactaaaccaggaagaagttgaatctctgaatagaccaataacaggctctgaaattgaggcaataattaatagcttaccaaccaaaaaaagtccaggaccagatggattcacagccgaattctaccagaggtacaaggaggagctgagaataaaatacctaggaattcaacttacaagggacgtgaaggaccttttcaaggagaactacaaaccactgctcaatgaaataaaagaggatacaaacaaatggaagaacattccatgctcatgggtaggaagaaatcaatatcatgaaaatggccatactgcccaaggtaatttatagattcaatgccatccccatcaagctaccaatgactttcttcacagaattggaaaaaactactttaaagttcatatggaaccaaaaaagagcccgcatcgccaagtcaatcctaagccaaaagaacaaagctggaggcatcacgctacctgacttcaaactatactacaaggctacagtaaccaaaacagcatggtactggtaccaaaacagagatacagatcaatggaacagaacagagccctcagaaataatgctgcatatctacaaccatctgatctttgacaaacctgacaaaaacaagcaatggggaaaggattccctatttaataaatggtgctgggaaaactggctagccatatgtagaaagctgaaactggatcccttccttataccttatacaaaaattaattcaagatggattaaagacttaaacgttagacctaaaaccataaaatccctagaagaagacctaggcaataccattcaggacataggcatgggcaaggacttcatgtctaaaacaccaaaagcaatggcaacaaaagccaaaattgacaaatgggatctaattaaactaaagagcttctgcacagcaaaagaaactaccatcagagtgaacaggcaacctacagaatgggagaaattttttgcaatctactcttctgacaaagggctcatatccagaaggtacaatgaactcaaacaaatttacaagaaaaaaacaaacagccccatcaaaaagtggacaaaggatatgaacagacacttctcaaaagaagacatttatgcagccaaaagacacatgaaaaaatgctcatcatcactggccatcagagaaatgcaaatcaaaaccacaatgagataccatctcacaccagttagaatggcgatcattaaaaagtcaggaaacaacaggtgctggagaggatgtggagaaataggaacacttttacactgttgggtggactgttctattattgtcaaggtcccatcttcacttcaagctcatttacagttatcagggaaagaggttgatgtgaactcagaagtccatgttcaggaaatggctgaagttcgtaaagatgatgttgtaacagtgactgaattctaccagacattcaaagaagaattggtaccaatcctattgacactattccgcaagacagagaaagaaggaacactccctaattcatcctatgaagctagcatcaccctaataccaaaaccaggaaaggatacaaccaaaaaagaaaactacaggctgatatccctgatgaacacagacgctaaaattcttaacaaaatactagctaaccgaatccaacaacatatcaaaaagacaatccaccatgatcaagtgggttccataccagggatggagggatggtttaacatatgcaagtcaataaatgtgatacaccacataaacagaattaaaaacaaaaatcacatgatcatctcaatagatgcagaaaaagcattagacaaaatccagcatctctttatgattaaaactctcagcaaaatcggcatacaagggacatacctcaatgtaataaaagccatctatgacaaacccacagctaacataatactgaatggggaaaagttgaaagcattccctctgagaaatgaaacaagacaaggatgccctctctcaccactcctcttcaacacagtactgaaagtcctagccagagcagtcagacaagagaaggaaataaagggtatccaaattggtaaagaggaagtcatactgtcactgtttgctgatgatatgattgtttacctcaaaaaccctaaagactcctctagaaagctcctagaactgataaaaggattcaacaaagtttccagatacaaaattaatgtacacaaatcagtagctcttctaaacaccaacagcaaccaagcagagaatcaaatcaataactcaaccccttttacaatagctgcaaaaaaaaatgaagtacttaggaatatacctagccaaggaggtgaaagacctctacaaggaaaactacaaaccactgctcaaggaaataaaagaggatacaaacaaatggaagaacattccctgctcatgggtaggaagaatcaatatcgtgaaaatggcctcactgcccaagaattggaaaaaaactactttaaagtttatatggaaccaaaaaagaacctgcatcgccaagtcaatcctaagccaaaagaacaaagctggaggcatcacactacctgacttcaaactatactacaaggctacagtaaccaaaagagcatggtactggtaccaaaacagagatatagatcaatggaacagaacagagccctcagaaataacgccacagatctacaactatctgatctttgacaaacctgagaaaaacaagcaatggggaaaggattccctatttaataaatggtgctgggaaaactggctagccatatgtagaaagctgaaactggatcccttccttataccttatacaaaaatcaattcaagatggattaaagtcttaaatgttagacctaaaaccataaaaaccctagaagaaaacctaggcattaccattcaggacatagacatgggcaaggacttcatgtccaaaacaccaaaaggaatggcaacaaaagccaaaattgacaaatgggatctaattaaactaaagaacttctgcacagcaaaagaaactaccatcagagtgaacaggcaacctacaaaatgggagaaaattttcgcaacatacttatctgataaagggctaatatccagaatctacaatgaactcaaacaaattgacaagaaaaaaacaaccaaaccccatcaaaaagtgggcaaaggacatgaacagacacttctcaaaagaagacatttatgcagccaaaaaacacatgaaaaaatgttcatcgtcactggccatcagagaaatgcaaatcaaaaccacaatgagataccatctcacaccagttag

SEQ ID NO: 121989 - DNA, 3256 bp, Homo sapiens
atggggaaaaaacagaacagaaaaactggaaactctaaaacgcagagcgcctctcctcctccaaaggaacgcagttcctcaccagcaacggaacaaagctggatggagaatgattttgacgagctgagagaagaaggcttcagacgatcaaattactctgagctacgggaggacattcaaaccaaaggcaaagaagttgaaaactttgaaaaaaatttagaagaatgtataactagaataaccaatacagagaagtgcttaaaggagctgatggagctgaaaaccaaggctcgagaactacgtgaagaatgcagaagcctcaggagccgatgcgatcaactggaagaaagggtatcagcaatggaagatgaaatgaatgaaatgaagcgagaagggaagtttagagaaaaaagaataaaaagaaatgagcaaagcctccaagaaatatgggactatgtgaaaagaccaaatctacgtctgattggtgtacctgaaagtgatgtggagaatggaaccaagttggaaaacactctgcgggatattatccaggagaacttccccaatctagcaaggcaggccaacgttcagattcaggaaatacagagaacgccacaaagatactcctcgagaagagcaactccaagacacataattgtcagattcaccaaagttgaaatgaaggaaaaaatgttaagggcagccagagagaaagacagatcaacgagacagaaagtcaacaaggatacccaggaattgaactcagctctgcaccaagcggacctaatagacatctacagaactctccaccccaaatcaacagaatatacatttttttcagcaccacaccacacctattccaaaattgaccacatagttggaagtaaaactctcctcagcaaatgtaaaagaacagaaattataacaaactatctctcagaccacagtgcaatcaaactagaactcaggattaagaatctcactcaaagccgctcaactacatggaaactgaacaacctgctcctgaatgactactgggtacataacgaaatgaaggcagaaataaagatgttctttgaaaccaacgagaacaaagacaccacataccagaatctctgggacgcattcaaagcagtgtgtagagggaaatttatagcactaaatgcctacaagagaaagcaggaaagatccaaaattgacaccctaacatctcaattaaaagaactagaaaagcaagagcaaacacattcaaaagctagcagaaggcaagaaataactaaaatcagagcagaactgaaggaaatagagacacaaaaaacccttcaaaaaatcaatgaatccaggagctggttttttgaaaggatcaacaaaattgatagaccgctagcaagactaataaagaataaaagagagaagaatcaaatagacacaataaaaaatgataaaggggatatcaccaccaatcccacagaaatacaaactaccatcagagaatactacaaacacctctatgcaaataaactagaaaatctagaagaaatggatacattcctcgacacatacactctcccaagactaaaccaggaagaagttgaatctctgaatagaccaataacaggctctgaaattgtggcaataatcaatagtttaccaaccaaaaagagtccaggaccagatggattcacagccgaattctaccagaggtacaaggaggaactggtaccattccttctgaaactattccaatcaatagaaaaagagggaatcctccctaactcattttatgaggccagcatcattctgataccaaagccgggcagagacacaaccaaaaaagagaattttagaccaatatccttgatgaacattgatgcaaaaatcctcaataaaatactggcaaaccgaatccagcagcacatcaaaaagcttatccaccatgatcaagtgggcttcatccctgggatgcaaggctggttcaatatacacaaatcaataaatgtaatccagcatataaacagagccaaagacaaaaaccacatgattatctcaatagatgaagaaaaagcctttgacaaaattcaacaacccttcatgctaaaaactctcaataaattagagaataaaatacctaggaatccaacttacaagggatgtgaaggacctcttcaaggagaggtccttgaaccactgctcaatgaaataaaagaggatacaaacaaatggaagaacattccatgctcatgggtaggaagaatcaatatcgtgaaaatggccatactgcccaaggtaatttatagattcaatgccatccccccttcaaggttacccaatgactttcttcacagaattggaaaaaactaccttttaaaggtcattatggaaccaaaaaaggagcccgcatcgccaaggcaatcctaagccaaaagaacaaagctggaggcatcacactacctgacttcaaactatactacaaggctacagtaaccaaaacagcatggtactggtaccaaaacagagatatagatcaatggaacagaacagagccctcagaaataacgccgcatatctacaactatctgatctttgacaaacctgagtaaaacaagcaatggggaaaggattccctatttaataaatggtgctgggaaaaactggctagccatatgtagaaagctgaaattgaatcccttccttacaccttatacaaaaatcaattcaagatggattaaagatttaaacgttagacctaaaaccataaaagaccctagaagaaaacctaggcattgccattcaggacataggcatgggcaaggacttcatgtctaaaacaccaaaagcaatggcaacaaaagacaaaattgacaaacgggatccgattgaactaaagagcttctgcacagcaaaggaaaatatcatcggaatgaacaggcaacctacaaaatgggagaaaattttcgcaacctactcatctgacaaagggctaatatccagagtctacagtgaactcaaacaaatttacaggaaaaggacaaacaaccccatcaaaaagtggggcaaggacatgaacagacacttctcaaaagaagacatttatgcagccaaaaaacacatgaaaaaatgctcatcatcactggccatcagagaaatgcaaatcaaaaccactatgagatatcatctcacaccagttagaatggcaatcattaaaaagtcaggaaacaacagggacatggatgatattggaaatcatcgttctcagtaa

SEQ ID NO: 121990 - DNA, 3229 bp, Homo sapiens
atgggagactttaacaccccactgtcaacattagacagatcaacgagacagaaagccaacaaggatacccaggaattgaactcagctctgcaccaagtggacctaatagacatctacagaactctccaccccaaatcaacagaatatacattcttttcagcaccacaccacacctattccacaactgaccacatacttggaagtaaagctctcctcagcaaatgtagaagaacagaaattataacaaactatctctcagaccacagtgcaatcaaactagaactcagaattaagaatctcactcaaaaccgctcaactacatggaaactgaacaacctcctcctgaatgactacggggtgcataatgaaatgaaggcagaaataaagatgttctttgaaaccaatgagaacaaagacacaacataccagaatctcttgggacgcattcaaagcagtgtgtagagggaaatttatagcactaaatgcccacaagagaaagcaggaaagatccaaaattgacaccctaacatcacaattaaaagaactagaaaagcaagagcaaacacattcaaaagctagcagaaggcaagaaataactaaaatcagagcagaactgaaggaaatagagacacaaaaatcccttcaaaaaaatcaatgaatccaggagctggttttttgaaaggatcaacaaaattgatagaccactagcaagactaataaagaaaaaaagagagaagaatcaaatagacacaataaaaaatgataaaggggatatcaccaccgatcccacagaaatacaaactaccatcagagaatactacaaacacctctatgctaataaactaaaaaatctagaagaaatggataaattcctcgacacatacaccctcccaagactaaaccaggaagaagttgaatctctgaatagaccaataacaggatctgaaattgtgacaataatcaatagcttaccaaccaaaaagagtccaggaccagatggattcacagccgaattctaccagaggtacaaggaggaactggtaccattccttctgaaactattccaatcaatagaaaaagagggaatcctccctaactcattttatgaggccagcatcattctgataccaaagccaggcagagacacaaccaaaaaagagaattttagaccaatatccttgatgaacattgatgcaaaaatcctcaataaaatactggcaaaccgaatccagcagcacatcaaaaagcttatccaccatgatcaagtgggcttcatccctgggatgcaaggctggttcaatatacgcaaatcaataaattgtaatccagcatataaacagagccaaagacaaaaaccacatgattatctcaatagatgcagaaaaagcctttgacaaaattcaacaacgcttcaggctaaaaactctcaataaattaggtattgatgggacgtatttcaaaataataagagctatctatgacaaacccacagccaatatcatactgaatgggcaaaaactgaaagcattccctttgaaaactggcacaagacagggatgccctctctcaccactcctattcaacatagtgttggaagctctggccagggcaattaggcaggagaaggaaataaaggcccaaaatctccttaagctgataagcaacttcagcaaagtctcaggatacaaaatcaatgtacaaaaatcacaagcattcttatacaccaataacagacaaacagagagccaaatcatgagtgaactcccattcataattgcttcaaagagaataaaatacctaggaatccaacttacaagggacgtgaaggacctcttcaaggagaactacaaaccactgatcaaggaaataaaagaggatacaaacaaacggaagaacattccatgctcacgggtaggaagaatcaatatcgtgaaaatggccatactgcccaaggtaatttacagattcaatgccatccccatcaagctaccaatgactttcttcacagaattggaaaaaactactttaaagttcatatggaaccaaaaaagagcccacatcgccaagtcaatcctaagccaaaagaacaaagctgggggcatcacactacctgacttcaaactatactacaaggctacagtaaccaaaacagcatggtactcgtaccaaaacagagatatagatcaatggaacagaacagagccctcagaaataacgccacatatctacaactatctgatctttgacaaacctgagaaaaacaagcaatggggaaaggattccctatttaataaatggggctgggaaaactggctagccatatggagaaagctgaaactggatcccttccttacaccttatacaaaaatcaattcaagatggattaaagacttaaacgttagacctaaaaccataaaaaccctagaagaaaacctaggcattaccattcaggacataggcatgggcaaggacttcatgtctaaaacaccaaaagcaatggcaacaaaagacaaaattgacaaatgggatctaatgaaactaaagagcttctgcacagcaaaagaaactaccatcagagtgaacaggcaacctacagagaggggagaaaattttcgcaacctactcatctgacaaagggctaatatccagaatccacaatgaactcaaacaaatttacaagaaaaaaacaaacaaccccaacaaaacgtgggcgaaggacatgaacagacacttctcaaaagaagacatttatgcagccaaaaaacacatgaaaaaatgctcatcatcactggccatcagagaaatgcaaatcaaaaccacaatgagataccatctcacaccagttagaatggcagtcattaaaaagtcaggaaacaacagggacatggatgaaactggaaaccatcattctcagcaaactgtcacaaggacaaaaaaccaaacaccgcatattctcactcatacgtgggaactgaacaatgagatcacatggacacaggaaggagaatatcacactctggggactgtgacatcagaactccaggttctctggtctttggattctgggacttacagcagtgggccccttgtgttctcaggtttggggcttgagagttacacgatttgctgtcctgagtctgagaccttgggacttggactgaaccacactaccaacttccttagttctccaacttgcagacaacttaatatgggacttcttagcttctaa

SEQ ID NO: 121991 - DNA, 2911 bp, Homo sapiens
atgggagactttaacaccccactgtcaacattagacagaacaaccagacagaaagtcaaccaggatacccaggaattgaactcagctctgcaccaagcagacctaatagacatctacagaacactccactccaaatcaacagaatatacatttttttcagcaccacaccacacctattccaaaattgaccacatacttggaagtaaagctctcctcagcaaatgtaaaagaacagaaattataacaaactatctctcagaccacagtgaaatcaaactagaactcaggattaagaatctcactcaaaactgctcaactacatggaaactgaacaacctgctcctgaatgactactgggtacctaatgaaatgaaggcagaaataaagatgttctttgaaaccaatgagaacaaagacacaacatacccaaatctctgggacgcattcaaagcagcgtgtagagggaaatttatagcactaaatgcccacaagagaaagcaggaaagatccaaaattgacaccctagtatcacaattaaaagaactagaaaagcaagagcaaacacattcaaaagctagcagaaggcaagaaataactaaaatcagagcagaactgaaggaaatagagacacaaaaaacccttcaaaaaattaatgaatccaggagctggttttttgaaaggatcaaaaaaattgatagaccgctagcaagactaataaaggaaaaaagagagaagaatcaaatagacgcaataaaaaatgataaaggggatatcaccaccaatcccacagaaatacaaactaccatcagagaatactataaacacctctacacaaataaactagaaaatctagaagaaatggataaattcctcgacacatacactctcccaagactaaaccaggaagaagttgaatctctgaatagaccaataacaggatctgaaattgtggcaataatcaattgcttaccaaccaaaaagagtccaggaccagatggattcacagctgaattctaccagaggtacaaggaggaactggtaccattccttctgaaactattccaatcaatagaaaaagagggaatcctccctaactcattttatgaggccagcatcattctgataccaaagcctgacagagacacaagcaaaaaagagaattttaggccaatatccttgatgaacattgatgcaaaaatcctcaataaaatactggcaaaccgaatccagcagcacatcaaaaagcttatccaccatgatcaagtgggcttcatccctgggatgcaaggctggttcaatatacgcaaatcaataaatgtaatccagcatataaacagagccaaagacaaaaaccacctgattatctcaatagatgcagaaaagccctttgacaaaattcaacaatgcttcatgctaaaaactctcaataaattagttatcgatgggacatatttcaaaataataagagctatctatgacaaacccacagccaatatcatactgaatgggcaaaaactggaagcattccctttgaaaacgggcacaagacatggatgccctttctcaccactcctattcaacatagtgttggaagttctggccagggcaattaggcaggagaaggaaataaaggagaataaaatacctaggaatctaacttacaagggatgtgaaggacctcttcaaggagaactacaaaccactgatcaaggaaataaaagagaatacaaacaaatggaaaaacattccatgctcatgggtaggaagaatcaatatcgtgaaaatggccatactgcccaagaattggaaaaaagctactttaaagttcatatggaaccaaaaaagagcccgcatcaccaagtcaatcctaagccaaaagaacaaagctggaggcatcacgctacctgacttcaaactatactacaaggctacactaaccaaaacagcatggtactggtatcaacacagagatataaaccaatggaacagaacagagccctcagaaataataccacacatctacaaccatctgatctttgacaaacctgacaaaaacaagaaatggggaaagcattccctatttaataaatggtgctgggaaagctggctagacatatgtagaaagctgaaactggatcccttccttacaccttatacaaaaattaattcaagatggattaaagacttaaacgtaagacctaaaaccataaaaaaccctagaagaaaacctaggcaataccattcaggacataggcatgggcaaggacttcatgtctaaaacaccagaagcaatggcaacaaaagacaaaattgacaaatgggatctaattaaactccagagcttctgcacagcaaaacaaactaccatgagagtcaacaggcaacctacagattgggagaaaatttttgcaatctactcatctgacaaaggactaatatccagaatctacagtgaactcaaacaaatttacaagaaaaaaacaaacaacccccatcaagaagtgggcgaaggatatgaacagatgcttctcaaaagaagacatttatgcagccaacagacacatgaaaaaaatgctcatcatcactggccatcagagaaatgcaaatcaaaaccacaatgagataccatctcacaccagttagaatggcaatcattaaaaagtcaggaaagaacagggctggctcggcactggctccttgcagtcggcgaactgtcggggcgggaggagccgtgagcagtagctgcactcagctgcccgcgcggcaaagaggaaggcaagccaaacagagtgcgcagagtggcagtgccagcggcgacacaggcagcacaggcagcccgggctgcctgaatagcctcagaaacaacctcagcgactccggctgctctgcggactgcgagctgtggcggtag

SEQ ID NO: 121992 - DNA, 3529 bp, Homo sapiens
atggagctgaaaaccaaggctcgagaactacgtgaagaatgcagaagcctcaggagcccatgcaatcaactggaagaaagggtatcagcgatggaagatgaaatgaatgaaatgaagcgagaagggaagtttagagataaaagaataaaaagaaatgagcaaagcctccaagaaatatgggactttgtgaaaagaccaaatctacgtctgattggtgtacctgaaagtgatggggagaatggaaccaagttggaaaacactctgcaggatattatccaggagaacttccccaatctagcaaggcaggccaacattcagattcaggaaatacagagaacgccacaaagatactcctcgagaagagcaactccaagacacataattgtcagattcaccaaagttgaaatgaaggaaaaaatgttaagggcagccagagagaaagcaccacaccacacctattccaaaattgaccacatacttggaagtaaagttctcctcagcaaatgtaaaagaacagaaattataacaaactatctctcagaccacagtgcaatcaaactagaactcaggataaagaatctcactcaaaaccactcaactacatggaaactgaacagcctgctcctgaatgactactgggtacacaacgaaatgaaggcagaaataaagatgttctttgaaaccaacgagaacaaagacacaacataccagaatctctgggacacattcaaagcagtgtgtagagggaagtttatagcactaaatgcccacaagagaaagcaggaaagatccaaaattgacaccctaacatcacaattaaaagaactagaaaagcaagagcaaacacattcaaaagctagcagaaggcaagaaataactaagatcagaggagaactgaaggaaatagaggcacaaaaaacccttcaaaaaatcaatgaatacaggagctggttttttgaaaggatcaacaaaatagatagaccgctagcaagactaataaagaaaaaaagagagaagaatcaaatagacacaataaaaaatgataaaggggatatcaccactgatcccacagaaatacaaattaccatcagagaatactacaaacacctctacgcaaataaactagaaaatctagaagaaatggataaattcctcgacacatacactctcccaagactaaaccaggaagtagttgaatctctgaagagaccaataacaggagctgaaattgtggcaataatcaatagcttaccaaccaaaaagagtccaggaccagatggattcacagccgaattctaccagagctgggcagagacacaaccaaaaaaagagaattttagaccaatatccttgatgaacattgatgcaaaaatcctcaataaaatactggcaaaacgaatccagcagcacatcaaaaagcttatccaccatgatcaagtgggcttcatccctgggatgcaaggcttggttcaatatacgcaaatcaataaaggtaatccagcatataaacagagccaaagacaaaaaccacatgattatctcaatagatgcagaaaaagcctttgacaaaattcaacaacccttcatgctaaaaactctcaataaattaggtattgatgggacgtatttcaaaataataagagctatctatgacaaacccacagccaatatcatactgaatgggcaaaaactggaagcattccctttgaaaactggcacaagacagggatgccctctctcaccgctcctattcaacatagtgttggaagttctggccagggcaatcaggcaggagaaggaaataaaaggtattcaattaggaaaagaggaagtcaaattgtccctgtttgcagacgacatgattgtttatctagaaaaccccattgtctcagcccaaaatctccttaagctgatacgcaacttcagcaaagtctcaggatacaaaatcaatgtacaaaaatcacaagcattcttatacaccaacaacagacaaacagagagccaaatcatgagtgaactcccattcacaattgcttcaaagagaataaaatacctaggaatccaacttacaagggatgtgaaggacctcttaaaggagaactacaaaccaactgctcaaggaaataaaagaggacacaaacaaatggaagaacattccatgctcagggggaaggaagaatcaatatcgtgaaaatggccatactgcccaaggaattggaaaaaaactactttaaagttcatatggaaccaaaaaagagcctgcatcgccaagtcaatcctaagccaaaagaacaaagctggaggcatcacactacctgacttcaaactatactacaaggctacagtaaccaaaacagcatggtactggtaccaaaacagagatatagatcaatggaacagaacagagccctcagaaataatgccacttatactacaactatctgatctttgacaaacctgagaaaaacaagcaaaggggaaaggattccctatttaataaatggtgctgggaaaactggctagccatatgtagaaagctgaaactggatcccttccttacaccttatacaaaaattaattcacgatggcttaaagacttaaatgttagaactaaaaccataaaaaccctagaagaaaaactaggcataaccattcaggacataggcctgggcaaggacttcatgtctaaaataccaaaagccaatggcaacaaaagcccaaaattgacaaatgggatctaattcaactaaagagcttctgcacagcaaaagaaactaccatcagagtgaacaggcaacctacaaaatgagagaaaatattcgcaacctactcatctgacaaagggctaatatccagaatctacaatgaactcaaacaaatttacaagaaaaaaacaaacaaccccatcaaaaagtgggcaaaggacatgaacagacacttctcaaaagaagacatttatgcagccaaaaaacacatgaaaaaatgctcatcatcactggccatcagagaaatgcaaatcaaaaccactatgagataccatctcacaccagttagaatggcaatcattaaaaagtcaggaaacaacaggtgctggagaggatgtggagaaacaggaacgcttttacactgttggtgggactgtaaactagctcaaccattgtggaagtcagtgtggcgattcctcagggatctagaactagaaataccatttgacccagccatcccattactgggtatatacccaaatgactataaatcatgctgctataaagacacatgcacacgtatgtttattgcggcattattcacaatagcaaagacttggaaccaacccaaatgtccaacaattatagactggattaagaaaatgtggcacatatacaccatggaatactatgcagccataaaaaatgatgagttcgtgtcctttgtagggacatggatgaaattggaaatcatcattctcagtaaactatcacaagaacaaaaaaccacacaccgcatattctcactcataggtgggaattga

SEQ ID NO: 121993 - DNA, 5637 bp, Homo sapiens
atggagaatgactttgaggagctgagagaagaaggcttcagacgatcaaattactctgagctacgggaggacattcaaaccaaaggcaaagaagttgaaaactttgaaaaaaatttagaagaatgtataactagaataaccaatacacagaagtgcttaaaggagctgatggagctgaaaaccaaggctcgagaactacgtgaagaatgcagaagcctcaggagccgatgcgatcaactggaagaaagggtatcagcgatggaagatgaaatgaatgaaatgaagcgagaagggaagtttagagaaaaaagaatacaaagaaatgaacaaagcctccaagaaatatgggactatgtgaaaagaccaaatctacgtctgattggtgtacctgaaaccttgcatcccagggatgaagcccacttgaagaatctaatagatgcaataaaaaatgataaaggggatatcaccaccgatcccacagaaatacaaactaccatcagagaatactacaaacacctctatgcaaataaactagaaaatctagaagaaacggataaattcctcgacacatacactctcccaagactaaaccaggaagaagttgaatctctgaatagaccaataacaggatctgaaattgtggcaataatcaatagcttaccaaccaaaaagagtccaggaccagatggattcacagctgaattctaccagaggtacaaggaggaactgctgataagcaacttcagcaaagtctcaggatacaaaatcaatgtacaaaaatcacaagcattcttatacaccagcaacagacaaacagagagccaaatcatgagtgaactcccattcacaattgcttcaaagagaataaaatacctaggaatccaacttacaagggatgtgaaggacctcttcaaggagaactacaaaccaccgctcaaggaaataaaagaggatacaaacaaatggaagaacattccatgctcatgggtaggaagaatcaatatcatgaaaatggccatactgcccaaggtaatttacagattcaatgccatccccattaagctaccaatgcctttcttcacagaattggaaaaaactactttaaagttcatatggaaccaaaaaagagcccgcatcgccaagtcaatcctaagccaaaagaacaaagctggaggcatcacactacctgacttcaaactatactacaaggctacagtaaccaaaacagcatggtactggtaccaaaacagagatatagatcaatggaacagaacagagctctcagaaataacgccgcatatctacaactatctgatctttgacaaacctgagaaaaacaagaaatggggaaaggattcccatatttaataaatggtgctaggaaaactggctaaccatatgtaaaaggctgaaactggatcccttccttacaccttataccaaaatcaattcaagatggattaaagacttaaacgttagacctaaaaccataaaaaccctagaagaaaacctaggcattaccattcaggacataggcattggcaaggacttcatgtgtaaaacaccgaaagcaatggcaacaaaagccaaaattgacaaatgggatctaattaaactaaagagcttctgcacagcaaaaaaaaaaaaaactactaacagactgaacaggcaacctgcaaaatgggagaaaattttcacaacctactcatctgacaaagggctaatatccagaatctacaatgaactcaaaacacttttacaagaaaaaaaacaaacaaccccatcaaaaagtgggcgaaggatatgaacagacacttctcaaaagaagacatttatgcagccaaaaaaacacatgaaaaaatggtcaccatcactggccatcagagaaatgcaaatcaaaaccacaatgagatatcatctcataccagttagaatggcgatcattaaaaagtcaggaaacaacagaccaaaagtagataaaaccacaaagatggggaaaaaacagagcagagaaactggaaactctaaaaagcagagtgcctctcctcctccaaaggaacgctgttcctcaccagcaacggaacaaagctggatggagaatgactttgatgagctgagagaagaaggcttcagacgatcaaattactctgagctacgggaggacattcaaaccaaaggcaaagaagttgaaaactttgaaaaaaatttagaagaatgtataactagaataactgatatagagaagtgcttaaaggagctgatggagctgaaaaccaaggctcgagaactacatgaagaatgcagaagcctcaggagccgatgtgatcaactggaagaaagggtatcagcaatggaagatgaaatgaatgaaatgaaaaacacacataggctcaaaataaaaggagcaccaagattcataaagcaagtcctgagtgacctacaaagagacttagactcccacacattaataatgggagactttaacaccccactgtcaacattagacagatcaacaagacaaaaaatcaacaaggatacccaggaattgaactcagctctgcaccaagcagacctaatagacatctacagaactctccactccaaatcaacagaatatacatttttttcagcaccacaccacacctattccaaaattgaccacatacttggaagtaaagctctcctcagcaaatgtaaaagaacagaaattataacaaactatctctcagaccacagtgcaatcaaactagaactcaggattaagaatctcactcaaaaccgctcaactacatggaaactgaacaacctgctcctgaatgactactgggtacataacgaaatgaaggcagaaataaagatgttctttgaaaccaacgagaacaaagacacaacataccagaatatctgggacgcattcaaagcagtgtgtagagggaaatttatagcactaaatgcccacaagagaaaacaggaaagatccaaaattgacaccctaacatcacaattaaaagaactagaaaagcaagagcaaacacattcaaaagctagcagaaggcaagaaataactaaaatcagagcagaactgaaggaaatagagacacaaaaaacccttcaaaaaattaatgaatccaggagctggttttttgaagggatcaacaaaattgatagaccgctagcaagaataataaagaaaaaaagagagaagaatcaaatagacgcaataaaaaatgataaaggggatatcaccaccgatcccacagaaatacaaactaccatcagggaatactacaaacacctctacgcaaataaactagaaaatctagaagaaatggataaattcctcgacacatacaccctcccaagactaaaccaggaagaagttgaatctctgaatacaccaataacaggctctgaaattgtggcaataatcaatagcttaccaactaaaaaagagtccaggatcagaaggcttcacagccgaattctaccagaggtacaaggaggaactggtaccattccttctgaaattattccaatcaatagaaaaagagggaatcctccctaactctttttatgaggccagcatcattctgataccaaagccaggcagagacacaacaaaaaaagagaattttagaccaatatccttgatgaacattgatgcaaaaatcctcaataaaatactggcaaaacgaatccagcagcacatcaaaaagcttatccaccatgatcaagtgggcttcatccctgggatgcaaggctggttcaatatacacaaatcaataaatgtaatccagcatataaacagacccaaagacaaaaaccacatgattatctcaatagatgcagaaaaagcctttgacaaaattcaacaacccttcatgctaaaaactctcaataaattaggtattgatgggacgtatttcaaaataataagtgctatctatgacaaacccacagccaatatcatactgaatgggcaaaaagtggaagcattccctttgaaaactggcacaagacagggatgccctctctcaccactcctattcaacatagtgttggaagttctggccagggcaattaggcaggagaaggaaataaagggtattcaattaggaaaagaggaagttaaattgtccctgtttgcagacgacatgattgtatatctagaaaaccccatcgtctcagcccaaaatctccttaagctgataagcaacttcagcaaagtctcaggatacaaaatcaatgtacaaaaatcacaagcattcttatacaccaacaacagacaaacagagagccaaatcatgagtgaactcccattcacaattgcttcaaagagaataaaatacctaggaatccaacttacaagggatgtgaaggacctcttcaaggagaactacaaaccactgctcaaggaaataaaagaggatacaaacaaatggaagaacattccatgctcatgggtaggaagaatcaatatcgtgaaaatggccatactgcccaaggtaatttacagattcaatgccatccccatcaagctaccaatgactttcttcacagaattggaaaaaactactttaaagttcatatggaaccaaaaaagagcccgcatcaccaagtcaatcctaagccaaaagaacaaagctggaggcatcacactacctgacttcaaactatactacaaggctacagtaaccaaaacagcatggtactggtaccaaaacagagatatagatcaatggaacagaacagagccctcagaaataacgccgcatatctacaactatctgatctttgacaaacctgagaaaaacaagcaatggggaaaggattccctatttaataaatggtgctgggaaaactggctagctatatgtagaaagctgaaactggatcccttccttacaccttatacaaaaatcaattcaagatggattaaagacttaaacgttagacctaaaaccataaaaaccctagaagaaaacctaggcaataccattcaggacataggcatgggcaaggacttcatgtctaaaacaccaaaagcaatggcaacaaaagccaaaattgacaaatgggatctaattaaactaaagagcttcctgcacagcaaaagaaactaccatcagagtgaacaggcaacctacaaaatgggagaaaatttttggaacctactcatctgacaaagggctaatatccagaatctacaatgaactcaaacaaatttacaagaaaaaaacaaacaaccccatcaaaaagtgggtgaaggacatgaacagacacttctcaaaagaagacatttatgcagccaaaaaacacatgaaaaaatgctcatcatcactggccatcagagaaatgcaaatcaaaaccacaatgagataccatctcacaccagttagagtggcaatcattaaaaagtcaggaaacaacagaacttgggaatataacatactttgttctcttgtgcctctcctgtgttccctcttgtggctgcacctgactgaccatcacctaaaagaggacagaacaaaacacttgacagctagtgataaccttgaaaaaacagaactcagcagatggaaggagagagccctactgtatgagcatcgtgtgctgagacctgctattgactcccag

SEQ ID NO: 121994 - DNA, 4511 bp, Homo sapiens
atggagaatgactttgacgagctgagagaagaaggcttcagacgatcaaattactctgagctatgggaggacattcaaaccaaaggcaaagaagttgaaaactttgaaaaaaatttagaagaatgtataactagaataaccaatacagagaagtgcttaaaggagctgatggagctgaaaaccaaggctcgagaactacatgaagaatgcagaagcctcaggagccgatgtgatcaactggaagaaagggtatcagcaatggaagatgaaatgaatgaaatgaagggagaagggaagtttagagaaaaaagaataaaaagaaacgagcaaagcctccaagaaatatgggactatgtgaaaagaccaaatctacatctgattggtgtacctgaaagtgatggggagaatggaaccaagttggaaaacactctgcaggatattatccaggagaacttccccaatctagcaaggcaggccaacgttcagattcaggaaatacagagaatgccacaaagatactcctcgagaagagcaactccaagacacataattgtcagattcaccaaagttgaaatgaaggaaaaaatattaaaggcagccagagagaaagacagatcaacgagacagaaagtcaacaaggatacccaggaattgaactcagctctgcaccaagcggacctaatagacctaatagacctaatctacagaactctccaccccaaatcaacagcaatatacatttttttcagcaccacaccacacctattccaaaattgacaacatacttggaagtaaagctctcctcagcaaatgtaaaagaacagaaattataacaaactatctctcagaccacagtgcaatcaaactagaactcaggattaagaatctcactcaaaaccgctcaactacatggaaactgaacaacctgctcctgaatgactactgggtacataacaaaatgaaggcagaaataaagatgttctttgaaaccaacgagaacaaagatacaacacaccagaatctctgggacacattcaaagcagacaacataccagaatctctgggacacattcaaagcagtgtgtagagggaaatttatagcactaaatgcccaaaagagaaagcaggaaagatctaaaattgacacccctaacatcacaattaaaagaagtagaaaagcaagagcaaacacattcaaaagttagcagaaggcaagaaataacttaaaatcagagcagaactgaaggaaatagagacaaaaaaaaacacttcaaaaaaatcagtgaatccaggagctggttttttgaaaggatcaacaaaattgatagaccgctagcaagactaataaagaaaaaaagagagaagaatcaaatagacacaataaaaaatgataaaggggatatcaccaccaatcccacagaaatacaaactaccatcagagaatattacaaacacctctacgcaaataaactagaaaatctagaagaaatggataaattcctcgacacaaacaccctcccaagactaaaccaggaagaagttgaatctctgaatagaccaataacaggatctgaaattgtggcaataatcaatagtttactaaccaaaaagagtccaggaccagatggattcacagccgaattctaccagaggtacaaggaggaactgcatcatcctgataccaaagcctggcagagacacaaccaaaaaaagagaattttagaccaatatccttgatgaacattgatgcaaaaatcctcaataaaatactggcaaaccgaatcccagcagcacatccaaaaagcttatccacccatgatccaagtgggcttcatccctgggatgcaaggctggttcaatatacgcaaatcaataaatgtaatccagcatataaacagagccaaagacaaaaaccacatgactatctcaatagatgcagaaaaagcctttgacaaaattcaacaacccttcatgctaaaaactctcaataaattaggtattgatgggacgtatttcaaaataataagagctatctatgacaaacccacagccaatatcatactgaatggggccaaaaactggaagcattcccctttgaaaaactggcacaagaacagggatgcccctctctcacccactccctattcaacatagtgttggaagttctggcccgggcaattaggcaggataaggaaataaagggtattcaattaggaaaagaggaagtcaaattgtccctgtttgcagacgacatgactgtatgtatagaaaaccccattgtctcagcccaaaatctccttaagctgataagcaacttcagcaaagtctcaggatacaaaatcaatgtacaaaaatcacaagcattcttatacaccgataacagacaaacagagagccaaatcatgagtgaattcccattcacaattgcttcaaagagaataaaatacctaggaatccaacttacaagggacctgaaggacctcttcaaggagaactacaagccactgctcaaggaaataaaagaggatacaaacaaatggaagaacattccatggtcatgggtaggaagaatcaatatcatgaaaatggccatactgtccaaggtaattgacagattcaatgccatccccatcaagctaccaatgactttcttcacagaattggaaaaaactactttaaagttcatatggaaccaaaaaagagcccacatcgccaagtcaatcctaagcccaaaagaacaaagttggaggcatcacgctacctgacttcaaactatactacaagggctacagtaaccaaaacagcatggtactggtaccaaaacagagatatagatcaatggaacagaacagggccctcagaaataatgccacattatctacaactatctgatctttgacaaacctgagaaaaacaggcaatggggagaggattccctatttaataaatggtgctgggaaacctggctagccatatggagaaagctgaaactggatcccttccttacactttatgcaaaaattaactgaagatggattaaagacttaaacgttagacctaaaaccattaaaaaccctagaagaaaacctaggcaataccattcaggacataggcatgggcaaggatttcatgtctaataaaacaccaaaagcaatggcaaccaaaagacaaaaattgacaaatgggatctaatttaactaaagagcttctgcacagcaaaagaaactaccatcagagtgaacaggcaacctacaaaatgggagaaaattttcggaacctactcatctgacaaagggctaatatccagaatctacaatgaactcaacccaatttacaagaaaaaaacaaacaaccccatcaaaaaagaaacagagagacaaatcatgagtcaactcgcattcacaattgcttcaaagagaataaaatacctaggaatccaacttacaagggatgtgaaggacctcttcaaggagaactacaaaccactgctcaatgaaataaaagaggatacaaacaaatggaagaacatttcatgctcatgggtaggaagaatcaatatcatgaaaatggccacactgcccaaggtaatttatagattcaatgccatccccatcaagctaccaatgactttcttcatggaattggaaaaaactactttaaagttcatgtggaaccaaaatagagcccgcattgccaagtcaatcctaagccaaaagaacaaagctggaggcatcacgctacctgacttcaaactatactacaaggctacagtaaccaaaacagcatggtactggtaccaaaacagagatatagaccaatggaacagagcagagccctcagaaataatgccacatatctacaacaaactgatctttgacaaacctgacaaaaacaagcaatgggggaaaggattccctatttaataaatggtgctgggaaaactggctagccatatgtagaaaactgaaactggaccccttccttacaccttatacaaaaattaactcaagatggattaaagacttaaacgtaagacctaaaaccataaaaaccctggaagaaaacctaggcaataccattcaggacataggcatgggcaaagacttcatgactaaaacaccagaagcaatggcaacaaaagccaaaattgacaaatgggatctaattaaactaaagagcttctgcacagcaaaagaaattaccatgagagtgaacaggcaacctacaaaatgggagaaaattttcgcaacctactcatctgacaaagggctaatatccagaatctacaatgaactcaaacaaatttacaagagaaaaaccaacaaccccatcaaaaagtgggcgaaggatatgaacagacacttctcaaaagaagacatttatgcagccaaaagacacatgaaaaaatgctcatcatcactggccatcagagaaatgcaaatcaaaaccacaatgagataccatctcacaccagttagaatggcaatcattaaaaagtcaggaaacaacag

SEQ ID NO: 121995 - DNA, 6336 bp, Homo sapiens
atggtgaagggatcaattcaacaagaggagctaactatcctaaatatttatgcacccaatacaggagcacccagattcataaagcaagtcctgagtgacctacaaagagacttagactcccacacattaataatgggagactttaacaccccactgtcaacattagacagatcaacgagacagaaagtcaacaaggatacccaggaattgaactcagctctgcaccaagcagacctaatagacatcaacagaactctccaccccaaatcaacagagtatacattttttttcagcaccacaccacacctattcccaaaattggaccaccatagttggaagtaaagctctcctcagcaaatgtaaaagaacagaaattataaccaaactatctctcagacccacagtgccaatcaaactgaaactcaggattaagaatctcactcaaagccgctcaactccatggaaactgaacaacctgctcctgaatgactactgggtacataacgaaatgaaggcagaaataaagatgttctttgaaacccaacgagaacaaagacaccaacataccagaatttttgggacgcattcaaagcagtgtgtagagggaaatttatagcactaaatgcctacaagagaaagcaggaaagatccaaaattgacaccctaacatcacaattaaaagaactagaaaagcaagagcaaacacattcaaaagctagaagaaggcaagaaataactaaaatcagagcagaactgaaggaaatagagacacaaaaaacccttcaaaaaatcaatgaatccaggagctggttttttgaaaggatcaacaaaattgatagaccactagcaagactaataaagaaaaaaagagagaagaatcaaatagacacaataaaaaatgataaaggggatatcaccaccgatcccacagaaatacaaactaccatcagagaatactacaaacacctctacgcaaataaactagaaaatctagaagaaatggatacattcctcgacacatacactctcccaagactaaaccaggaagaagttgaatctctgaatagaccaataacaggctctgaaattgtggcaataatcaatagtttaccaaccaaaaagagtccaggaccagatggattcacagccgaattctaccagaggtacaaggaggaactgcatataaacagagccaaagacaaaaaccacatgattatctcaatagatgcagaaaaggcctttgacaaaattcaacaacgcttcatgctaaaaactctcaataaattagtgttggaagttctggccagggcaattaggcaggagaaggaaataaagggtattcaattaggaaaagaggaagtcaaattttccctgtttgcagacgacatgattgtatatctagaaaaccccattgtctcagcccaaaatctccttaagctgataagcaacttcagcaaagtctcaggatacaaaatcaatgtacaaaaatcacaagcattcttatacaccaacaacagacaaacagagagccaaatcatgagtgaactcccattcataattgcttcaaagagaataaaatacctaggaatccaacttacaagggatgtgaaggacctcttcaaggagaactacaaaccactgctcaaggaaataaaagaggatacaaacaaatgcaagaacattccatgctcatgggtaggaagaatcaatatcgtgaaaatggccatacttgcccaaggtaatttacagattcaatgccatccccatcaagctaccaatgactttcttcacagaattggaaaaaactactttaaagttcatatggaaccaaaaaagagcccgcatcgccaagtcaatcctaagccaaaagaacaaagctggaggcatcacactacctgacttcaaactatactacaaggctacagtaaccaaaacagcatcggtactggtaccaaaacagagatatagatcagtggaacagaacagagccctcagaaataacgccgcatatctacactattctgatcctttggacaaacctgagaaaaacaagcatgggggaaaggcatccctaatttataaaatggctgctggggaaaactggctagcccatatgtaggaagctgaaactggatcccttccttacacattatacaaaaattaattcaagttggattaaagacttaaacgttagacctaaacccataaaaaccctagaagaaaacctaggcattaccattcaggacataggcatgggcaaggatttcatgtctaaaacaccaaaagcaatggcaacaaaagccaacattgacaaatgggatctaattaaactaaagagcttctgcacagcaaaagaaactaccatcagagtgaaaaggcaacttacaaaatgggagaaaattttcgcaacctactcatctgacaaagggctaatatccagaatctacaatgaactcaaacagatttacaagaaaaaaacaaacaaccccatcaaaaagtgggcaaaggatatgaacagacacttctcaaaagaagacatttatgcagccaaaagacacatgaaaaaatgctcatcatcactggccatcagagaaatgcaaatcaaaaccacaatgagataccatctcacaccagttagaatggcaatcattaaaaagtcaggaaacaacaggagagacagaacagctgaggaaacagcagaacggtggaaaatttttgaaagtgttttgagcccacccaacctgaggagagcattcaaagaaaaacaggaagaagaagtcggcttcagaaggtgggttataacaaactcctccaagctaaaacagcatgttttaacccaatgcaaggaagctaagaaccttgaaaaaaggttagaggaatttctaactagaataaccagtttagagaagaacataaatgacctaatggacctgaaaaacacagcacgagaacttcttgacgcctacacaagtatcaatagccaaattaatcaagcggaagaaaggttatcagagactgaagatcaacttaatcaaataaagcatgaggacaagattagagggaaaaaaatgaaaaggaacaaacaaagcctccaagaaatatgggactatgtgaaaaggccaaatctacgtctgattggtgtagctgaaagtgacagggagaatggagccaagttagaaaacactcttcagtatattatccaggagaacttccccaacctagcaagacaggccaacactcaaattcaggaaacacagagaccaccacaaagatactccttgagaaaagcaaccccaagacacataattgtcagattcaccaaagttgaaatgaaggaaaaaatgttaagggcagccagagagaaagacagatcaacgagacagaaagtcaacaaggatacccaggaattgaactcagctctgcaccaagcggacctaatagacatctacagaactctccacctcaaatcaacagaatatacatttttttcagcaccacaccacacttattccaaaattgaccacatacttggaagtaaagctctcctcagcaaatgtaaaagaacagaaattataacaaactatctctcagaccacagtgcaatcaaactggaactcaggattaagaatctcactcaaaaccgctcaactacatggaaactgaacaacctgctcctgaatgactactgggtacataacaaaatgaaggcagaaataaaaatgttctttgaaaccaacgagaacataagacacaacataccagaatctctgggatgcattcaaagcagtgtgtagagggaaatttatagcactatatgcccactggagaaagcagggaaagatccaaaatggacaccctaacatcacaattagaagaactagaaaagctagagcaaacacattcaaaagctagcagaaggcatgaaatagctaaaatcagagcagaactgaaggaaatagagacacaaaaaactgttgaaaaaattaatgaatccaggagctggttttttgaaaggatcaacaaaattgatagaccgctagcaagactaataaagaaaaaaagagagaagaatcaagtagatgcaataaaaaacgataaaggggatatcaccaccgatcccacagaaatacaaactaccatcaggagaatactacaaacacctctacgcaaataaactagaaaatctagaagaaatggataaattcctcgacacatacactctcccaagactaaaccaggaagaagttgaatctctgaatagaccaataacaggctctgaaattgtggcaataatcaatagtttaccaaccaaaaagagtccaggaccagatggattcacagccgaattctaccagaggtacaaggaggaactggtaccattccttctgaaactattccagtcaatagaaaaagagggaatcctccctaactcattttatgaggccagcatcattctgatagcaaagccaggtagagacacaacaaaaaaagagaattttagaccaatatccttgatgaacattgatgcaaaaatcctcaataaaatactggcaaaacgaatccagcagcacatcaaaaagcttatccaccatgatcaagtgggcttcatccctgggatgcaaggctggttcaatatatgcaaatcaataaatgtaatccagcatataaacagagccaaagacaaaaaacacatgattatctcaatagatgcagaaaaagcctttgacaaaattcaacaacccttcatgctaaaatctctcaataaattagaattggaaaaaactactttaaagttcatatggaaccaaaaaagagcccgcatcgccaaggcaatcctaagccaaaagaacaaagctggaggcatcacactacctgacttcaaactatactacaaggctacagtaaccaaaacagcatggtactggtaccaaaacagagatatagatcaatggaacagaacagagccctcagaaataacgccgcatatctacaactatctgatctttgacaaacctgagaaaaacaagcaatggggaaaggattccctatttaataaatggtgctgggaaaactggctagccatatgtagaaagctgaaactggatcccttccttacaccttatacaaaaatcaattcaagatggattaaagacttaaatgttagacctaaaaccataaaaaccctagaagaaaacctaggcattaccattcaggacataggcatgggcaaggacttcatgtccaaaacaccaaaagcaatggccaacaaaagacaaaattgacaaatgggatctaattaaactaaagagcttctgcacagcaaaagaaactaccatcagagtaaacaggccaacctacaaaatggaagaaaattttcacaacctactcatctgacaaagggctaatatccagaatctacaatgaactcaaacaaatttacaagaaaaaaacaaacaaccccatccaaaaagtgggcgaaggacatgaacagacacttctcaaaagaaggacatttatgcagcccaaaaaacacatgaaaaaatgctcaaccatcactggccatcagagtaatgcaaaatcaaaaccacaaatgagataccatctcacaccagttagaatggcaatcattaaaaagtcaggaaacaacaggtgcttggagaggatgtggagaaataggaacacttttacactgtttggtgggactgtaaactagttccaacctttgtggaagtcagtgtggcgattcctcagggatctagaattagaaataccatttgacccagccaatcccattactgggtatatacccaaaggactataaatcatgctgctataaagacacatgcacacgtatgtttattgtggcacttattcacaatagtaaagacttggaaccaacccaaatgtccaacaacggatagactggattaagaaaatgtggcacatatacaccatggaatactatgcagccataaaaaattgatgagttcatgtcctttgtagggacatggatgatattggaaatcatcattctcagtaaactatcgcaagaaccaaaaaacccaaacaccgcatgttctcactcataggtgggaactggaacaatgagatcacatggacacaggaaggggaatatcacactctggggactgttgtggggtggggggagggggggagggatagcattaggagatatacctaatgctaaatgacgagttaatgggtgcagcacaccagcatggcacatgtatacatatgtaactaacctgcgcattgtgcacatgtaccctaaaacttaaaagtataattaaaaaaaaataaaataaaaataaaaaa

SEQ ID NO: 121996 - DNA, 3136 bp, Homo sapiens
atggaggaagatctaccaagcaaatggaaaacaaaaaaaggcaggggttgcaatcctagtctctgataaaacagactttaaaccaacaaagatcaaaagagacaaagaaggccattacataatggtaaagggatcaattcaacaagaagagctaactatcctaaatatatatgcacccaatacaggagcacccacattcatacagcaagtcctgagtgatctacaaagagacttagactcccacacattaataataggagactttaacaccccactgtcaacatcagacagatcaacgagacagaaagtcaacaaggatacccaggaattgaactcagctctgcaccaagcagacctaatagacatctacagaaccctccaccccaaatcaacagaatatacatttttttcagcaccacaccacacctattccaaaattgaccacatacttggaagtaaagcactcctcagcaaatgtaaaagaacagaaattataacaaactatctctcagaccacagtgcaatcaaactagaactcatgattaagaatctcactcaaaaccactcaaccatatggaaactgaacaacctgctcctgaatgactactgggtacataaggaaatgaaggcagaaataaagatgttctttgaaaccaacgagaacaaagacacaacataccagaatctctgggacacattcaaagcagtgtgtagagggaaattcatagcaaaaaaatgcccacaaaagaaagcaggaaagatctaaaattgacaccctaacatcacaattaaaagaactagagaagcaaagagcaaacacattcaaaagctagcagaaggcaagaaataactaagatcagagcagaactgaaggaaatagagacacaaaaaaacccttcaaaaaaaccaatgaatccaggagctggttttttgaaaggatcaacaaaattgatagatagatcactagcaagagtaataaagaagaaaggagagaagaatcaaatagacgcaataaaaaacgataaattgggatatcaccactgatcccacagaaatacaaactaccatcagagaatactataaacacctctatgcaaataaactagaaaatctagaagaaatggataaattcctggacacatacaccctcccaagactaaaccaggaagaagttgaatctctgaatagaccaataacaggctctgaaattgaggcaataactaatagcctaaccaaccaaaaaaagtccaggaccagacggatttcacagccaaattctagcagaggtacaaggaggagctggtaccattccttctgaaattattccaatcaatagaaaaagagggaatcctccctaactcattttatgagggcaagtatcatcctggataccaaagtctagcagagacacaacaaaaaaaagagaattttagaccaatatctttgatgaacatcgatgcaaaaatcctcaataaaatactggcaaaccaaatccagcagcacatcaaaaagcttatccaccatgatcaagtgggcttcatccctgggatgcaaggctggttcaatatacgcaaatcaataaatgtaatccagcatataaacagaaccaaagacaaaaaccacatgattatctcaatagatgcagaaaaggcctttgaaaactggcacaagacagggatgccctctctcaccgctcctattccatagtgttggaagttctggccagggcaatcaggcagaagaaggaaataaagggtattcaattaggaaaagaggaagtcaaattgtccctgtttgcagacgacatgattgtttatctagaaaaccccattgtctcagcccaaaatctccttaagctgataagcaacttcagcaaagtctcaggatacaaaatcaatgtacaaaaatcaccaagcattcctatacaccaacaacagacaaacagagagccaaatcatgagtgaactcccattcacacttactacaacaagaataaaatacctaggaatccaacttacaagggatgtgaaggacctcttcacggagaactacaaactactcactgatcaaggaaataagagaggacacaaacaaatggaaaaacattccatgctcatggataggaagaatgaatatcatgaaaatggccatactgcccaaagtaatttacagattcaatgctatcctcatcaagctaccattgacttccttcacaaaattggaaaaaaactactttaaagttcatatggaaccaaaaaagagcccgcattgccaagtcaatcctaagacaaaagaacaaagctggaggcatcacactacctgacttcaaactatactacaaggctacagtaaccaaaacagcatggtactggtaccaaaacagatatatagacgaatagaacagaacagagcccctcagaaataaggcccacataccctacaactatctgatctttgacaaacctgacaaaaacaagcaatgggggaaaggattcccttatttaataaatggtgctgggaaaactggcttagccatatgtagaaagctgaaacttggatcccttccttacaccttatacaaaaattaattcaagatggattaaagacttaaatgttagacctaaaaccataaaaaactctagaagaaaacctaagcaataccattcagaccataggggtgggcaaggactccatgactaaatcagcaaaaaggaatggcaacaaaagccaaaattgataaatgggatctaattcaactaaagagcttctgcacagcaaaagagaaactaccatcagagtgaacaggcaacctacagaatgggagaaaatctttgcaatctactcatttgacaaagggctaatatccagaatctacaaagaactcaaacaaatttacaagaaaaaaacaaacaaccccatgaaaaagtgggcaaaggacatgaacagacacttctcaaaagaagacatttatgcagccaaaaaacacatgaaaaaatgctcatcatcactggccatcacagaaatgcaaatcaaaaccacaatgagataccatctcacaccagttagaatggcaatcattaaaaagtcaggaaacaacagggacatggatgaaattggaaatcatcattctcagtaa

SEQ ID NO: 121997 - DNA, 4458 bp, Homo sapiens
atggagctgaaaaccaaggctcgagaactacgtgaagaatgcagaagcctcaggagccgacgcaatcaactggaagaaagggtatcagcaatggaagatgaaatgaatgaaatgaagcgagaagggaagtttagagaaaaaagaataaaaagaaatgagcaaagcctccaagaaatatgggactatgtgaaaagaccaaatctacgtctgattggtgtacctgaaagtgatgcggagaatggaaccaagttggaaaacactctgcaggatattatccaggaggacttccccaatctagcaaggcaggccaacgttcagattcaggaaatacagagaacgccacaaagatactcctcgagaagagcaactccaagacacataattgtcagattcaccaaagttgaaatgaagcaaaaaatgttaagggcagccagagagaaagactttaaaccaacaaagatcaaaagagacaaagaaggccattacataatggtaaagggatcaattcaacaagaggagctaactatcctaaatatatatgcacccaatacaggagcacccagattcataaagcaagtcctgagtgacctacaaagagacttagactcccacacattaataatgggagactttaacaccccactgtcaacattagacagatcaacaagacagaaagtcaacaaggatacccaggaattgaactcagctctgcaccaagcggaccttaatagacatctacagaactctccacccccaaatcaacagaatatacatttttttcagcaccgcaccacacctattccaaaattgaccacatagttggaagtaaagctctcctcagcaaatgtaaaagaacagaaattataacaaactgtctctcagaccacagtgcaatcaaactagaactcaggactaagaaactcactcaaaaccgctcaactaccatggaaactgaacaacctgctcctgaatgactactgggtatataacgaaatgaaggcagaaataaagatgttctttgaaaccaacgagaacaaagacacaacataccagaatctctgggatgcattcaaagcagtgtgtagagggaaatttatagcactaattgcccacaagaggaagcaggaaagatccaaaattgacaccctaacatcacaattaaaagaaccagaaaagcaagagcaaacaaacacattcaaaagctagcagaaggcaagaaataactaaaatcagagcagaactgaaggaaatagagacacaaaaaaacctccttcaacccttcaaaaaaattaatgaatcccaggagctgggttttttgaaaggatcaacaaaattgatagaccgcttagcaaggacttaataaagaaaaaaagagagaagaaatcaaatagacacaataaaaaatgataaaggggatatcaccaccaatcccacaggaaatacaaacttccatcagagaatactacaaacacctctacgccaaataaacttgaaaatctagaaggaatggataaattcctcgacacatacactctcccaagactaaaccaggaagaagttgaatctctgaatagaccaataacagggctctgaaattgtggcagtaatcaatagcttaccaaccaaaaagagtccaggaccagatggattcacagccaaattctaccagaggtacaaggaggaactggtaccattccttctgaaactattccaatcaatagaaaaagagggaatcctccctaactcattttatgaggccagcatcattctgataccaaagccgggcagagacacaaccaaaaaagagaattttagaccaatatccttgatgaacattgatgcaaaaatccttcaataaaatactggcaaaccggaatccagcagcacattcaaaaagcttatccaccatgatcaagtgggttttatccctgtgatgcaacggctggttcaatatacggtaaatcaataaacggtaatccagcatacaaacagaaccaaagacagaaaccacatgtttatctcaatagatgcagaaaaggcctttgacaaaattcaacagcccttcatgctaaaaactatcaataaaataggtattgatagaatgtatctcaaaataataagagctatctatgacaagcccacagccaatatcatactgaaaggacaaaaactggaagcattccctttgaaaactggcacaaggacagggatgccctctctcaccactcctattcaacataggtgtttgggaagttctgggccagggcaatcaggcaggagaaagaaataaagggtattcaattaggaaaagaggaagtcgaattatccctgtttgcagatgacatgattgtacatgtagaaaactccatcgtctcagcccaaaatctccttaagctgataagcaacttcagcaaagtctcaggatacaaaatcaatgtgcagaaatcacaagcattcctatacatcaataacagacaaagagagagccaaatcatgagtgaactcccattcacaattgctacaaagagaataaaatacctaggaatccaacttacaagggatgtgaaggacctcttcaaggagaactacaaaccactgctcaaggaaataaaagaggacacaaacaaatggaagaacattccatgctcatgggtaggaagaatcaatatcgtgaaaatggccatactgcccaaggtaatttacagattcaatgccatccccatcaagctaccaatgactttcttcacagaattggaaaaaaactactttaaagttcatatggaaccaaaaaaagagcccgtattgccaagtcaatcctaagccaaaagaacaaagctggaggcatcacactacctgacttcaaactatactacaaggctacagtaaccaaaacagcatggtacaggtggtaccaaaacagcatggtactggtaccaaaacagagatatagatcaatggaacagaacagagccctcagaaataatgccgcatatctacaactatctgatctttgacaaacctttgcttgagaaaaacaagcaatggggaaaggattccctatttaataaatggtgctgggaaaactggctagccatatgtagaaagctgaaactggatcccttccttacaccttatacaaaaatcaattcaagatggattaaagatttaaacattagacctaaaaccataaaaaccctagaagaaaacctaggcattaccattcaggacataggcgtgggcaaggacttcatgacagcaaaagaaactaccatcagagtgaacaggcaacctacaacatgggagaaaattttcgcaacctactcatctgacaaagggctaatatccagaatctacaatgaactcaaacaaatttacaagaaaaaaacaaacaaccccatcaaaaagtgggcgaaggacatgaacagacacttctcaaaagaagacatttatgcagccaaaaaacacatgaagaaatgctcatcctcactggccatcagagaaatgcaaatcaaaaccactatgagatatcatctcacaccagttagaatggcaatcattaaaaagtcaggaaacaacagcttcctaacattccttgggaatccacgtctgcccagctttcaggctgcaggtccacaagtccaggtgaattttctcccttgccagcgcccaggattccatggggtacagtcctgtccaatcagaacattgcattctcttggccactatgattggctcagagatgaccatgtgactcgatcaaatctgaccctaagaattttgctagaaagaccaagaagaaaagcaccattttaccctctagattttccaagaagttatgatgcaggcctagagctgttggtgccatcatgtcaccacaagggacagcctgcttggaaatggagccaacgcagaggagaatctaatactgttgctgatctgacaggaggcagtgctcaggcagtcacgttcgctcacccaccactcacttcctgccatgtggcccagttcctaacaggctacgaaccagtactagtccacggcctgggggtctgggattcctgctatatacaatatattactacaactgaagttagatgtggccacgtggcagagttccacccaatggcatgtggaggaagtgacctaactctaaaggagcagctgttctttttccatattctttcccattcagcggacaggaaaaaaatgatgatgagaccccgggcttacagacatgcctgctggaaacgctttggtacattttggatgttccagggatcatatccaaatgctgaaaatggtctccaaagctctacgggtaagtcaagctatggcgaaaatggagaaatctacaaaggtaaaacattttattcttacaagtcacgtcacctatggatgagttcctatgcatgtatgaaaacacacatggatggtgaagatttggattttttcacataa

SEQ ID NO: 121998 - DNA, 8071 bp, Homo sapiens
atgacaggatcaaattcacacataacaatattaactttaaatataaatggactaaattctgcaattaaaagacacagactggcaagttggataaagagtcaagacccatctgtcgttatgtattcaggaaacccatctcacgtgcagagacacacataggctcgaaataaaaggatggaggaatatctaccaagcaaatggaaaacaaaaaaaggcaggggttgcaatcctagtctctgataaaacagattttaaaccaacaaagatcaaaagagacaaagaaggccattacataatggcaaagggatctattcaagaagaagaactaactatactaaatatatatgcaccccaatacaggagcacccagattcataaagcaagtcctcagtgacctacaaagagacttagactcccacacattaataatgggagactttaacaccccactgtcaacattagacagatcaacgagacagaaagtcaacaaggatacccaggaattgaactcagctctgcaccaagcagacctaatagacatctacagaactctccaccccaaatcaacagaatatacatttttttcagcaccacaccacacctattccaaaattgaccacatagttggaagtaaagctctcctcagcaaatgtaaaagaacagaaattataacaaactatctctcagaccacagtgcaatcaaactagaactcaggattaagaaactcactcaaaaccgctcaactacatggaaactaaacaacctgctcctgaatgactactgggtacataacgaaatgaaggcagaaataaagatgttctttgaaaccaacgagaacaaagacacaacataccagaatctctgggacacattcaaagcagtgtgtagagggaaatttatagcactaaatgcccacaagagaaagcaaggaaggtcccaaaattgacaccctaacatcacatttaaaagaaactagaaaagcagacgcacgcacattcaaaagatagcaggaggcaagaaataactaaaatcagagccagaactgaaggaaatagagacacaaaaaaaccctttcaaaaaattaatgaattccaggagctggtttttttgaaaggatcaacaaaattgatagaccgctagcaagactaataaagaagaaaagagagaagaatcaaatagacggcaataaaaaatgataaaggggatatcacccaccgatccccacagaaatacaaactacccatccagagattactacaaacacctctacgcaaataaactagaaaatctagaagaaatggataaattccttgacacatacgctctcccaagactaaaccaggaagaagttgaatctctgaatagaccaataacaggagctgaaattgtggcaataatcaatagcttaccaaccaaaaaaaagtccaggaccagatggattcacagccaaattctaccagaggtacaaggaggagctggtaccattccttctgaaactattccaatcaatagaaaaagagggaatcctccttgactcattttatgaggccagcatcatcctgataccaaagcctggcagagacacaaccaaaaaagagaattttagaccaaggtgcgttgatgaacattgatgcaaaaatcctcaataaaatactggcaaaacgaatccagcagcacatcaaaaagcttatccaccatgatcaagtgggcttcatccctgggatgcaagggctggttcaatatacgcaaatcaataaatctaatccagcatataaacagagccaaagacaaaaaccacatgattatctcaatagatgcagaaaaggcctttgacaaaattcaacaacctttcatgctaaaaactctcaataaattaagtattgatgggacatatatttcaaaataataagagctatccatgacaaacccacagccaatatcatactgaatgggcaaaaactggaagcattccctttgaaaactggcacaagacagggatgccctctctcaccactcctattcaacatatgcaaatcaaaaaaactgttggaagccagggcaattaggcaggagaaggaaataaagggtattcaattaggaaaagaggaagtcaaatttgtcccctctttgcagatgacatgattgtatatgtagaaaacccccttccgtctcagccccaaaatcttctttaaggctggttaagcaacttcagcaaaagtcttcaggttacaaaatcaatgtgcaaaaatcacaagcattcttatacaccaataacagacaaacagagaaccaaatcatgagtgaactcccattctgttattgcttcaaagagaataaaatacctaggaatccaacttacaagggatgtgaaggacctcctcaaggagaactacaaaccactgctcaatgaaataaaagaggatacaaacaaacggaagaacattccatgctcgtaggtaggaagaatcaatatcgtgaaaaatggccatactgcccaaggtaatttatagattcaatgccatccccatcaagctaccaatgactttcttcacagaattggaaaaaaactactttaaagttcatatggaaccaaaaaagagcccccacattgccccaagtccaatccctaagcccaaaagaacaaagctgggaggcatcacggctacctgacttcaaactatacctacaaggcctacagtaacccaaaacagcataggtactggtaccaaaaacagagatatagatcaatggaacagaataaagccctcagaaataacgccgcatatctacaactatctgatctttggacaaacctgacaaaaacaagcagtggggaaaggattccctatttaataaatggtgctgggaaaactggctagccatatatagaaagctgaaactggatcccttccttacaccttatacaaaaaatcaaattcaagatggattaaagacttaaacgttagacctaaaaccataaaaaccctagaagaaaacctaggcattaccatgccaggaccataggcatgggcaaggacttcatgtccaaaacaccaaaagcaatggcaacaaaagccaaaattgacaaatgggatctaatttaaactaaagagcttctgcacagcaaaagaaactaccatcagagtgaacaggcaacctacagaacgggagaaaattttcgcaacctactcatctgacaaagggctaatatccagaatctacaatgaacacaaacaaatttacaagaaaaaaacaaacaaccccatcaaaaatgtgggcaaaggatatgaacagacacttcacaaaagaagacatttatgcagtcaacagacatatgaaaaaatgctcatccatcattggccatcagagaaatgcagatcgaaaccacaatgagataccatctcacaccaagttagaatggcgatcattaaaaaggtcaggaaacaacagagacgttggcaatgtggttgaagccatgtatggggaccttcctcctccaattatgctgattggacatagcatgggtggtgctattgcagtccacacagcatcatccaacctggtaccaagcctcttgggtctgtgcatgattgatgttgtagaaggtacagctatggatgcacttaatagcatgcagaatttcttacggggtcgtcctaaaaccttcaagtctctggagaatgctattgaatggagaaatatcaaagatctatcttgggcagatagcatcaagaatgtagctgctgccagcttggcttgtatctcaggtgccctgcctgcttccgcagtaacaacaagcccagataataagaggatggccaggaatgtcttgaaatatgaaaggctcttggcagagagccccaaccacgtggtagctgaggctgtcatccagaggcccaatataccccacctgcagaccagagacacctacgaggggctatgtcagaccctgggttcccagcccactctctaccagatccctagcctctactgttcctatgagaccaattccaacgcctacctgctgctccagcccatccggaaggaggtcatccacctggagccctacattgctctctaccatgacttcgtcagtgactcagaggctcagaaaattagagaacttgcagaaccatgggaacagagctcctcaccagcaacggaacaaagctggatggagaatgactttgatgagttgagagaagaaggcttcagacgatcaaactactccgagctacaggaggaaattcgaaccaatggcaaagaagttaaaagctttgaaaaaaaattagacgaatggataactagaataaccaatgcagagaagtccttaaaggacctgatggagctgaaaaccaaggcacgagagctacgtgacgaatgcagaagcctcagtagccgatgcaatcaactggaagaaagggtatcagtgatggaagacgaaatgaatgaaacgaagcgaggagagaagtttagagaaaaaagaataaaaagaaatgaacaaagcctccaagaaatatgggactatgtgaaaagaccaaatctacgtctgattggtgtacctgaagacagatcaatgagacagaaagttaacaaggatacccaggaattgaactcagctctgcaccaagcggacctaatagacatctacagaactctccaccccaaatcaacagaatatacatttttttcagcaccacaccacacctattccaaaattgaccacatagttggaagtaaagctctcctcagcaaatgtaaaagaacagaaattataacaaactatctctcagaccacagtgcaatcaaactagaactcaagattaagaagctcactcaaaacttctcaactacatggaaactgaacaacctgctcctgaatgactactgggtacataacaaaatgaaggcagaaataaagatgttctttgaaaccaacgagaacaaagacacaacttaccagaatctctgggacacattcaaagcagtgtgtagagggaaatttatagcactaaatgcctacaagagaaagcaggaaagatccaaaattgacaccctaacatcacaattaaaagaactagaaaagcaagagcaaacacattcaaaagctagcagaaggcaagaaataactaaaatcagagcagaactgaaggaaatagagacacaaaaaacccttcaaaaaattaatgaatccaggagctggttttttgaaaggatcaacaaaattgatagaccgctagcaagactaataaagaaaaaaagagagaagaatcaaatagacgcaataaaaaatgacaaaggggatatcaccaccgatcccacagaaatacaaactaccatcagagaatactacaaacacctctacacaaataaactagaaaatctagaagaaatggataaattcctcgacacatacaccctcccaagactaaaccaggaagaagtggaatctctgaatagaccaataacaggatctgaaattgtggcaataatccatagcttaccaaccaaaaagagtccaggaccagatggattcacagcccaattctaccagaggtacaaggaggaactgagaataaaatacctaggaatccaacttacaaaggatgtgaaggacctcttcaaggagaactacaaaccactgctcaaggaaataaaagaggataaaaacaaatggaagaacattccatgctcatgggtaggaagaatcaacatcatgaaaatggccatactgcccaaggtaatttatagattcaatgccatccccatcaagctaccaatgactttcttcatagaattggaaaaaactactttaaagttcatatggaaccaaaaaagagccctcatcgccaagtcaatcctaagccaaatgaacagagctggaggcatcatgctccctgacttcaaactatactacatggctacagtaaccaaaacagcatggtactggtaccaaaacagagatatagatcaatggaacagaacagagccctcagaaataacgccgcatatctacaactatctgatctttgacaaaccctgggaaaaaccaagcaatggggaaaggattccttatttaataaatggtgctgggaaaactggctagccatatgtagaaagctgaaactggatcccttccttacaccttatacaaaaatcaattcaagatggattaaagacttaaacattagacctaaaaccataaaaaccctagaagaaaacctaggcattaccattcaggacataggcacgggcaaggacttcatgtctaaaacaccaaaagcaatggcaacaaaagccaaaattgacaaatgggatctaattaaactaaagaacttctgcacagcaaaagaaactaccatcagagaatttgagcagtttaacaggaggctaaatgaagtttctaagagagttcgcatacccttgcctgtgtctaatatactttgggaacattgtatacgattggctaatcgaactattgtagaaggatatgccaatgtcaagaaatgcagtaatgagggtcgtgccctgatgcaattggattttcaacagtttttaatgaaacttgaaaaactaacagatattagacccattcctgataaagaatttgtagaaacttatattaaagcttattacctaactgagaatgacatggaacggtggatcaaagagcacaggttgaggggaagaagagagtctgtagagaagagagacccagaacttcatctgtgtgttctgctgtgcatccttgacagcacctggcacagaatctcagctaagatggatgaaatgcaagtactcaggccctttgaactagaatttttgcctaaactgaaagagttgaaatacctgagactgggcgatttacaaacgaaagaggcttataatggacttaccattccacgtggctggggaagcttcacaatcatggtggaaggcaaggaggagcaggtcatgtcttacatggatggcagcaggcaaaaagagaatgaggaagacactgcagatgacatgattatatatctagaaaaccccattgtctcagcccaaaatctccttaagctgataagcaatttcagcaaagtctcaggatacaaaatcaatgtacaaaaatcacaagcattcttatacaccaataacagtcaaacagagagccaaatcatgagtgaactcccattcacaattgcttcaaagagaataaaatacctaggaatccaacttacaagggacgtgaaggacctcttcaaggagaactacaaaccactgctcaatgaaataaaagaggatacaaacaaatggaagaacattccatgctcatgggtaggaaaaatcaatatcgtgaaaatggccatacttcccaaggtaatttatagattcaatgccatccccatcaagctaccaatgactttcttcacagaattggaaaaaactactttaaagttcatatggaaccaaaaaagagcccgcatcgccaagtcaatcctaagccaaaagaacaaagctggaggcatcacgctacctgacttcaaactatactacaaggctacagtaaccaaaacagcatggtactggtaccaaaacagagatatagatcaatggaacagaacagagccctcagaaataacaccacatatctacaactatctgatctttgacaaacctgagaaaaacaagcaatggggaaaggattccctatttaataaatggtgctgggaaaactggctagccatatgtagaaagctgaaactggattccttccttacaccttatacaaaaatcaattcaagatggattaaagacttaaacgttagacctcaaaccataaaaaccctagaagaaaacctaggcattaccattcaggacataggcatgggcaaggacttcatgtctaaaacaccaaaagcaatggcaacaaaagccaaaattgacacatgggatctaattaaactaaagagcttctgcacagcaaaagaaactaccatcagagtgagcaggcaacctacaaaatgggagaatatttttgcaccctactcatctgacaaagggctaatatccagaatctacaattaa

SEQ ID NO: 121999 - DNA, 1857 bp, Homo sapiens
ctgtggcttagcaatttataattgtaccattgtggacctccattttcctttggctttatataagaaactactgaaaaagaagccatccttggatgatttgaaagaactaatgcctgatgttgggagaagcatgcaacagttactggattatccagaagatgacatagaggaaacattttgtcttaattttacgatcacagttgaaaactttggtgcaacagaagtgaaagagctggttctaaatggtgcagacacagctgttaacaaacaaaatcggcaagagtttgtcgatgcttatgtggattacatattcaatacatcagtggcttccttattccgatgcttttcatgcgggctttcataaggtctgtggaggaaaaggacttctggctctttcagcctaatgaactacaagcaatggtcattggaaatacacatttttgatggaagggaaccgggaaggattaccggaatacaaaggggaatatttgggcagaacatccctacgataaaaattttttgggaagtatttcaccgaattaccattggaaaagaagaaacagtttcttgttatttttgacaggtagtgaatcgcattcctattcttggtatgaagagtctgaaacctagtcatccagtccacaggaggtggtgaaggagtatctcccagtttcccatacttgttttaatcttctgggatcttccaaaatatacagaaaaaggaaactctacgctcttaaacttgatcccaagctattgatcacaatgaaggcttcagtttaatataactttggagttataactattcagtttagtgcaaaagcattaaactatttgtgtttttcttgtggtgatgaattcagcaaggtgacagaggtactattataattcttacttgcagaatgttcaatctacgagtgttcatggaagccaaaaaaatattaaaggaaaatgaacaaactgtttaatattattgtacagaaccatggattttttttgaccatcttctaataaacatagcaagtattatgaatacatttaaagttttactaaacatgaattttaagagtttgcatatttcagaaaatgatctggtgtgagtgcatggaaatattgcttaatttttcttcaatcattgagtgaaaaacctttaactttggcctgcaatagtcatttgattattttttcattttgtaaataatgttaagttttgtaataaaatagttatgttctgataccagtacagtttctatggttgtaattgaacttgaacagacttttaaaggttaaaaattatgatttaaatcttactctgagactctataaaaaggaaaaaaaaggtagccatggtggaaacactatcttttcttttttgctagaataagtgtctttgtgcaaacctaaatccaccagataggggaatatacctacataaccctgcagttccttttcctttgtgaatccctgacacactgatagatgggggattgtcgatcagagaaccttattaatatttagtactggaagaactctgtctcccacagttgcccagtaataaaaagaaacattggctactatgagcaccaatcactgggttatagctttcaaaattattgatgctgcagtgctttagagctatttccttgaatttaagaaacaaatcttaacagttttatggtgctgatgcttagttgtctcatgccattaaattgtaaaagtgagttgatgcaatacatgtgactttctgctataatgcaaatatttattttttaaatttattttaaaatgccgtgaaaacctgtttaataaagatttattgttttaatatttaaactttcaaaaaaaaaaaaaaaaaaa

SEQ ID NO: 122000 - DNA, 1650 bp, Homo sapiens
atgggagaagccaaggcccaggtatctactgtgcgtttcagtcaacaatacagcttgtgttcgacaatattccttgatgacagcacagccatccagcattatcttacaatgacaataatatcagatgcagatagatctttgagcatacctgatgaacagttacactcatttgcggtttccaccgtgcacattatgaagaaaagaaatggaggtgggagtttaaataactattcctcctccattccatcgactcccagcaccagccaggaggaccctcagttcagtgttcctcccactgccaacacacccacccccgtttgcaagcggtccatgcgctggtccaacctgtttacatctgagaaagggagtgacccagacaaagagaggaaagccccggagaatcatgctgacaccatcgggagcggcagagccatccccattaaacagggcatgctcttaaagcgaagtgggaaatggctgaagacatggaaaaagaaatacgtcaccctgtgttccaatggcgtgctcacctattattcaagcttaggtgattatatgaagaatattcataaaaaagagattgaccttcagacatctaccatcaaagtcccaggaaagtggccatccctagccacatcggcctgcacacccatctccacctctaaaagcaatggcctatccaaggacatggacaccgggctgggtgactccatatgcttcagccccagtatctccagcaccaccagccccaagctcaacccgcccccctctcctcatgccaataaaaagaaacacctaaagaagaaaagcaccaacaactttatgattgtgtctgccactggccaaacgtggcactttgaagccacgacgtatgaggagcgggatgcctgggtccaagccatccagagccagatcctggccagcctgcagtcatgcgagagcagtaaaagcaagtcccagctgaccagccagagcaaggccatggccctgcagtcgatccaaaacatgcgtgggaacgcccactgtgtggactgtgagacccagaatcctaagtgggccagtttgaacttgggagtcctcatgtgtattgaatgctcaggaatccaccgcagtcttggcacccgcctttcccgtgtgcgatctctggagctggatgactggccagttgagctcaggaaggttatgtcatctattggcaatgacctagccaacagcatctgggaagggagcagccaggggcagacaaaaccctcagaaaagtccacgagggaagagaaggaacggtggatccgttccaaatatgaggagaagctctttctggccccactaccctgcactgagctgtccctgggccagcagctgctgcgggccaccgctgatgaggacctgcagacagccatcctgctgctggcacatggctcccgtgaggaggtgaacgagacctgtggggagggagacggctgcacggcgctccatctggcctgccgcaaggggaatgtggtcctggcgcagctcctgatctggtacggggtggacgtcatggcccgagatgcccacgggaacacagcgctgacctacgcccggcaggcctccagccaggagtgcatcaacgtgcttctgcagtacggctgccccgacaagtgtgtgtag

SEQ ID NO: 122001 - DNA, 789 bp, Homo sapiens
ctaaaatctaggtggtggaaaggctaccttcatctctagaggctctaggggatcttttttctcgccttttccacattctggagtctgcctgcattttttggctttgggctcttctccactctcaccattagcaaccttgcatcccatggacccttcttctgtggccacatgtctctgtggctctttccttcccccttctcttccactgttggctgctgctgtgatctctgcccaagaggagcttctgaccaacatccaaagggcttctggacccactggactcctctggaggtaccttggtctcccgatccatggctgtgtttttttactccctttatcgctgcctgtcgtgtgcaccctagcgtcagcctcgagtttgaccagcagcaggggtcggtgtgtccctctgaatctgagatctatgaggcaggagctggggacaggatggcaggagcgcccatggctgctgctgtacagcctgctgaggtgactgttgaagttggtgaggacctccacatgcaccacgttcgtgaccgggagatgcctgaaggtgaggaggtgataggtgccatctaccctcggtttgcctctggctgctactgtccccaaggttccctttgaggcatcccccacttcgagctcctttctgcttgtagccagctttcccgggagctggccaggaacaaaagctggctctgccttgaattcccaccccttagtatttccccaccgagtccagtcagtttcttttcgcctcccctcccaatcgcccagttcttgctctctcat

SEQ ID NO: 122002 - DNA, 1171 bp, Homo sapiens
atggtcggcgcagccgagctggcgagggcagcgcgggtcccccggaacgccccccgaggcgagcgctaccgagccgctaccttcctggagtacaacagctggcatgtgctcagctccgtcaacatctgctgctccaagctggtgaagtgccggctgcagaagggcaaggtgaccattgcagagttcatctggctggccacacgcagccaaatggaggccactgagccacaggatatggtggtctatgaccagagcacacgggacgccagtgtgctggccgcagaccgcttcctctccatcctgctgagcaagctggacagctgcttcgacagcgtggccatcctcacggggggcttcgccaccttctcctcctgcttccccagcctctgccagggcaagcctgctgccctgctacccatgagcctctcccagccctgcctgcccgtgcctagcgtgagcctgaccctcatcctgcctcacctctacctgggctcgcagaaagacgttctgaacaaggatctgacgacacagaatggaataagctacgtcctcaatgccagcaactcctgccccaagcctgacttcatctgcgagagccgcttcatgcgggtccccatcaacgacaactactgtgaaaagctgctgccctggctggacaagtctatggagttcatctgtaaaggcaagctgtccagctgccaagtcatcgtccactgtctggtcggtatctcccactctgccaccatcgccatcgcctacatcatgaagaccatgggcatatcctccgacgacacctacaggtgcgacctaggagggataggctggatgtgcggcgggatgaggcgaggatcgattttgtgtgaggcggactgttgtagtcgtgaggatgcgtgttatcgaggctgcagcattgatattccgttcggtggatgggggattgtagggccggtggagagcgctgaggagtggcccggaactgggagcgtcagcctcgagtttgaccagcaacaggggtcggtgtgtccctctgaatctgagatctatgaggcaggagctggggacaggatggcaggagcgcccatggctgctgctgtgcagcctgctgaggtgaccgttgaagttggtgaggacctccacatgcaccacattcgtgaccaggagatgcctgaag

SEQ ID NO: 122003 - DNA, 3137 bp, Homo sapiens
atggttacccatcagcagcctgcagctagaaagccaaacatgacatctaagaaacctaaacccatgggacctaaagcccatgggatcttttcaggaactagaaaaaacaatcttgaaatttatatggaccaaacaagaaccggcatagccaaaacaaaactaagcaaaaacaacaaatctggaggcatgacattacctgatttcaaactatactataaggccatagtcgccaaaatagcatgtggtggttctatgtataattcagatacagatgaggatgaagaaactgagccttcttcttctgggcaacagataattgaaaattcaataactatgaataagatgaagctgctgaaggctaagatgaagaacatgaatctcagcaaaaagcacatcacacaagtgagtgatgaggaagaggatgatgatggctgtgacctttttgctgactctgagaaggaggagaaagatattgaggacattgaagaaaatactagacctaaaagaagcagacctacatcgtttgcagatgagctggctgcccgcatcaagggggatgccgtgggccgagtggacgaggagccgacaactgtgagttatgaggatgacagacgtggaaagaaccaggatgcgtatactgagggaggacttagtactattaaaactgtgaactgttcttcaagccttaccctcaggagaagcaaaacttcggaagacactcaagagaagaaggaaaggagaactccttcggacgatgaagaggataacttattcgcaccccccaagctgaccgacgaggacttctcgccatttggctctggaggtggcctgttcagtgggggcaaggggctctttgatgatgaggacgaggaggacatagaagaatcctctaaccctctctggagtggttacagcctgcgatgggcacgggagcccccgcagcagccagaaactcacactgttgtctccacgaatgagaaaccagaacaatggctgaaaggagagaactgggggtctgtctccactcctttacagaaaagaagcagacctacatcgtttgcagatgagctggctgcccgcatcaagggggatgccatgggtcgagtggacgaggagccgacaaatgaagaggataacttattcgcaccccccaagctgaccgacgaggacttctcgccatttggctctggaggtggcctgttcagtggcggcaaggggctatttgatgatgaggacgaggagagtgacctcttcacggaagccccccaggatcggcaagctggagcctctgttaaggagggtaagctggggctgggcagctgcgtctccgtgtgcagagttccaaaactgtctttctcactaggagatggaaccctgaggagacacggatgtgctgcctccgttccatcactgaaggagccacagaagcctgagcagcccactccaaggaaaagcccctatggtccccctcccactggcctgtttgatgatgatgatggtgatgatgataacgactttttctcgacaccccacagcaaaccttccaaaacaggcactgagaagccttttaggaaaatcgggatggattgtgaccttggagatacctcatcatatcacacaaaggtttccaccgtgcacattacgaagaacagaaatggaggtgggagtttaaataactattcctcctccattccatcgactcccagcaccagccaggaggaccctcagttcagtgttcctcccactgccaacacacccacccccgtttgcaagcggtccatgcgctggtccaacctgtttacatctgaggaaaggggagtgacccaggacaaagagagggaaagccccgggaggaatcatggttgacaccatcggggaggcgggcagagccattcccattaaacagggcatgctcttaaagcgaagtgggaaatggctgaagacatggaaaaagaaatacgtcaccctgtgttccaatggcatgctcacctattattcaagcttaggtgattattatgaagaattattcataaaaaaagagattgaccttcagacatctaccaatcaaaagtcccaggaaaagtggccatccctagccacatcggcctgcacacccatctccagctctaaaagcaatggcctatccaaggacattggacaccgggctgggtgactccatatgcttcagccccagtatctccagcaccaccagccccaagctcaacccgcccccctctcctcatgccaataaaaagaaacacctaaagaagaaaagcaccaacaactttatgattgtgtctgccactggccaaacgtggcactttgaagccacgacgtatgaggagcgggatgcctgggtccaagccatccagagccagatcctggccagcctgcagtcatgcgagagcagtaaaagcaagtcccagctgaccagccagagcaaggccatggccctgcagtcgatccaaaacatgcgtggggaacgcccactgtgtggactgttgaggacccagaatcctaagtgggccagtttgaacttgggagtcctcatgtgtattgaattgctcaggtatccaccgcagtcttgggcacccgccttttcccgtgttgcgatctttgggagctgggatggattggccagtttgagctcagggaaggttatgttcatctattgggcaatgaccctagccaacagcatcttgggaagggagcagccaggggcagacaaaaccctcagaaaagtccacgagggaagagaaggaacggtggatccgttccaaatatgaggagaagctctttgctggccccactaccctgcactgagctgtccctgggccagcagctgctgcgggccaccgctgatgaggacctgcagacagccatcctgctgctggcacattggctcccgtgaggagggtgaacgagacctgtgggggagggagacggctgcacggcgctccatctggcctgccgcaagggaaatgttggtcctggcgcagtccctgatctggtacggggtggacgtcatggcccgagatgcccacgggaacacagcgctgacctacgcccggcaggcctccagccaggagtgcatcaacgtgcttctgcagtacggctgccccgacgagtgcgtgtag

SEQ ID NO: 122004 - DNA, 2422 bp, Homo sapiens
  misc_feature (1)...(2422): n = a,t,c or g
tttttttttttttttttcctttctcaataagcaaattgtaccaccatcttattctgagatgctcctttttaaaagctgtacatcacattaatggaagtggttactgctgggaatattttccatgtgcaatgatctgtaaccctctttttcttttttttgagaccgagtcttgctctgttgcccaggccagagtgcagtggcaacagagcaaaacatcgtccaaaaaaataaaaataaaaataaaaatgaaaaagaggtgccatgtgtacaaaaatcaatgcacatttatgaacttcttttattcaaatatattttcacacattttatctaaatacataacacagaagcctgtgtgacttgggcaacgtggtccaggagggcctgagactaacacatccaccttggccagaaggacataaaatacgtcttatggtcagaaaaaatcaaacaattttgtgtatttacttagtttacgaaaaagtactgaaaatgctattattagctgaatttgtgatttccttttgaaaattctgaggtaatccttatttttcccattttgtttttgcaccaaggagactgcagtcaaataaaacaggatactacacacactccgtcggggcagccgtacttgcagaagcacgttggatgcactcctgggctggagggcctgccgggcgtagggtcagcgctgtgttccccgttgggcatctcgggccatgacgtccaccccgtaaccagattcaggagctgcgccaggaaccacattcctctttgcggaaggccagatggagcgccgtgcnagccgtctccctccccacaggtctcgttcacctcctcacgggagcccatgtgccagcagcaggatggctgtccgcaggtcctcatcagcggtgggcccgcagcagctgctggcccagggaacagctcagtgcagggtagtgggggccagaaagagcttctcctcatatttggaacggatccacccattccttctctttcctcgtggactttaattgagggttttgtctgcacctggcttggtccctttccagatgctgttggctagctcattgccaatagatgacataaccttcctgagctcaactggccagtcatccagctccagagatcgcacacgggaaaggcgggtgccaaaactgcggtggatacctgagcattcaatacacatgaggactcccaagttcaaactggcccacttaggattctgggtctcacagtccacgcagtgggagttcccacgcatgttttggatcgactgcagggccatggcctcactctggctggtcagctgggacttgcttttactgctctcgcatgactgcaggctggccaggatctggctctggatggcttggacccaggcatcccgctcctcatacgtcgtggctttaaagtggcacgtttggccagtgacggacacaatcataaacttttcttcttcttcctcagcagtgctggacaggccatcatcttttaagttgttggtgcttttcttctttaggtgtttctttttattggcatgaggggaggggggcaggttgagcttggggctggtggtgctggagatactggggctgaagcatatggagtcacccagcccgatgtctgaattggctgacatatgcagagcttccatgtccttggataggccattgcttttagagctggagatgggtgcgcaggccgatgtggctagggatggccactttcctgggactttgatggtagatgtccgaaggtcaatctcttttttatgaatattcttcatataatcacctaagcttgaataataggtgagcacgccattggaacacagggtgacatatttctttttccatgtcttcagccatttcccacttcgctttaagagcatgccctgtttaatggggatggctctgccgctcccgatggtgtcagcgtgactctccagggctttcctccctttgtctgggtcactccctttctcagatgtaaacaggttggaccagcccatggactgcttgcaaatgggcgtgggtgtgttggcagtgggaggaacactgaaataaaggtcctcctggctggtgctgggagtcaatggaatggaggaggaatagttatttaaactcccacctccatttcttttcttcgtaatgtgcacggtggaaaacgcaaatgagtataactgttcatcaagtatggtcaaagatctatctgcatctctttccgtgatatgatgatgtatctccaaggtcacagatattattgtcattataagataatgctggctggctgtgctgccatcaaggaatattgtcgaacacgagctgtattgttgactgaaacgctcagtagatacttgaccgatgttgagaaactcaaaggtttccatttcgaacccaaagctggcatctataagcat

SEQ ID NO: 122005 - DNA, 280 bp, Homo sapiens
caccaccaaagctgaccacccccacttcacccgacgtgttgaaagttacatcaaatgccacaaagcaaaaacagtcaagcgtgccagcatttatttcaggcctggtgactgggacactgaaacacttggtgaaacatgccagggctctctggaaccggctcctccaagaccctcgcagaagagcaggttccctgggcaagcctgtgccaccggatgggtcctccgtggcgtcagacacagccacccattcctcagggtcgttttgcagccctttcacatt

SEQ ID NO: 122006 - DNA, 1726 bp, Homo sapiens
ggttctatctgaaggaacttgatccagcagagcactcctatgtcttgatcagaaaaatcgatcctgccctggtttggggcctgacaggcgaccagggcacaccaaagacccggctcctgatgattactctggactcgatcttcatgcaggccagctgtgtccccgaggaggtggtctgggaggtgttgagggtgttggaagcacatttcgtctaaaaagcatttcgtctttggggagtccatgaagctcatcaccaaagctagtgtgcagcaggagtatctggtgcacaaataggtgtcccacagcaatcccacgctctatgtattcttgtgggggctctcaaaggaaacaagacagatggaagtcccggagtttgtggccaaagtgaatgacacccaccccagttccttttccgtgggcagtaaatgaggcatttgagagaaggagggagggagataccccgtgcccgagatgggcagctgccgtttggtgaccgtgacaagtgccagtgtttagttgccagttccagttccagggcctatgccatggctgaagcaagcatcagcaccagcaccaatgcaagtgccagttgccagtgccagggctagagccatggctggagcaagtatcagtaccagggtccgagctgccagctgtggaaaactcaccattgattggccacagcccatcgccaccaggacccaggaacaagcagcgctgccaccaccaaagctgaccacccccacttcacccgacgtgttgaaagttacatcaaatgccacaaagcaaaaacagtcaagcgtgccagcatttatttcaggcctggtgactgggacactgcggcgagcaggggcatggagcagcagaaggggcttggtcaccgttcatggctctgtgtctgtggctccggtggtctcagattccgagtgcccggtatcctcccctgaaacacttggtgaaacatgccagggctctctggaaccggctcctccaagaccctcgcagaagagcaggttccctagggcaagcctgtgccaccggatgggtcctccgtggcgtcagacacagccacccattcctcagggtcgttttgcagccctttcacattctgaaagacagacaggtcagcaggtggaaggaagggagtgaagatcatgcttccaggagtgtgtgatgtgccggtagggaccgacaggacttcgttgaagacaccggcgaagctcgtcactacgaagatgtccttcccaccagccaggccatcgctggctttgtaaggtaatgagattagcaacattagaggtgctgaaacacagcctgagcggtcacttgtaccgtatgctagcggtttttcaaagaaaggagtcccgggctggcccaggaggccaggctgctcagtccccgaagcctgatggcaggtgaggtggacaaccctgttgtcccgcccagtaacatttccttttttttttctgaatctcctttgagaaaataagctgcctctgtgcaactgcagaatctgtgaaggtccagggctggtcatgcctgcaagcccatactcagatgtcgcctccagtgggctgggtggggagaggtcatgtgattgttggcaggctctagtgggtcgctggcctgagggcctcagttcctctatggctgttggccagagactttcatcagctcctcgccagctggccttctccatctgggcaaacacgcgtgcaggaagagc

SEQ ID NO: 122007 - DNA, 351 bp, Homo sapiens
ggcacgagtattactggatgtgttttgtgctctacatggaccaagagaaagatgtgttgaaattctgaggagtggccacttgttagctatctcaccaggtggagttcgagaagccctaattagtgatgaaacttataacatcgtatggggtcatcgcagaggctttgctcaggttgcaattgatgcaaaagtgcccattattcctatgtttacacaaaatattcgagaaggatttagatcacttggaggaacaaggttatttaggtggctttatgaaaaattccgctatccatttgctccaatgtatggaggttttccagtgaagttacggacctatttaggcgaccccat

SEQ ID NO: 122008 - DNA, 534 bp, Homo sapiens
cgaaaagggggaaaggccccactggagcaataagccaagcaacctgaagaggacccatgaactggacattgatgaaaacccagcttcagactttgatgacagtggttcccttctaggattcaagtatggctcaggacaaaaatatggtggaatcccttatttcagtcatcgccaggtcaggtagtgagagaagaatgtgaaacttaaggctaagtacctaaacatgcgcggacaaataaagatgaaaaacaaacacatcttctttaccaaagagacagaaaaaccatttttcaagaaaagcaaaattctgagtaaggtagaaaaattcctcacatgggttaataaaccaatggatgaagaagcatcacaggaatcatcttctcatgacaatgggcacgacgcttccacaagttgtgattcagaggaacaagacatgtctgttaaaaaaggtgatgacctactggagactaataatccagaacctgaaaagtgtcagagcgtatcttcagctggtgaacttgaaacataaaacta

SEQ ID NO: 122009 - DNA, 1588 bp, Homo sapiens
atgcccgtgggaacaagtaacttcctcctcctggggctgcttgaaaaccctaatcttcctctcaccaggccaagtcccttcccttctcagcgggaggccagctggggcatccaaaaagccacaacgggccctggggagggagaatgcacccgtctggggtttagtttattactggatgtgttttgtgctctacatggaccaagagaaaaatgtgttgaaattctgaggagtggccacttgttagctatctcaccaggtggagttcgagaagccctaattagtgatgaaacttataacatcgtatggggtcatcgcagaggctttgctcaggttgcaattgatgcaaaagtggtagaaaaattcctcacatgggttaataaaccaatggatgaagaagcatcacaggaatcatcttctcatgacaatgtgcacgacgcttccacaagtagtgattcagaggaacaagacatgtctgttaaaaaaggtgatgacctactggagactaataatccagaacctgaaaagtgtcagagcgtatcttcagctggtgaacttgaaacagaaaactatgaaagagacagcttgctagcaactgttccagatgagcaggattgtgttactcaagaagtgccagactcccgccaggcagaaactgaagctgaagtgaaaaagaagaagaacaagaagaagaacaaaaaggtgaatggtctgcctcctgaaatagctgctgttcctgagctggcaaaatactgggcccagaggtacaggctcttctcccgttttgatgatgggattaagttggacagagagggctggttttcagttacacccgagaagattgctgaacacattgctggccgtgttagtcagtccttcaagtgtgacgttgtagtagacgcattctgtggagttggaggaaataccattcagtttgccttaacaggaatgagagtgattgccattgatatcgatcctgttaagattgcccttgctcgcaataatgcagaagtttatgggatagcagataagatagagttcatctgtggtgatttcttgctgctggcttctttttaaaaggctgatgttgtgttcctcagcccaccttggggagggccagactatgccactgcagagacctttgacattagaacaatgatgtctcctgatggctttgaaattttcagactttctaagaagatcactaaataatattgtttattttcttccaagaaatgctgatattgaccaggtggcatccttagctgggcctggagggcaagtggaaatagaacagaacttccttaacaacaaattgaagacaatcactgcatattttggtgacctaattcgaagaccagcctctgaaacctaactatgcagcagtgcgaggacaaaagatcatggagtggtcaaaatattcagatgagacatttggcatgtcttcctttattcactgatattttctacccatggtcttatatcaccgtatgaaatggaaacttacaggacttaaatatcagtgaaatattttgagatctttgaataattcctttagaggaattatacaaaattaatatatatgagtcct

SEQ ID NO: 122010 - DNA, 2730 bp, Homo sapiens
agagaattcacacgggtgagaaaccttatgactgtaaggactgtgggaaggcctttggtcgtacatcagaacttattctacatcagagacttcatactggtgtcaaaccttatgaatgtaaagaatgtgggaagacctttaggcagcattcacagctgattctgcatcaaagaactcacacaggcgagaaaccctacgtatgtaaagactgtggcaaggctttcattcgtgggctcccaactcactgtgcatcggagaatccacacaggggccagaccctatggagtgttaaaggaatgcggggaaagccttttagacagcactcacagctgactgttacaccaggcgaatccacactggttgaggagccctacgagtgtaaggaatgcggaaagggctttattcacagctcagaagttactcgacatcaaagaattcattctggggagaaaccctatgagtgtaaggaatgtgggaaggccttcagacagcacgcacagctcacacgacatcagagagtccatactggcgacagaccctatgaatcggctgaagactgacgcgcccgattgcctcggaagccccgtagaccatcacagatgccgagctttagtaactctcacagtggagggcagtcaagcacagcacagcgaaaagccagaggatagaacgacaatgacacaagctaaacgacaacaacacaggagcacaataactgtccggcacacaacgttgacaacaaaccagcgcaagccaagccaccgtactcacaacatgcgatcgaagagattgagcttaagagagagcccaagccacatacacacccacgaagatccaaagcgacatagccaccattcacacgacaaacaaacccacagcctgagcccagaaaaacacgaacgagtccctaaaccaaaacgacagacacaaaagagcgaaagcgacaaatacaaactgcacgaacggagacaccctagactgaccaccgaccggcacaacacagagaacacaggccaccccccacacaggacccaccagacaagtccgaccccaccacaagctaagaacaaaaggaccgccaagacggcaagggaccgcacacgcgcgaccggaacagtacaagccaagacgcaagcgcaggcagcccgtagtgccataagaacatcaccaacggatcgggccataagacgccagaactacgaaagcacagacagactaaacacaacaccagcacacaatacaatggccaccaacgacccgcgaaccggaacacaacaccacatcaccacgcccaaaacaaggaacgcacacagaaacaacaagcaacaccggcaggaacgacaccaggacgcacagaaaagagcaaacaacacagcagcccagaaactggatagcatacacagccgcaggcacgccccagcgacccccggcggacacaacacgcgcaccagagggcacagccgccccaccggacacacgcgccacggccccaaacacacacaggcggaggtgccaccgcgaagcgcacaccgggagcgcgcccaacggtgcatgccgcccgcatcatcaattgacactcagaacgaacgaaagccgtatacggcacacgagcaccaaccacccatatacaagacccccgcgaagagtaactggatagcatcctatgcgcacccacacgcaggccgccagcatccccatgcccgcagcgaccgaaccacagcagccctacgcgcaccacccgccaaacaccgccacggggttagcaacgcctttgcgggtaagcggtacatcggcggcacgcgaggcgggattacagcatatcctgtaagacataggtgcacaggcaacgttcacatgctgctgcccccccccccccccccccccctattagtaactggtagcagccacgaaccgaccacaacaccccagcccaacccgcgctacaacacccccacgcaacccaagcagaagtacacaaagacccccccccaccccaacaccccaccacaccccagccccccacccccccccccaccccgccacacccggcccgacgcacgcaaaccactcgaccccaggcaacacagccaccacgccacacagaagacccgccatccacactggctacgacaaccacacggaggacaggcagcagcaaggacaacccaacggcaccgacataacccccccacggacgagcacatacacatccgcgtacggaacattcactccggtccgagtaacgccgaatgcgtagcgccagcctgcacgcatgagcgggaccagctcacgaccaaaaccacagacaagccagaaccaacaacgaccaaagcgaagaacagacacagagcaaccacaacgcacccatcgacggccgcaccaaacatcgacaatacaaggaaacgacgcgcagacctccaccacgaaaagcagacggaaaaaagatatcccaagcagcagacacatcacaagagcgactgcacccgagaacgctcaacacccactacacccagcaaacccacaggacaacggacacaccacatagggaagcgaaaatggggaccgcgaagcagggacctcgggtggctggtgtacgaactcactccccccgtgagtatgcctccattctcagtgtatcaatgttcgctcagtgaaatggaccaagtgtgggcacttcgggtagtgcccaattatggtactaacaatcgttccataacgaataccgatttg

SEQ ID NO: 122011 - DNA, 1891 bp, Homo sapiens
atgaaacatgggatgcctttgcatatggtggtgttgaaagccacaggacagtacggggtctcaggggattctgcagtccccgagggttgccctacgataccgacactcgcggcagccctgcgaggcgagtatgatcgtacatataacggagtagcacactacggcttcacagactactatgtcccaggcggtcaggctcgacggtccgattacctctcctccgccagacgacacgcgaccctgcgcgaagcaaaccaacccaagggggaccgccacccaaccctccacccacccgacaaggccgccccacagccctcaccaaccccagccagccacgcccacgacaccgcgcgcacccacaccaacacgccaccccaaagccaaggacaaacgaagaacaagagggacgccgacacacgaaacagcccaacccaacacgaacagaaccacgaccaccaaacagaagaggcagaccaaacccccagacgcgacgcaccaaacaacaaaacacaacaccgcaagcccacacaagcacacgcaagaacgcacgcacgccaggtctttgcccataatgtgtcaagggcaaaacagagggtggatatgatgcacgtgcctcagcccggggcccgtacatggctggcgtcagctggccaggggagcatgaagaccctggagcaccggaagccagaagaggccgccgggcgctaccaggttgggtcggctttccccgagatgagcacacacaccgaaagcaccccaaaaacgacagcgcacaccagcaacgaccgacggaacagagaacagcgagtgaaaaagaaaacctacaagacaacacgaagtcgaggcgctaatcgcaacagcacagaacgacacgaagacgggtatttctatggcagtctgaccactggaccactgccatggcacagtgcaatacacagtgtatctgcgggccagccctggtctctcaagtttgttacaggtctgcaacaagccagtgaggggtacttcagtcaatcacaggagaggagtttgcccaatcggaagagctctgtgccaaggctccgcctcctgtttctacaacaagcctccaggctctctgagctgcccctggggactgagggtccaggaagtttgctgcttaggcccagagaggagctggcctgcactggaaagaggagaaagacaggtggggccatcatgggggaagtgagtgtttgtgagctcagtctgcctgccccagccttccagtctccagtacagctgtgtggttgtcagccggaaaaggcctgaccccagggacacagctgaggctgggagtaccttggtagcctacactgaggagcccagggcaggaagtgggacttacacaaggactgataacatcagggcctggaggggtgttgtctacaacaccccattttctcctaaaagcagagctctggtggcctattgccaagccacacaacccctgttgccccacatcctgctcaacacaggcctgccccacccaccccagcagcatccgtgtggccaaagcgagttattcatcactgggggcagcggggaccaggcaccgtacgaggtgattatctggcgcttaccaaagggggatgaggatctggtcccccccggaactggtgatcaaaggatccagtttcctcggagtgcctggacccaccccctctacagcgtttctccctggttttcgcgttcgatgcgcggcgagtcgctgcgacaccatgcgatgggctgcctgccatcgtcacggtgggacattcgtcgccgcttcgcccccccccgccgtgatactcgacgacttgtcctgaccgcgccgaggagaatgcgagacgctaccttctcgcgacagtctaccaccttggttcctcgttga

SEQ ID NO: 122012 - DNA, 2556 bp, Homo sapiens
cgggaggcggcggcggcgactccctctttccctccctcctcctccgtccgcccgtccgtccgcgcgtctgtccgttcggcccggtccggcccgaagcatggccggcgtcagcttcagcggccaccgcctggagctgctggcggcttacgaggaggtgatccgagaggagagcgcggccgactgggctctgtacacatatgaagatggctccgatgacctcaagcttgcagcatcaggagaagggggcttgcaggagctttcgggacactttgagaaccagaaggtgatgtacggcttctgcagtgtcaaggactcccaagctgctctgccaaaatacgtgctcatcaactgggtgggcgaagatgtgcctgatgcccgcaagtgcgcttgtgccagccacgtggctaaggtggcagagttcttccagggtgtcgacgtgatcgtgaacgccagcagcgtggaagacatagacgcgggtgccatcgggcagcggctctctaacgggctggcgcgactctccagccctgtgctgcaccgactgcggctgcgagaggatgagaacgcagagcccgtgggcaccacctaccagaagacggatgcagctgtggaaatgaagcggattaaccgagagcagttctgggagcaggccaagaaggaagaagagctgcggaaggaggaggagcggaagaaggccctggatgagaggctcaggttcgagcaggagcggatggagcaggagcggcaggagcaagaggagcgcgagcggcgctaccgggagcgggagcagcagatcgaggagcacaggaggaaacagcagactttagaagcggaagaggccaagaggcggttgaaggagcagtctatctttggtgaccatcgggatgaggaggaagagacccacatgaagaagtcagagtcggaggtggaggaggcagcagctattattgcccagcggcctgacaacccaagggagttcttcaagcagcaggaaagagtcgcatcggcctctgcgggcagctgtgatgtaccctcgcccttcaaccatcgaccaggcagccacctggacagccaccggaggatggcgcccactcccatccccacgcggagcccgtctgactccagcaccgcctccacccctgtcgctgagcagatagagcgggccctggatgaggtcacctcctcgcagcctccaccactgccaccgccacccccaccagcccaagagacccaggagcccagccccatcctagacagtgaggagaccagagcagcagcccctcaggcctgggccggccccatggaggagccccctcaggcacaggcgcctccccgggggccaggcagccctgcagaggacttgatgttcatggagtctgcagagcaggctgtcctggctgctcccgtggagcctgccacagctgacgccacggaggtccacgatgcagctgacaccattgaaactgacactgccactgctgacaccactgttgccaacaacgtaccccccgccgccaccagcctcattgacctatggcctggcaacggggaaggggcctccacactccagggtgagcccagggcccccacgccaccctcgggtactgaggtcaccctggcagaggtgcccctgctggatgaggtggctccggagccactgctgccagcaggcgaaggctgtgccacccttctcaactttgatgagctgcctgagccgccagccaccttctgtgacccagaggaagtggaaggggagcccctggctgccccccagaccccaactctgccctcagcccttgaggagctggagcaagagcaggagccggagccccacctgctaaccaatggcgagaccacccagaaggaggggacccaggcccagtgaggggtacttcagtcaatcacaggaggaggagtttgcccaatcggaagagctctgtgccaaggctccgcctcctgtgttctacaacaaggcctcagagaatgtcattcacatgctgggatgcagacccagttccagaagaggaggagggcttcgagggtggtgattagcggtggcgccagccctaggctacccttgccaaggccgcccacctgcatcagcctctggccagacggcccgccgtgcctgcattcgcagcagctccgcctggcacccactccggattccggccctggctggggacttggccgcttccctacccacagggcctgacttttacagcttttctcttttttttaaaaagttgataggagacttgtacagttgactggctttcctctcgttggtagttgagacgctgttgcaaattccacccctccttccctggtccagattgtagctcttagtcctccctgctcagctggccgggttggaggcctcaccctgcttggggcctggcgtggggggagctctggtgggaaaatgtcccccacctcttttcctagttttatgtttcttgggaaaatatcactttgtattctctgtccagggcttcagatattttgcacgaattttaaaacatggcaataaatggctcgtgggctctggctccctgg

SEQ ID NO: 122013 - DNA, 178 bp, Homo sapiens
ctgtggtggtaccttctggagaggagcagagatacacctgccatgtgcagcatgagggtctgcccaagcccctcaccctgagatgggatagaaaaggagggagctactctcaggctgcaagcagtgacagtgcccagggctctgatgtgtctctcacagcttgtaaagtgtgagacag

SEQ ID NO: 122014 - DNA, 1225 bp, Homo sapiens
atggggtcatggcgtcccgaaccctcctcctgctgctcttgggggccctggccctgaccgagacctgggcgggtacccactccataaggtatttcagcaccgccgtgtcccggccgggtcgcggggagccccggtacatcgcagtgggctacgtggacgacacgcagttccgacgcggcgactccgaggatgtagccgcagtcgccgtggttggagcaggagggaccggagtattgggaccggagcacacggaacatcaggcccgcgcacagactgacaagagtgaacctgcccatgccgcgccgctactaccaccagagctaggccgggactggaattttccacggaattcggagattatcccagatacctgtgtccagacacatatgatccaccattccgtctctgactataaggccaccctgaggtgctgggccctgggcttctaccctgtggagatcacactggcctggcagccaggatgaagaggaccagacaagggaccatgaagcttgtagagaccaggcctgcaggggatggaaccttccagaagtgggcggctgtggtggtgccttctggacaggagcagagatacacctgccatgtgcagcatgagggtttgcccaagcccctcaccctgagatgggagccgtcttcccagcccaccatccccatcgtgggcatcattgctggcctggttctctttggagctgtgatcactggagctgtggtcgctgctgtgatgtgcaggaagaagaactcaggacattttcttcccacagatagagtgagcttacttctgaaagggcaagcagcgaccatgcgcagggttctgatgtgtctctcacggcttgtaaagtgtgagacagctgccttgtgtgggactgataggcaagatttgttcacgccttccctttgtgacttcaaaaaccctgactctctttctgcaaaggcacctgaatgtgcctgtgttcctgtaggcataatatgaggaggtggggagaccaacccacccccatgtccaccatgaccctcttccctcatgctgacctgtgttccgtctccaataattaatcattcctgctccatagacgtgaggctgagatgtctccatctctgtctcaactttatgtgcactgagctgtaacttcttacttccctattaaaattagaatctgagtataaatttactttttcaaattcttgccatgagagggtgatgggg

SEQ ID NO: 122015 - DNA, 591 bp, Homo sapiens
atggtcactgattatgccatagagcttttccttcaggcaagtctaatccttctctcttccactctgccctacaacgagagagagatggggctctcaatctttgcactgctgacccttactgtgttcctgctgctgctggctgacaaagtacctgagacctcactatcagtacccattattatcaagtacctcatgtttaccatggtcctcgtcaccttctcagtcatccttagtgtcgtggttctcaccctgcaccaccgctcaccccacacccaccaaatgccccttttggtgccgtcagatcttcattcacaaacttccgctgtacctgcgtctaaaaaggcccaaacccgagagagacctgatgccggagccccctcactgttcttctccaggaagtggctgggctacatcgctcgacagctgcaggaacaggaggaccacgatgcgctgaaggaggactggcagtttgtggccatggtagtggaccgcctcttcctgtggactttcatcatcttcaccagcgttgggaccctagtcatcttcctggacgccacgtaccacttgccccctccagacccctttccttga

SEQ ID NO: 122016 - DNA, 4494 bp, Homo sapiens
gatttttgaagaaccagtttattaagagattacaccaaaagcataaacaatttatacgtcaaactccgactgaaaaaaaaataaccgataaggatgttttttaaatgtactgtactcacaaataacaagacaaatttgacctgttcaataaatagaaatgaagtggctaaaaatgtttaaatggaaatggaaaacagtcgtcttctttgtacagttttgaaggggtgccccctattcacgcctacacgtagaaaaaccctgacaaaatcagaggttcacttaacactccaaccatatgagcgtattaaggtttcttttcagatcttaggagatcttgtccaccttaatcccattcacagatcttaggagatcttgtccaccttaatcccatcataaagactgttggcatgagttctgatgtactgttttaatatgctgagtactgttgattcaacaacaaaccttaatgggtgatgagcttttgcataccaatatgaatttgtcagcacttctgaaaactggccatcatttttcaaattcacaatttgctggatgtcagggaacaataggaagaagaatgagcgtcaattttcatgtcttcctttgcttcttcactggccttccatagaagtagtcagaaaaaaacaaagcaccatcaaccacacttcacaaacaattcatgttggcctaagctttgctcaacattcatatgacagaagatagaataatgaaaaggaactgctggcatcactttccccataatattacataaaaatggacagcacattaaataaacattctgttattaatcattaaatatattaacaccaaaaatcatgtataaattaggaaataaatgtacaaactattttgcaaagtgctttttaaaatatatacacaacattcaagatattcttaatgtaagacatttcagattgaagttttggggtaagtgtccttttctttcagaaagtattattaatacagcacttaaaaaaacacacaaacacacaaaaaaggcatattcccagattggcaaggaataaaaataaactatcttcacagttatctaaaatgtttaacattttcagtgggaaattttagtccccgattgagtttgcaaattaggtctatgaaaattgacaggaaaagaacacaatcaagggagatgactccctaactgaaattgctaacgcgtttgtcaattagcaattaagaactctcatttcggtgatcgaatatgaacacatacgtttatttttgagcccttaccagtgttaagggttttagaaacccttagtgcctacaaaataaacacttctctccccatttgtgcgtgacatccgtctcctaggagaggggagaatgtcctagaacaggactggtattcaacacaggcaagtcctttaatctgtgcctcagttcttcatctctaaaatgggaactgttacctgcctccagatttcctcataggggctgtcagaattaattcaagcaaaacacataagtgacttataaattctaaagcacccgactctggataaagaattaattttaacttatttatttatttatttatttatttttttgagacggaatttcactcttgttgcctaggctcgggtgcaatggtgcgatcttgccccaccacaacctctgtctcctgggttcaagccattctcctgcctcaggttcccgagtagctgggattacaggtatgcaccaccatacctggctaattttgtatttttagtagggacggggtttctccatgttggtcaggctggtctcgaactcccgacctcaggtgatccgcccgcttcggcctcccaaagtgctgggattacaggcgtgaaccaccacgccaagaattacttttaacttttaaaacaaaacatcaattaaagagaaatatcgttattactaggcctcatatatcaagcattggatatctcttgtattttcttggtagttcttggaaatctgtcagcatttatccaaagattttttttaaaaggattcatagcaaatatgaatattattattccaactaaaggttgatcaaatgtccatgctacttgttaattgaaatgtgggatttttttcctttgaccatacttttgcaagtgtgctgtctttaatgttcacacagaatttaaatgggatttaatgtcttagaaatgtaaaaattactcaagtttctctatataaaacctttacttttcattagaaagaacacagtaatgtaactggatgtgactttcagacatccctaaaagaaaagaaatgcttgcttggagatctgagcaagtaggtcctggaagaaataatataaaataaacaacttgccaactgttgggaagatttggtttgaatatttaaaattacctatcaacttagaattgggcttattaaatattccaatcccagaaatgaccatcagctaaacaagggtcaaagccagagtaatctctgagggcccacttcccagagagctgcccctttccttcagcaataccgctggccctgggttaggcaatttgtccacggcccttagggattcatatttatttggaatacagtcactgatccctgtttactttttaatacaaaaacatgtacctttttggataaacggaattggcgagagacaggcaatgggcaagctctggaagtggccatctgtggcctctcccgtgggagatgtttatccttttcgttacgtaacagaaactgacccaacgcacagaagatgccctcccacccaccccatcgaggcacaggaagaggctgccctccaggggctgcatgtgtgtccagctgtggcgtagccagttaaagaaaagttgacaacccacactacaacactgcatgaggaggaaaatgagacctaacgtctgttgacgggaacaggtggactgtggtgtcctcgagatctgtcctgtccctgggcacagaatgctctgatgacaaaatgacccccaaagctagctagaaacattgagaagggggcgggggacaaaaaaaggatacctctccgtgtaccgacatacaatactatacacagcaccaaaagtatcacaccaccaagcgctgtctcacgccagtggtgtgcgctcggcgtcatacccagcatgaaatgagcacgcttcacatgcagacgtggcactgggcgaacaggtaaccaacatgtcacaattcaccagagctgccgccagcccatccggcccctggatgaacacgctaccacaagggctccagccagaatgtgtgtcccttactgctggtaatttccatactggccctgttcatagccgtagggccgctgctgctgggcagacggcgctgtctgcggtgctcggtagcttccgtactgctggccttggccttgctggtagccggggtactgtgacggggctccctgggcagacccgtagccctgctgctgcccggggtagctctgctggctggggtactgctgctgggagtacgtctgctgctgcgcggcaccctgctggtacccggcctgctgctggctgtactgggagtttcccccctcatagtagtgctgcgtggactcctcgaaggaccggtcgtagctctgctccgtgtaggatgactgctggtaggcgtaatcgccatggccgtcggggtagtactgctggcccatgggctccgcggcgccctggctgtggctgtactgctcgccatagtactcctcctggcccaggtactgctgggaagagccttgctgggagggccggtagggcgccatgggccgctgccccatcatgctgctcccctggctgccctgccccatcatggcgatggacgactggccctggtagtgctggctgccgccctgcgccgagctgtagtgcgacgtggccgcctgctgctgcatcatggagactgggttggactgcatgttgatgttggtccgagacacgtagttgccgatggtgccttgcccctgcatggggacgccctgcgaggcgggtcccgcgtggctgtagccgggcccagagatgctcatggaggtggtgggcagcgtgttaggcgccgtctgctgcatggacacgtggctcggcccgttgccaatctggccctgcaggagggaggagggtggcaggcccgtgctgatggcgtcactcaggctgccctgagagtgcaggccctggctggagccgctctgagtcagggctccagggcccaggttcatgttctgcgtgggcggggcaggaagcagggactgcatgttctggttggagtctgcgatcgtggccaggtataccaggttccggtgcaggatctgctggtactgcgtgcactcggccgtcttgcccttgctctggtactccaggatgcactggatcaggtggtggttctcgtccagcatcttctggatggtttgctgcgtaacctcccctttgcctcttggccgggcagacgcgaaggccacggacatggtggcggcgcggggctcagcccgtg

SEQ ID NO: 122017 - DNA, 3168 bp, Homo sapiens
gtcttacattttatgtgtttttttaaattctgcactttgacagtggtagcaaaataaaagtaatccaaaagttatttttctattgagaagagagaagaggtgggttttatttttttccttttgattccaatcttttctcccagtgacaaagcataaatcatggacaccagagaataaggtggacctcaggaatccggaaaagactgagaagcttacattcttcctctagagggaagagtggggtgtttatagccatctctggaacctaaaacaaaaaacatgagttgtgtgccatggaaaggagacaaggccaaatctgaatcattggagctgccccaggcagcacccccacaaatctaccatgagaaacagcgcagggagctttgtgccctccacgccctcaataacgtcttccaggacagcaatgccttcacccgggatacgctgcaagagattttccagaggttgtctccaaacaccatggtgacacctcacaagaagagcatgctgggaaatggcaactacgatgtgaatgtcattatggcagcacttcagaccaaaggctatgaagctgtttggtgggacaagcgcagggatgtcggtgtcattgccctcactaacgtcatgggcttcatcatgaatctgccctccagcctatgctggggtccactgaaactgcccctcaaaaggcagcactggatctgtgttcgagaggtgggaggggcctactacaacctcgactccaaactcaagatgcccgagtggattggaggcgagagcgagctcaggaagtttctaaaacatcatttgcgaggaaagaactgtgaactcctgctggtggtaccagaagaggtagaggctcatcagagttggaggaccgatgtgtaacagttctgcccaacctccctctcgcctcagccccttcagtcctctgtgacgtgctgtggcctctacagtgggtctgcccttgccacttccccaaacatctcatcaagtttttccccttcagatctgacagtgcaataggacagacgtgtggactgttataagaactactcagtgttttgttcctgggcaaggaaggtaggagttctgtgcacttaaggccagtggtcacaaacccttgttttatttaagagacagaggagaaagtggagcggggagggaatcctagcttattttcccttttctatgaggacttgacacaggttctgctgagttgtcactgctgctccagactcacctagagatgctgcctccactttccatcctgtctgggtctgaaaacagtgggtctgcagatagtgcccacaaaccccatgtgactggtttgaaggacccagagcataaaggtctctcaggaaaccatgtccaaaaccctagcagcggtacagcatgctgtctccaacccttatccccaggtttaagggtggtttatggccatacgtggaggttttttgttgttgtttttgagactgagtttcactcttgttgcccaggctggagtgcaatggcaccatctcggctcactgcaacctccacctcctggttcaagcgattctcaggcctcagcttcccaagtagttgggattacaggcgcctgccaccacacctggctaattttgtatttttagtagagatggggtttctccatgttggtcaggctggtctcaaactcccgacctcaagtgatctgcccgccttggcctcccaaagtgctgggattacaggcgtgagccaccgcacccggcagagttttataatgaaaaattaactaatattctagtatgaagtgaggaggatactgaacaggatgtggctaaagccaacctgggacagccatggggtggcttggtttcttcactccagtgttgtccctaccatttcgcagcattgatttaggaggctctgggacaaaagagaagccaaagagcagttttcccagttcactcactctggcaaaatcaggaaaaaaaagtctgcttttgacatcaaattccactaatttggggcagcgttgggtgaggaaagtattgtgaagacaggcttcttggagtaggggcagccacaattcagtagacactctaggctcggaggctgccactgtagttgccaagctcaggttgggtggttctgtgctgtatggatggaataggacctgggctggtcatcttcatgtcgtttcctctctgtatcaatggaagttcaacccgcccctacctcttcagatagttgtaggccacttttctcttgtaactttggaaaacaaaagaggagaaataagtatcataccatatgcgtgtctccaaagtggatgtggttgcctcaaggcaggtggcaggcaggggtgacctgctggccctcagatcaatggtcgtggcaggtctgagagctgtcccactggccagacttctctccagcagcaaagccagcctggggcttgcatgttgatcctgagcaagcttaacggggtgaagctgggctttctcccccctgtgactggagtgcatgttgacaccagcactttttctgcacatgtatcttcaatccaacaaggccgtttttttaatgctgagtaacaggccaccaagcggctactgcgttatatcttctcagcaactggccgcagtctcttctgcaccattttctacaccagacctgcttggcaccacagggagctcttttcctgccctgcacaatgacattccaaccaccaccagccagacattacagccaaccttgctgattgtcacaagcaggaccttggggccactggcactgtcagatagtaagccatttcttgggtagaggaggaaactcctctccacaaatccacttgggcctgtgcaaatggcacttgaaagagtccccatgcacttggagtccatgagccaatgggatatgcaaagacgcttaaacatttcagggctggtttctctgttcatatccaattctggtgcttaggaacagggacccatgctgatgcccaagggcaaaaagccccacttcctttaaggaagtgaacaggcctgaccctgatgcccaataacgggcaaccctaggctttttgtttttcttgcttttattcctttttgttgttggccttgtgctgcgtttgtttacaaaagatgtattttgtttaaccaaatattaaaaatggaaaactcc

SEQ ID NO: 122018 - DNA, 1651 bp, Homo sapiens
agcgagccgccacggtatgaccccaggggctctgctgatgctgctgggggcgctggggccgccgctcgccccaggcgtccgcggctcggaggcggagggtcgactccgggagaaacttttctctggctatgatagctccgtgcggccagcgcgggaggtgggagaccgtgtcagggtcagcgttggtctcatcctggcgcaactcatcagcctgaacgagaaggatgaagagatgagcacaaaggtgtacttagacctggagtggactgactacaggctgagctgggaccctgcggagcacgacggcatcgattcgctccgcatcacggcggaatccgtgtggctccctgacgtggtgctactgaacaacaatgatgggaattttgacgtggctctggacattagcgtcgtggtgtcctccgacggctccgtgcgttggcaacccccgggcatctatcgcagcagctgcagcatccaggtcacctacttccccttcgactggcagaattgcactatggtgttcagctcctacagctacgacagctcggaggtcagcctgcagacaggcctgggtcctgacgggcaagggcatcaggaaatccacattcatgaagggactttcattgagaatggccagtgggagaatatccacaagccctctcggctaatccagcctccaggcgatcctaggggagggagggaaggacagcgccaggaagtcatcttctacctcatcatccgccgcaagcctctcttctacctggtcaacgtcattgccccatgcatcctcatcactcttctggccatcttcgtcttctacctgccaccagatgcaggagagaagatggggctctcaatctttgccctgctgacccttactgtgttcctgctgctgctggctgacaaagtacctgagacctcactatcagtacccattattatcaagtacctcatgtttaccatggtcctcgtcaccttctcagtcatccttagtgtcgtggttctcaacctgcaccaccgctcaccccacacccaccaaatgcccctttgggtccgtcagatcttcattcacaaacttccgctgtacctgcgtctaaaaaggcccaaacccgagagagacctgatgccggagccccctcactgttcttctccaggaagtggctggggtcggggaacagatgaatatttcatccggaagccgccaagtgattttctcttccccaaacccaataggttccagcctgaactgtctgcccctgatctgcggcgatttatcgatggtccaaaccgggctgtggccctgcttccggagctacgggaggtcgtctcctctatcagctacatcgctcgacagctgcaggaacaggaggaccacgatgcgctgaaggaggactggcagtttgtggccatggtagtggaccgcctcttcctgtggactttcatcatcttcaccagcgttgggaccctagatcatcttcctggacgccacgtaccacttgccccctccagacccctttccttgaagactggagggttgagaccaggccccctgccagttgaagtgagagagtttggtgatactgtcaagccctatccttctctgcctcttaactccttcacgaggaatctgggcctcttatttcgttctggg

SEQ ID NO: 122019 - DNA, 882 bp, Homo sapiens
tttttttgagatgaagtctcgctctgttgccaggctggagtgcagttgcacgatgtcggctcactgcaaactgcctcccaggttcaagcgattctcctgcctcagcctcccgaagtagctgagatttcaggcgcctgccaccacgcctgcctaatttttgtatttttagtagagatggggtttcaccatattggccaggctggtctcaaactcccgacctcaggtgatctgcccgcctcggcctcccaaagtgctgggattacaggagtgagccaccgcgcccggcctgcatccagctatttattttttttttgagatggagactcaccatcgcccaggctggagtgtagtagtgcaatctcagctcactgcaacctccaactcctgggttcaagtgggtctcttgcctcagcctcccaagtagctgggattacaggagcctgccaccactcccggctaatttttgtatttttagtagagatggtgtttcactatgttcgctaagctggtctcgaactcctgacttcaagtgatccgcctgcctcggcctccccaaagtgctgggattacaggcgtgagccaccatgcccggctaatttttgtgtttttagtagagacggggtttcaccatgttggccaggctggtctcgaactcctgacctcaggtgatccgcccgcctcggcctcccaaagtgctgggattacaggcgtgagccactgcgcccggcctccccaaggagcacttttacagccaaacccacctctctcagctctcactcctgcttatatccctgcaacccaggagactgttttctatttgtaaaattttgccatttcaagacagttgtattaatgaaatcactgtgtgtgtcaaaaaaaaaa

SEQ ID NO: 122020 - DNA, 859 bp, Homo sapiens
caatagggcttgagcacctgagccctgctgagcacgtctgtgcagccccagccctcagcatctcttccactcgcttccagctatatcttttccctttccttcttaattcaggaggcagctttgcaaccacagggcccaacgatagagactgtgaggtggcatttttttttttttttttttgagacggagttttgctgttgttgcccaggccggagtgcaatggcacgatgctcaactcaccgcaacctccgcctcctgggttcaagcaattctcctgcctcagcctcccaagtagctgagattataggcgcatgccaccacgcccggctaattttgtatttttagtagagatggggtttctccatgttggtcaggctggtctcaaactcccgacctccggtgatccgcccgcctcggcctcccaaagtgctgggattacaggtgtgagccaccgcgcccagccttgaggtggcatgttttcaaagaacatggtgcctcagttttggacacacaggaactcaaatacaatcattttcctgctgctaagtaatgcttgggtgggctgctctggttgcagatatgtgaagttaggtagcctttcctgttaacccatggttccaagcactctctcttaacaatcattcctactgtgaattttctacccggaaaagccaggggtgggcaataacaattaagatcatttgggtttctaaaagttcttcctctctgggaaagcagaactatacagtgggtggcatcctgcagattctagtctacatttgggaaaggtgtacgcctcttgcactttcagaggaacaagtcaaaaagtaattgcttaaaaaaaaaaagtgctagcaat

SEQ ID NO: 122021 - DNA, 1516 bp, Homo sapiens
ttctaagcatgttaattttacctgggatagacaggactttattttttatttttattttgtttgagacggagtctcgctgtgttgcccagcctggagtgcagtggcgcgatctcggctcactgcaacctgcgcctcccgggctcaggcgattctccttcctcagcctccagagtagctgggagtacaggtgcccgctgccacgcccggctgattttttgtatttttagtcgagacggggtttctccacattggtcaggctggtctcgaactcccgacctcaggtgatccacccgcctcggcctcccaaagtgctgggattacaggcgtgagccactgcgcccggcctttttttttcttttgagatggagtttcgctcttgttgcccaggctggagtgcaatggcgtgatcttgactcactgcaacctctgcctcccgggttcgacgtgattctcctgcctcagcctcccgaggctgggagcagccgggattacaggcgtgtgccaccatgcccggctattttttgtatttctttttttttagtagagacagggtttctccatgttggtcaggctggtctcaaactcccgaccctcaggtgatccgcccgcctaggccctcccaaagtgctgggattacaggcgtgagccaccgcgcccggccaagtcacatttcttgacctcataaggcttataatctagttcctgttctgtgttctatttcacgggcgacctaggtgttgatacccaaaagagcttcttcaagatcccaaagtagtaaatcagatgaatcctgcttttcaggggggcccaaagccacctgcctacccagccctcagtccaatgcagtccccagaaacgaaataagaggcccagattcctcgtgaaggagttaagaggcagagaaggatggggcttgccagtatcaccaaactctcacttcaactggcagggggcctggaactcaacacatccagtcttcaaggaaaggggtctggagggggcaagtggtaacgtggcgtccaggaagatgactaaggtccccaacgctggtgaaagatgatgaaagttccacaggaaaaaggcggtcccactaccatggcccacaaactgccagtcctccttcagcgcatcgtggtcctcctgttcctgcagctgtcgagcgatgtagctgatagaggagacgacctcccgtagctccggaaagcaagggccacagccggggttggacccatggataaatcgccgcagatcaggggcagacagttcaggctggaacctggaagaggagtgactggccacgcccaaacgcaaagacagccagtgccggcgacccaggccccgctccagctgcctccaacaacttgccagttctcaaaacccgagagcccatcatgcttttccctacagcagtgatctctaaagccttgtgcaacttcttccaccgcctctgttttagtttccaccctcgtgccaagctaggggtattcattgtccgacggtttcaaaggggaggccg

SEQ ID NO: 122022 - DNA, 517 bp, Homo sapiens; identical to SEQ ID NO: 115579

SEQ ID NO: 122023 - DNA, 1242 bp, Homo sapiens
atgcacaatggatttagtatcatcagtgacaacgaggtcataagaaggtgtttttccacagcaggaaatgatgcagttgaagaaatggtcctggccatccggcggcagagctttgccctgctgctgcatctggcccagactgagagcggacggagcctgatcatcaaccaccttgacctgaccaggctgcctgccgacactacggccactgtcgaggacatgctgccttctgtcaccagcgtcaccactaactctgacactatcaccgaaacctttgccactgctcagtatatcctcaccagtgagaccaccaccctgacctccagtattgccccgccggccacggccacgcctgactcaaactctgtaccggctggccaggccaccccttccaaggggcccagcgcctctgccccctccccggccccagcttcagcccccaaggtcgcccccctcgttgacctgagcgacaccccgacctcaacccctgccgctagcaatttgtcttctagtgtcctggctaaccaaggggctgtcctcagcccaagcgcccctgctggtgtcggggaggcctctaaggctcctccggccagcaagcccacccctgcaccagtccccaccccgactggggcagccagtcctctagcagcagcggctgcccctgccacagaagcccctcaggccaagcaggaggctcccagcaccaaaggcccggacccggagcccacccagcccggagccgcgaagagcccggccgaggcagccacagcccttgctagcccgaagagcgaggctgcctccgtcagcaccacaaacccttcccagggcgaggactttaaaatggacgaagggaacttcaagaccccagatattgaccttgcaaaggatgtttttgcagccctgggctctcctgctcccgccgctggggccagtggacaagcccctgagcttgctccttccactgcagacagctctgtttcgcctgcgccagcaaagaccgagtacggcctctctttgtctgctgtcatcgggttgtgtcctgtggtgagtggctgggaagactcggggctccccagcatcaaatggctgctgggtctcaaagttcaagagaaaggccttaacctttcaggtaaaaacacagcctctggcatcaacttagggctggaagaggaaaggactcgttcttctgactcagtgcttctcaactatggctgcacattagagtcacttgggtgcttttaa

SEQ ID NO: 122024 - DNA, 610 bp, Homo sapiens
ccgccaggcaggccatgaaaagctgcctccatcagtgttttctcaccctacccaggcaggccctagaggcatcatcctgcaacagcacagggtggggtggggaagggacaggcaagagtgggttgcaaaggggcccctgaaatcagtgctgggagcccagcccagcccagcaggctgcatttacatccagctgagctgttgccactgcagctggtcagggtgaggaggagctgcctctgctgcccccttccaccaccccaggtaaaaacacagcctctggcatcaacttatggctggaagaagaaaggactcgttcttctgactcagtgcttctcaactatggctgcacattaaagtcacttgcgtgcttttaaaagtcacttgtgtccgaccaaataaatcatgatttgcgcgcacacagctcgggcttgggtgatttttagtgctcccaggtgatttgacgggcagaggttggagccgggtgctgtcactggagaacccctcctcctccctgctgtccccaaggcctgaatacagaggcgagatgtctgcagaccgtggtctcagtggttctgtttggctgattctctcaaaaaggccgccgggtcgc

SEQ ID NO: 122025 - DNA, 3187 bp, Homo sapiens
  misc_feature (1)...(3187): n = a,t,c or g
atgtttgaagctagcgtaggttggttcatgagattggaggaaagaacccgtctccatgatatacaagcacaagatgaagcagtaactgctgatttagaagctgcagcaggttatccagatctagcgaagatcattgatgagggtggctacactaaacaacagattttcagtgtagatgacactgccttctcctggaagaagatgacattgaggactttcatagctaaggagggaaccaacacagatggtgcctcttctgctacttcctctcttgtttccctttgtttagagctgtgcttccttagagctcatcatgatgtgggcttctactgtgacttggatgtctatcagtcagctgtgtatgcacctacctgccccacaggatactcactgcctcaggccaaggaagaaagtgactttatacctctggagtacgaaaagggacgtatcacttctacagctggtcaaggacaggatgtggaacctgagatggagcagctggagaagggaagtataaagggagtcaccgagaccaggaccggtcctctgggctgcagcaactatgacaatctggactcagtcagttctgtcttggtacagagtccagagaacaaagtacagttacttggccttcaggtgctgctgcctgagtatctgcgtgagcgctttgtagctgcagcactcagctacatcacatgcagctctgagggtgagctcgtctgcaaggagaatgactgctggtgcaagtgcagccccaccttccctgaatgcaactgccctgatgctgacatccaggccatggaggacagcctgctgcagatccaggactcctgggccactcacaaccggcagtttgaagagtcagaagagttccaggccctgctgaaaaggctgcccgatgaccggttcctgaactccacagctatctcccagttctgggccatggacaccagccttcagcaccgctaccagcagctggggagctggctttgaaaagtgctgtttcaaaaagacccatcggatcctacgccggctcttcaacctctgcaagcgctgccatcgccagcctcgcttccgcctgcccaaggagaggtccttgtcctactggtggaaccgaatccagtccctcctctactgtggggaaagcacctttcctggcactttcctggaacagagccacagctgcacctgcccctatgaccaatcttcctgccagggccccatcccatgtgccttgggcgaagggcccgcgtgtgcccactgtgctccagacaatagcacacgctgtgggagctgcaacccgggctatgtgctggcccaggggctgtgccggccagaggtggccgagtccctggaaaactttcttgggctggagacagacttgcaggacctggagctaaagtacctgctgcagaagcaggatagccgcattgaggtacactccatcttcatcagcaatgacatgcggctgggcagctggtttgacccttcctggaggaagcgcatgctgctcaccctgaagagcaacaagtacaagcctgggctggtgcacgtgatgttggccttgtccttgcagatctgtctcaccaagaacagcaccctgggagcctgtcatggccatctacgtcaacccctttggggggcagccactctgagagcttggttcatgcctgtgaaatgaggggcagttttccttgacttggggaaaggactaacgtggatgcagctgccccagtggccaaaactggactatgcaccttgggggaataaggtggaagactttctttggagacagtttcatgtttacctacggagccgaatcaagtccctggatgacagctccaatgagacaaatctactatgagcccctggaggatgactggatccctctaaggaatttggggttacatgaaaattaacaccttggcaggtctttggctacagcctgccctttgacccagattgctatccgggacttaattctccagttggactacccatatactcaaggttcccaggactctgcactcttgcagctcattgagctcagggaccgggtgaaccagctttctccacctggcaaagtccgacttgaccttttctcctgcttgctccggcatcggcttaagctggccaacaatgaggtgggcaggatccagtcctccctgagggcgtttcaattctaagctgccaaaccctgtggaatatgagaccggcaaactctgtagctaatggggcggcccactttcagcactggggcaaggaggggatccatgaatttgggggttacaaagattattttaaggccctcaccttagtgccaacaggggttgttgctcccacgagactttcagcatccagtagatgggacctcgaggctcgagctgaagcaggcgagagagaaacagctactgcgtgcgtgcgcgcacgcatacacacacacacacacacactggcacaggggaggctaccaactaagcaccctcaagatcctgtaaagttgattggtgctttctaaaatgaatgcaattgaaagaaaggagccaaggaagagattaagaaaaagaaccagctgaaccatgaaacaaacaaaaatcctaaaagtgattcttgtcattcaagaaagcaagaggggacaacaatgggaggggtcggagctcttcccttcccctctgtggagtcacttttgtattctttttaacccagatttccttaaaaatgttgttgttttgtgaaatccctgacattggttcctttacttttgtaatgctgacctcctctgtgcccctccccagacgctgactggggaaacacaaggaaggtacaacccaacagggaaccagtcgccaagggcagggcagccggcctccttggcttcccctccctttactcctccctctggtggcctccttccccccaccaagttttcaggggccnggggattgtttcccagtttcccattgtgggtcccttcaggaggttcctttccaacagcatctctctgtcgaagaaagaagctctgtcaagttagagagagacaatgtgtaggaaatgttcttttttaaaaaaaaataacaaaaacaaaacaaaactatttattttgtgattgttttccttgttaatctgctccaaccacctgaacatctaagtaaacatttatctggtttaatataaaaaaaaaaaaaaa

SEQ ID NO: 122026 - DNA, 503 bp, Homo sapiens
gcgcctttggagaatcggcgggctgcgctccgctggggctggtcgcggagggggggaggggatgtcggtcagtgcgagatccgctgctgctgaggagaggagcgtcaacagcagcaccatggtagctcaacagaagaaccttgaaggctatgtgggatttgccaatctcccaaatcaagtatacagaaaatcggtgaagagaggttttgaattcacgcttatggtagtggaggtgatgtttcaccatgttgcccgtggctaatcttgaactcctgggctcaagcgatccatccgccttggcctcccaaagtgctaggattacaggtgaatcttggatttggggaagtcgacattaatcaactcattattcctcacagatttgtattctccagagtatccaggtccttctcatagaattaaaaagactgtacaggtggracaatccaaagttttaatcaaagaaggtggtgttcagttgctgctcacaatagttgatacccagg

SEQ ID NO: 122027 - DNA, 1219 bp, Homo sapiens
tcaaactgtcaccgccgccgcctcccctccccccgagcccgccgctgccgcgccccgggcccgcagtggcccccatcccggctcccctcgccgctgcctccgcctcgcctcagggcgttccctagctcggtccagcggccgcagagcttcccggcattcggagccgctgaccccaagtcgcggcacccgaagctgagactcacccatggtgctgctgttgacgctcctctcctcagcagcagcggatctcgcactgaccgacatcccctccccccctccgcgaccagccccagcggagcgcagcccgccgattctccaaaggcgcctacgccgattccgcagcgtagccgcccggcgtagctgccttgccgacggctttgtgagtgaaagtgaagagacacttcgaggcaggtgtctgtgctccccattcatccctgtttccgtggctatcttgactttccggggtgaaaagtgaggttaggccctgtttccccgacccttccctcgcgccatcacactctagtggcctggcacagccccagaggtcggccgctgtagcccccattgcggactcgcccacattcatattggctcaccttgtcggtgcccgggttccggtccctcttgggagctcacactcccagttgaggaaatgaatggacacaggaactactggggtaacaaaatactaataaagggctgcggattgtgtgagttttctactgtagcgatgaatggtcctggtatttggaacgtttccccaagtgccttctaatgaaaagccttactttactcggaaaaaacctgtggtcttttcttgaacgtgatggctctcttggttgtattcttcatgcacatgtgttacttttcctgtttaactacatgttaaagaaatgtgtatgttcctgtttaactgcatgttttaaaaaagtatgtgtatttttaagttataggcacgtgcaagaaagttcagagcaaaacagcttatattagtgaaacaataaatgtctactaataggagaatggatgaataagtgtcattgttgaacaaattgacatacaacaccgaaccaaaaaatcagtgaactaaagctacccatttttcatatggatagagtcattaacctaatattggaggaaagaaatgaaaaagaccgggttgggggaaagatattttattgacatacccataaataaaaggttttaataatttaccaaa

SEQ ID NO: 122028 - DNA, 1095 bp, Homo sapiens
atggcccattcccagaactccttggagcttcccattaacatcaatgccacccagattaccactgcctatggccatcgggccctgcccaagctgaaggaggagctgcagtcagaggacctccagacgaggcagaaagccctcatggccctgtgtgacctcatgcatgaccccgagtgtatctacaaggccatgaacataggctgtatggagaacctgaaagctttgctgaaggatagcaacagtatggtgcgcataaagaccaccgaggtgctccacatcacggcaagccatagcgtgggcagatacgcctttctagagcacgacatcgtccttgccctgtccttcctgctgaatgaccccagcccagtctgccgggggaacctgtacaaggcatacatgcagctggtccaggtgcctagaggggcccaagagatcatcagcaaaggtctgatttcctcactggtatggaagctgcaggtggaggtggaggaggaggagttccaggagttcatcctggacacactggtcctctgcctgcaggaggatgccaccgaggccctgggcagcaatgtggtgcttgtcctgaagcagaagctcctcagcgccaaccagaacatccgcagcaaggccgcccgtgcgctccttaatgtcagcatatctcgagagggcaagaaacaggtgtgtcattttgacgtcatccccatcctggtccatctgctgaaagacccagtggagcatgtgaagtctaacgctgccggtgccctgatgttcgccacagtgatcactgaagggaagtatgcggccctggaggcacaagccatcggcctgctcctggagctgctgcactcccccatgaccatagcgcgcctgaatgccaccaaaggcccttaccatgctggcagaggcccccgagggccgcaaggccctgcagacgcacgtgcccactttccgtgccatggaggtggagacttacgaaaagcctcaagtggccgaagccttacagcgggcagcccggatcgccatcagtgtcatcgagttcaaaccctgagcccttcattcacctctgtgagtgaataaatgtgctaagtctcttta

SEQ ID NO: 122029 - DNA, 847 bp, Homo sapiens
  misc_feature (1)...(847): n = a,t,c or g
atggctgtcactgcagctgcctgctggtcgctcaggcccctggccaggcgggacgtgtgtgtgggggtggcacttgcaagtccttttgtcaaacccacccactggttctgcaagaccctccttgagccctgcaggccaactggcatgggggcccaagagatcatcagcaaaggtctgatttcctcactggtatggaagctgcaggtggaggtggaggaggaggagttccaggagttcatcctggacacactggtcctctgcctgcaggaggatgccaccgaggccctgggcagcaatgtggtgcttgtcctgaagcagaagctcctcagcgccaaccagaacatccgcagcaaggccgcccgtgcgctccttaatgtcagcatatctcgagagggcaagaaacaggtgtgtcaattttgacgtcatccccaatccctggtcccatctgctgaaagaccccagtggagcatgtgaaagtctaacgctgccggntgcccctgatgttcgcccacagtgatcactgaaggggaagtatgcggccctggaggcacaagccatcggcctgctcctggagctgctgcactcccccatgaccatagcgcgcctgaatgccaccaaggcccttaccatgctggcagaggcccccgagggccgcaaggccctgcagacgcacgtgcccactttccgtgccatggaggtggagacttacgaaaagcctcaagttgccgaagccttacagcgggcagcccggatcgccatcagtgtcatcgagttcaaaccctgagcccttcattcacctctgtgagtgaataaatgtgctaagtctctttaaaaaaaaaaaaaaaaa

SEQ ID NO: 122030 - DNA, 532 bp, Homo sapiens
  misc_feature (1)...(532): n = a,t,c or g
gtggagcagacgggtcgcggcgagncgcctatgacatctactcgcggctgctgcgggangcattcttgtgcgtcatgggcccgatcgatgacagcgttgccagccttgttattgcacagctcctcttcctgcaatccgagagcaacaagaagcccatccacatgtacatcaacagccctggtggtgtggtgaccgcgggcctggccatctacgacacgatgcagtacatcctcaacccgatctgcaccctccccaggacggtgaggatgagcccacgctggtgcagaaggagcctgtagaagcagcgccggcagcagaacctgtcccagctagcacctgagagctgggcctcctctccagaatcatgtggatgggcagaggcctgccagacccccagctgggccctgctcaccccttgttgctgggcttggaggggcctcttgaggaacttttaatttgcaggggtgcccgctatggacggggcattccagctgagacactgtgattttaaattaaatctttgtggtctttg

SEQ ID NO: 122031 - DNA, 470 bp, Homo sapiens
gcgaccgccgcagcggacactccagaacggcctggccctgcagcggtgcctgcacgcgacggcgacccgggctctcccgctcattcccatcgtggtggagcagacgggtcgcggcgaggcgtcctatgacatctactcgcggctgctgcgggagcgcatcgtgtgcgtcatgggcccgatcgatgacagcgttgccagccttgttatcgcacagctcctcttcctgcaatccgagagcaacaagaagcccatccacatgtacatcaacagccctcaggaggcgcccggggccaagccacagacattgccatccaggcagaggagatcatgaagctcaagaagcagctctataacatctacgccaagcacaccaaacagagcctgcaggtgatcgagtccgccatggagagggaccgctacatgagccccatggaggcccaggagtttggcatcttagacaaggttctggt

SEQ ID NO: 122032 - DNA, 1077 bp, Homo sapiens
cgtcatgcaggtaccccgcgctggggcctcgcctcgccgctcactttccagcgcagcggccgccgcagcgacgacctccgagaacggcctgttccctgcagcggtgcctgcacgcgaacggcgacccgggctctcccgctcattcccatcgtggtggagcagacgggtcgcggcgagcgcgcctatagacatctactcgcggctgctgcgggagcgcatcgctgtgcgtcatgggcccgatcgatgacaagcgttgccaagccttgttatcgcacagctcctcttccctgcaatctcgttagcaacatgaagcccatccacatgtacatcaacaagccctgggtgggtgtgggtgaccgccggcctggggcatcttacggacacgattgcagtaacattccttcaacccgatttttgcacctgggttcgttggggccaggggccgccagcatgggctccctggctttcttcgccgccggaaccccaggcatgcgccacttcgctccccaacttcccgtattcatgattcaaccagcccttcaggaaggcgccgggggccaaagcccaccagacattggccatccaggcagaagaaaatccatgaaagctccaagaagcagcttctataacatctaacggcaaagaacaacccaaacaagaagcctgcaaggtgatcgagtcccgcccatggcagaagggaccgcctaacatgaagcccccatggaaggcccccaggaatttggcaatccttaaaacaaggttcctggtcccaccctccccccaggacggtgaaggatgaagccccacgcttggtgcagaaggagccttgtagaagcagcgccggcagcagaacctgtctccagctaagcacctgagagctgggcctcctctcccagaatcatgtggaggggccagaggcctgccagaacccccagctgggccctgctcaccccttgttgctgggcttggaggggcctcttgaggaacttttaatttgcaggggtgcccgctatggacggggcattccaggtgagacactgtggattttaaattaaatcttttgtggtctttgctctg

SEQ ID NO: 122033 - DNA, 2088 bp, Homo sapiens
atgcccactggggacataagtgtcttcctaagaataaaggtaatagacagctggtttaaaatacgtctgagcgaaatatacagttatgcatacaagaaactggcatcagaagcacctgcaggactctccaacccggactgctgggccccgcccccagaggccgggctgagtccccaggggatgcggacaccgccgatcgcgccccgccgtgagaacttctcctccaacatccgacaaaaacattacgtcgcgcgagggccaggccgagcaggcacaagtggcctggaaatgcgcgaagtgggcaacttccacacttcccgagcacacaaacattccttgcccaagcgctggctctaccccgggaaggcgccattacgaaggcctgatcaccggcaaccgcgcgcttcgacggcaaagccccgtcaggtcgcgcgccggcttgggccgccggagagtcggtgtggagtggctcgaggctcactcacagcgacgcagccccagtgggtccctttcctcttacctcggcctcccacgccgcccccatttcctggggtgcttctccccacacctccttcgggggcccggacccccgcccctgcccgccggtgggatgtgggaagcgtcactgtggacagcccgggcctcccggagagtcggagtcgtaaagcggccagccaggcccgccctgccctacctgtggggctccggacagcggcggcggctcgggggcgcccgtcgtcagccagccggaggcgggtagcgccacgaacagcaggagccggagggcgagcgaccccggtggagcgccctccatcttggacaacccgggcagagggcagccgcggccgggagtgtgggaaggctccatcagaggaattaaacctcagtactcccctacagaagcagaatgggccacttcttgagggtatacatttcggccctcaggatggtgacagtcggaggatggcaagctccacttgccagcctctagccaatggaaaaataggaggttatccaggagaagactgccaaatagacttcacccacatgccgaagacaaagggcatccaatacctgctggtatggtcagacaccttcactaactgggtagaggcattcccatgccgtacagaaaaagcctctgagcggaggaggagcgggcgccatggcggttctactggagaccactttaggcgacgtcgtcatcgacttgtacaccgaagaacggccgcgtgccaactgtatggtgatcaagcaagcttttttgaggcagaaaaagtcccaagaattaagcacaagaagaaaggcacagtgtccatggtgaataatggcagtgatcaacatggatctcagtttcttatcaccacaggagaaaatctagattatcttgatggtgtccatacggtgtttggtgaggtgacagaaggcatggacataattaagaaaattaatgagacctttgttgacaaggactttgtaccatatcaggatatcaggataaatcatacggtgattttagatgatccatttgatgaccctcctgatttattaatccctgatcgatcaccagaacctacaagggaacaattagatagtggtcgaataggagcagatgaagaaattgatgatttcaaaggaagatcagctgaggaagtagaagaaataaaggcagaaaaagaggctaaaactcaggctatacttttggagatggtgggagacctacctgatgcagatattaaacctccagaaaatgtactgtttgtgtgtaaattgaacccagtgaccacagatgaggatctggaaataatattctctagatttgggccaataagaagttgtgaagttatccgagactggaagacaggagagtccctctgttacgcttttattgaatttgaaaaggggggcggagcctatggaaaaacgccagcaacgcggcctttttacggttcctggccttttgctggccttttgctcacatgttctttcctgcgttatcccctgattctgtggataaccgtattaccgcctttgagtgagctgataccgctcgccgcagccgaacgaccgagcgcagcgagtcagtga

SEQ ID NO: 122034 - DNA, 2144 bp, Homo sapiens
  misc_feature (1)...(2144): n = a,t,c or g
tccccaaaaaannnnnnnnnnnccccaaagcccattttttttnnnnnnnnnnnncccccaaagggccccccccaaaaaaaggggttttttccaaaaaacccgcgggggtttttttattgccccccttnnnnnnnnnnnnnnntttttttctcccccgggaaaattgggccccccccaaaaattttttaaaaagggcccccccccnnnnnnnnnnnnnnnnnnnnnnnnnnnnnnnnnnnnnnnnnnnnnnnnnnnnnnnnnnngaccttttaaattagaattttataaagtgcttttcataaagtcttatatattatagtaattaagtggatataatttccttaacaaaggcaccttgaaaagttattggcacatgagattttgtctggtcttttttttttcttttgataatttcaaagtctcttcacatgtgttctcttccactttaagttttccttaacaattcatcatatgaatagccagcccttttagagaataaggtcaacttttttttttttgaaacagagtctcgctctgtcacccaggctggagtgcagtggcgtgatcttggctcactgcagcctccgcctcccgggttcaagcaattctcctgcctcagcctcccaagtagctgggactacaggcgtgcaccgccacacccagctaattttttttattttttttagtaacagaccgggttgcacccatgttggcaggatggtcccgatctgacctcgtgatccgcccgcattggcctcccaaagtcctgggattacaggcatgagccactgcacccggccgagaataaggtaaactttaaacttgcgactgtaaagagtcaattttcagggcagtcttaggagtttaggcaatttctctagtgtataaaactgattcttaacgatttaaagaaaattatattcaagtggcaaatttggaggcaacaggctacttcggagtccatgatatgagatggcgttttcaaatacatgttttatcttcaaggttttcaagctcttttctctgggaccatctgggatataagttggataggctgtcacagggtatgacgtccactttatcccaactggaaggaattccctttggtattcaggaaactgggggaaaaacaccctttagatgggtattaccaacagctgctcctgtaattccaaccgccatgatgttcaaaaactgaaagaatactggggaaaacgttgctccagaacctacacagatcttttcttaaacttttccatccactgacaccattaccttatatgcaagatggcgggctctgcttctgaggagggagttccaggtaacttgccccaggtaaaacatccttcatcctacagtggtttcccacattccctgaataagatactggcctagtgggtttgcagtgaactaacactttctttttttggagaggttaggaagggtaaataaaatgtcactgtctcgagaaatagagtagagcatgctttcttccaaaggtagggtatagttagaatgtctgagtactccccggttcgttaactaaaatatcaatttcagtgacatccttttgctgaacttgttttcccatcaatctcctactacctcctccttgaatgaacaattagttgcaaactggaaccagatgtccataggcccactccatgaaactaaaatccttacactgaacaattcccaaaatattctttttcctccaaattttcaagattttcattcttcactatcaaagtctgacagcttcattcgggttacaccactatttaacaggtaaagtcatttacatacacctgtccactctcataggttatgttaagaacaacctgctgtttagatatgtccccatcatctttcagtgtagttacattaattctgatgccgtcctgtggggctccggacagcggcggcggctcgggggcgcccgtcgtcagccagacggagagcgggtagcgccacgaacagcaggagccggagggcgagcgaccccggtggagcgccctccatcttggacaacccgggcagagggcagccgcggccgggaggtgagggcggagccggcccgcgggcgggacggagcttcggcgggagggacggggaggggcggggagagacggggagagggcggg

SEQ ID NO: 122035 - DNA, 411 bp, Homo sapiens
  misc_feature (1)...(411): n = a,t,c or g
cttcgccaaggccacctttgatgccatttctaagacctacagctacctgacccccgacctctggaaggagactgtattcaccaagtctccctatcaggagttcactgaccacctcgtcaagacccacaccagagtctccgtgcagcggactcaggctccagctgtggctacaacatagggtttttatacaagaaaaataaagtgaattaagcgtgnnnnnnnnnnnnnnnnnnnnnnnnnnnnnnnnnnnnnnnnnnnnnnnnnnnnnnnnnnnnnnnnnnnnannnnnnnnnnnnnnnnnnnccnaatttttgagtaaagtttaaaagagggtnnnnnnnnnnnnnnnnnnnnnnnnnngggggnnnnnnnnnnnncctccgcgcctccctttaaattttgggggggagc

SEQ ID NO: 122036 - DNA, 322 bp, Homo sapiens
  misc_feature (1)...(322): n = a,t,c or g
tggggcccccttaaaaaaaatattcccttgcccgcccggggccgtaaacttggttcctttaaaacgggcgccccnnnnnnnnnnnnnnnnncccgcttaatccactttatttttctgtattaaaacccctatgttgtagcccaagctgaagcctgagtccctgcccggagactctggtgtgggtcttgacgaggtggtcagtgaactcctgatagggagacttggtgaatacagtctccttccagaggtcgggggtcaggtagctgtaggtcttagaaatggcatcaaaggtggccttggcgaagttgcccagggtggcagt

SEQ ID NO: 122037 - DNA, 897 bp, Homo sapiens
tggggtgcggaggtcgggtggaggccgggcggaggccgggcggaggcccccgcaaagctcgcagaggcaaggccgaggataaggagtagatgcccgtcaccaagctgggccacctggtcaaggacatgaagatcaagtacctggaggatgtctcttctccctgcccatcaaggaatctgagaccattgacttttttctggggtcctctctcaaggaagagggtttgaagattatgccggtgcagaagcagacccgcgcgggccagcgcaccaggttcaaggcgtttgttgccaccggggactacaatggccacgtcggtctgtgcgttaagtgctccaaggaggtggctactgccatccgcgggtccgtcatcctgaccaagcactccattgtccccgtgcgcagaggctacgggggaacaagatggacaagcccacaccgtcccttgcaaggtgacaggccgctgcggctctgtgctggtgcacctcatcgtctccgcacctgtgcccaagaagctcctcatgatggctggtattgatgactgccacacctcagccaggggctgcactgccaccctggcaacttcgccaaggccacctttgacaccatctctaagacctacagctacctgaccctcgacctctggaaggagactatattcaccaagtctccctatcaggaattcactgaccacctcgtcaagacccacactagagtctccgtacagaggacccgggctccagctgtggctacaacatagggtttttacacaagaaaaataaagtgaattaagcctggaaaaaaaacaacaacaaataaaaacctggtcatttatgctatatttaaagcatttaaatcactttcagaattaccactgggaatgttgtattaaaaatt

SEQ ID NO: 122038 - DNA, 862 bp, Homo sapiens
caatttttctttaatccacatccgttagcaaagtttttaaacaacaaacgtttacgaagtagttttaccccttattcgctttaaaattttaatattaccctaaaacttttaatctccgaaagtaatttggcccaatttttcccccccccaaaattagggtcctttccaaaaattcccaggtaggttttaatacggccccctttaaggaaaaaggttttgccttgcaagcccgggtaaacttggggcccctcagggatcccttaaaaacggcggcccctttttagttgtctttttttttcacgcttaattcactttatttttcttgtataaaaaccctatgttgtagccacagctggagcctgagtccgctgcacggagactctggtgtgggtcttgacgaggtggtcagtgagttcctgttgagggagacttggtgaatacagtctccttccagaggtcgggggtcaggtagctgtaggtcttagaaatggcatcaaaggtggccttggcgaagttgccccagggttgcagtgcagccccgttgctgagggtgtagcagtcatcgataccagccatcatgagcaagctttcttaggcacaggtgcggagaccgatgccaattggcccctgggttgcaaggggatgaaggcgtaccagcacagaagccgcaagcggcccttggtcacctttgccaaggtgacagtgtggggggcttgccgaattcttggttccccccagtagcctctgcgcacggggacgatggagagcttggccaggatgatggccccacgctgtcaccttgcaagggacagtgtggggcttgccgatcttgttccccgtgcgcagaggctactgggggaac

SEQ ID NO: 122039 - DNA, 439 bp, Homo sapiens
gtgcaaaacttcctctttactgttcaactccttacaacttgcataaaggcgtcatttctacctcagagctgggggaagtcataattagtgtaccacccatgtgctgggcacagtgaattttaatgcctcccctttagaggagaggttatgataatgtgaagacccccccccaccacaaaggttgtccggcactttggtgcaaaaaggattggtccaatcttgtgctggcttggggtacagaaaggcactgaagttggtggctcaaactcctctgggctggggtggggcagaggtgaacagggaagtaagtggtttgggacaggcaggtttggatgtgggcttgggttcttgctgacggaggtagttggtccagctcactgctctggaaccacagctggatctcccgctgggccccctccacggagtcgctggcgtggat

SEQ ID NO: 122040 - DNA, 269 bp, Homo sapiens
  misc_feature (1)...(269): n = a,t,c or g
ngctgaggctgccccaggaaccataaggggtgacttcagcgtccacatcagcaggaatgtcatccacgccagcgactccgtggagggggcccagcggagaatccagctgtggttccagagcagtgagctgggacaaagtggccttcatcacaggaggcggctctgggattnggttccngattgctgagattttcatgcggcacggctgccatacggtgattgccagtaggagcctgccgcgagtgcttgacggccnccaggaagctggc

SEQ ID NO: 122041 - DNA, 1113 bp, Homo sapiens
atgggcggcctcttctggcgctccgcgctgcgggggctgcgctgcggcccgcgggccccgggcccgagcctgctagtgcgccacggctcggggactatcatgggggtgtttgtggctgtgggcaccatccctgtcccttccagagtgccctgcatagaggcagacaccctgaagcctggagggccctcctggacccgggagcggaccctggtggcggtgaagcccgatggcgtgcaacggcggctcgttggggacgtgatccagcgctttgagaggcggggcttcacgctgggtggggatgaagatgctgcaggcaccagagagcgtccttgccgagcactaccagtgacctgcggaggaagccctttccaccctgcccttcatcccgctacatgagctctgggcctgtggtggccatggtctgggaagggtacaatgtcgtccgcgcctcaagggccatgattggacacaccgactcgggctgaggctgccccagggaaccattaagggggttgacttcagcgtccacatcagcaggaatgtcatccacgccagcgactccgtgggagggggcccagcggagaatccaagctgtggttccaagagcagtgaagctgggtgagctgggcaagaccgggggccagcacagcagcatccacccagcctgaaggtccaagctgcccttaccaccccatcccccacgcaggacccaacctaccctccgtcagcaagaaccccaagccccacatcccaaacctgccctgtccccaaacccacttacttcccctgtttcaccttttgccccaccccaggcccagagggagttttgagcccacccaacttcagtgccctttctgtacccccaagcccaggcacaagatttggaccaatccttttttgcaccaaagtgccgggacaaccttttgtggtgggggggggtcttcacaattatcataacctctcctctaaaggggaggcattaaaattccactgtgccccagcacatgggtggtacactaattatgacttcccccgagctctgaggtagaaatgacgcctttatgcaagttgtaaggagttgaacagtaaagaggaagttttgcacacccaaag

SEQ ID NO: 122042 - DNA, 900 bp, Homo sapiens
atggaatactatgcagccatgaaaagggatgagctcatgtcctttgcagggacatggatgaagctggaaaccatcattctcagcaaactaacacaggaacagaacaccaaacaccacatgttctcactcataaagtggcagttgaacaatgagaacacatggacaaagggaggggaacatcacacactggggcctgttgcaggtggagctgcctggcagtcccgtgccgtgtgcccgcactcctcagcccttgggtggtcgatgggactgggcgccagggagcagggggcggcgctcgtctgggaggctccgcttgccgcacaggagcccacggagggggtgggaggctcaggcatggcgggctgcaggtcccgagccctgccccgcgggaaggcagctaaggccgggcgagaaatcgagcgcaacgccggtgggctggcactgctggggaacccagtacaccctccgcagccactggccgggccggccagctgctccgaatgccgggtctgccgaggccacgcccacccggaactcgcgctagcccgcaagcgccacgggcagcccaggttcccgccagcgcctgcctccacacctctttgcaagctgagggagccggctccggccttggctagcccagaaagtggctcccacagtgcagtggatcacagctcctcgccagcagtggaacaaaactggacagagaatgactttgatgagttgacagaagtagacttcagaaggtcagtaataacaaacttctcggagctaaaggagcatgttctaacccatcgcaaggaagttaaaacccttgaaaaaagattagatgaatggctaactagaataaacagtgtagagaagaccataagtgacctgatggagctgaaaaccacagcatga

SEQ ID NO: 122043 - DNA, 648 bp, Homo sapiens
atggaatactatgcagccacaaaaaatgatgaggtcatgtcctttgtaggacatgatgaagctggaaaccatcattctcagcaaactaacacaagaacagaaaaccaaacaccacatgttctcactcataagtgggagttgagcaatgataggtcatatccctacgattatcgaagaaatcacaccgtgctcgatttacggaaatctcagccgatccccgccttgaaatcatccgctcgatgtcaaaccaacgatgatgatcgcgagtctcgccacgatgtttactgcataacttatcaacagcgcctgaacgtcgatcgcgttcagttcctggaatgctttctccagacgagcgatcatcgaagtctgaccggcacgcagccatacgcgcggatcgtagtatttcttgttcggctgatcttcgcctttcgggttacccagctgaccctgcagataagcttcgttcgctttgtagtagttcagaacgccttcccaggttgcccattgggtatcggtatcgatgttcatttttactacgccgtagcttacggagtctttgatttcctgagcagtagaaccggaaccaccgtggaatacgaagttcaggctgttgtgcggcagattgtgtttcttggaaacaattcctga

SEQ ID NO: 122044 - DNA, 1089 bp, Homo sapiens
atgtggaagaagatcagaaagtctctgcagaacctctgccaagttgctagagtcagagactcttcccacactctcctgggtctcgtcaattcttatcaaagatgcaggggtggcagcagccacttttcagcttcagagaaggaagcaaatggtttacaggaaaagaaagccaacacggggaagcacaagactgctgtcaagtgtcatttatcctgtctctggccatcgaagaggcttaggcttgtgtggaaatgggtgtcgaggccagcacctctcagcaaaatgagagccatggagagaaatgtttatttctgtgtatactttgcaaaagttgggtgcactgttcacaatagcaaagacttggaaccaacccaaatgtccatcaatgatcgactggataaagaaaatgtggcacattacaccatggaatactatgcagccatcaaaaaggatgagttcatgtcctttgaaaggacatggatgaagctggaaaccatcattctcagcaatctaacacaggaacagaaaaccaaacaccgcatgttctcactgataagtgggagtcgaacaatgagaatacatggacacagggaggggaacatcacatgccagggcctgttggggggagaatgtgtgcacacggtggccaccagagggagcccttcagcgacagaggatgagagctgcaggatgaatgtgaatgattatggtggaaattcaccttcaaccttgcaggtgaaaacaagtccccagggaagagcagaaaaaggaaacaacgttaggacatggttatattccaaccttgtctgctggccttctttgggctctctgatggggaaactaagggacagagtaattaagcgggttatctatactcacacagcaggtgatgtatccatgcacgaagaaggttttcaatttcccctgaagcaggtatctttgctgctctgtgccatagcctttcagccttccctggttgtagctgcagctctggtgcacattacaatggaagcttatacttacctggaggtgacccttcttcaaatacactctcctctcttctgcttcctgcccaagtgccatttctga

SEQ ID NO: 122045 - DNA, 2849 bp, Homo sapiens
atgattatctcaatagatgcagaaaaggcctttgacaaaattcaacaacccttcatgctaaaaactctcaataaattaggtattgatgggacgtatttcaaaataataagagctatctatgacaaacccacagccaatatcacactgaatgggcaaaaactggaagcattccctttgaaaactggcacaagacagggatgccctctctcaccactcctattcaacaaagtgttggaagttctggccagggcaattaggcaggagaaggaaataaagggtaatcaattaggaaaagaggaagtcaaattgtccctctttgcagatgacatgattgtatatctagaaaaccccattgtctcagcccaaaatctccttaagctggtaagcaacttcagcaaagtctcaggatacaaaatcaatgtacaaaaatcacaagcattcttatacaccaacaacagacaaacagagagccaaatcatgagtgaactcccactcacaatcgcttctaagagaataaaatacctaggaatccaacttacaagggatgtgaaggacctcttcaaggagaactacaaaccactgctcaaggaaataaaagaggatgcaaacaaatggaagaacattccctgctcatgggtaggaagaatcagtatcgtgaaaatggccatactgcccaaggtaatttacagattcaatgccatccccatcaagctaccaatgcctttcttcacagaattggaaaaaactactttaaagttcatatggaaccaaaaaagagcccgcatcaccaagtcaatcctaagccaaaagaacaaagctggaggcatcacactacctgacttcaaactatactacaaggctacagtaaccaaaacagcatggtactggtaccaaaacagagatatagatcaatggaacagaacagagccctcagaaataacgctgcatatctacaactatctgatctttgacaaacctgagaaaaacaagcaatggggaaaggattccctatttaatagatggtggtgggaaaattggctagccatatgtagaaagctgaaactggatcccttccttacaccttatacaaaaatcaattcaagatggattaaagacttacatgttagacctaaaatcataaaaaccctagaagaaaacctaggcattaccattcaggacataggcctgggcaaggacttcatgtctaaaacaccaaaagaaatgggaacaaaagccaaaattgacaaaggggatctaattaaactaaagagcttctgcacagcaaaagaaactaccatcagagtgaacaggcaacctacaaaatgggagaaaattttcacaacctactcatctgacaaagggctaatatccagaatctacaatgaactcaaacaaatgtacaagaaaaaaacaaacaaccccatcaaaaagtgggcaaaggacatgaacagacacttctcaaaagaagacatttatgcagccaaaacacacatgaaaaaatgctcaccatcactggccatcacagaaatgcaaatcaaaaccacaatgagataccatctcacaccagttagaatggcaatcattaaaaagtcaggaaacaacagcactgttgacaatagcaaagacttggaaccaacccaaatgcccatcaatgataggctggataaagaaaaatgtggcacatacacaccatggaatactatgcagccataaaaaggaatgagttcatgtcctttgcagggacatggatgaagctggaaaccatcatcctcagcaagctaacacaggaacagaaaaccaaaccaccacatgttctcactcatacgtgggagttgaacaatgagaacacatggacacagggaggggaacatcatacactggggcctgttgtgggaatagttactccaaagcctctgcttgttctcatccttggacaattctggcaatttaattgccaaggaagaagcatgtctgccttaacacaagctttggcccaatgtgtccatcagactgtagaagattgtcgttgggattcacactataacaggtgtccccaactgcagggccacggagcagtagtggtccctggcccattaggaaccaggccacacagcaggagttcatatccaatgcactctggacactttctttccagcattctagacacgctttcttcaacccacaggaacagaatgaacaaaaggaaggaagaacatcaaatacaaactactttcagagaatactataaacacctctacttaaataaactggaaaatctagcagaaattgataaattcctggacacaaacaccctcccaagactaaaccaggaagaagtagaatccctgaataaaccacaaacaagttctgaaattgaggcaataattaatagcctaccaaccaaaaaaagtccaggaccagagagattcacagccaaattcaaccagaggtacaacgaggaactggtaccattccttctgaaactatgccgaacattagaaaaagaaggactcctccctaactcattttatgaggccagcatcatcctgataccaaaacctggcagagacacaacaaaaaaagaaaatttcaggccaatatccctgatgaacatcaatgcgaaaatcctctataaaatactagcaaaccgaatccagcagcacatcaaaaagcttatccaccatgatcaagttggcttcatccctgggatgcaaggctggttcaacatacacaacatacacaaattaataaacgtaatccatcacataaacagaaccaacgacaaaaaccacattatctcaatagatgcagaaaaggcctttgacaaaattcaacacccttcatgctaa

SEQ ID NO: 122046 - DNA, 647 bp, Homo sapiens
  misc_feature (1)...(647): n = a,t,c or g
tttttaaggnaaggngnaatggcntattttctgaggnagattaaatggaccccccccatccaaataagccagnggtncctntcccataanaccnccntnatnagttgaacgcctttggataacccaagaagaattgccnccntcttggagtcccccttggnacgatttacccgttgagccccatattggaaaaatgattctttttgaagcacttgttctgcttgcttagacccagtactcactattgctgctagtctcagtttcaaagatcccatttgtcattccactgggaaaagaaaagattgcagatgcaagaagaaaggaattggcaaaggatactagaagtgatcacttaacagttgtgaatgcgtttgagggctgggaagaggctaggcgacgtggtttcagatacgaaaaggactattgctgggaatattttctgtcttcaaacacactgcagataatgagaagataattaaagctgtcatctgtgctggtttatatcccaaagttgctaaaattcgactaaatttgggtaaaaaaaagaaaaatggtaaaagtttacacaaaaaccgatggcctggttgctgttcatcctaaatctgttaatgtggagcaaacagactttcactacaactggcttatcc

SEQ ID NO: 122047 - DNA, 709 bp, Homo sapiens
tcggactgatgaccgtagtacagagcggtggaattccagcggttgctggttctgacgggttgtagtctgccaggacaattagttatgactactatcagaactggggccgtgatgggggtccccgcagctccggtgggggctatggaggggggccagcagggggtcatggaggtaaccgaggctccggaagaggcggcggcggcggagggggtggtcgaggcggcaggggccggcatcccgggcacctgaaaggccgcgaaatcggcatgtggtacgcgaaaaaacaggggcagaagaacaaggaagctggagaggcaagagagagctgtagtacacatggatgaacgacgagaagaacaaattgtacaggtactggattctggtcaagccgaaaatggataaagagtcagaaccacagatttcctggtttgctcctgaggatcatggatacggtactgaagtttctactaagaacacaccatgctcagagaacaaacttgacatccaggaaaagaagttgataaatcaagaaaaaaaaatgtttagaatcaggaacagatcatatattgacccgagattctgagtatctcttgcaagaaaatgaaccagatggaactttagaccaaaaattattggaagatttacaaaagaaaaaaaatgaccttcggtatattgaaatgcagcatttcagagaaaagctgccttcgta

SEQ ID NO: 122048 - DNA, 2370 bp, Homo sapiens
cacagggtaacagtaataagtggtgaaactggttgtggcaaaaccactcaagttactcagttcattttggataactacattgaaagaggaaaaggatctgcttgcagaatagtttgtactcagccaagaagaattagtgcccattccagttgcggaaagagtagctgcagaaagggccagaatcttgtggccagtggtaatagtactggatatccaaattcgtctcccagagtcggttgcccaaggaaacagggttctatcttatactgtaccaaccaggaatcatccttccagtggctcccagtcagacccgtatttgtccagtgttagtcatatcgtacttgatgaaatccatgaaagaaatctgcagtcagatgttttaatgactgttgttaaagaccttctcaattttcgatctgacttgaaagtaatattgatgagtgcaacattgaatgcagaaaagttttcagaatattttggtaactgtccaatgatacatatacctggttttacctttccggttgtggaatatcttttggaagatgtaattgaaaaaataaggtatgttccagaacaaaaagaacacagatgccagtttaagaggggtttcatgcaagggcatgtaaatagccaagaaaaagaagaaaaagaagcaatatataaagaacgttggccagattatgtaagggaactgcgaagaaggtattctgcaagtactgtagatgttatagaaatgatggaggatgataaagttgatctgaatttgattgttgccctcatccgatacattgttttggaagaagaggatggtgcgatactggtctttctgccaggctgggacaatatcagcactttacatgatctcttgatgtcacaagtaatgtttaaatcagataaatttttaattatacctttacattcactgatgcctacagttaaccagacacaggtgtttaaaagaacccctcctggtgttcggaaaatagtaattgctaccaacattgcggagactagcattaccatagatgatgtcgtttatgtgatagatggaggaaaaataaaagagacgcattttgatactcagaacaatatcagtacaatgtccgctgagtgggttagtaaagctaatgccaaacagagaaaaggtcgagctgggaagagttcaacctgggtcattgctattcatctgtattaatgggtcttaggaggcaagtcttctaggatggactattcaactgccagaaatttttgaggaactccttttgggaaggaactttgtttacaaaataaagatttttaaggctaggtgaaattgcttattttctgagtagataaatggacccaccatcaaatgagccagtgttactctccataagacacttgatggagcttgaacgctttggataaacaagaagaattgacacctcttgggagtccacttggcacgattacccgttgagccacatattggaaaaatgattcttttttggagcactgttctgctgcttagacccagtactcactattgctgctagtctcaagtttcaaagatccatttgtcattccactgggaaaagaaaagattgcagatgcaagaagaaaggaattggcaaaggatactagaagtgatcacttaacagttgtgaatgcgtttgagggctgggaagaggctaggcgacgtggtttcagatacgaaaaggactatttgctgggaatattttctgtcttcaaacacactgcagatgctgcataacatgaaaggacagtttgctgagcatcttcttggagctggatttgtaagcagtagaaatcctaaagatccagaatctaatataaattcagataatgagaagataattaaagctgtcatctgtgctggtttatatcccaaagttgctaaaattcgactaaatttgggtaaaaaaagaaaaatggtaaaagtttacacaaaaaccgatggcctggttgctgttcatcctaaatctgttaatgtggagcaaacagactttcactacaactggcttatctatcacctaaagatgaggaacaagcagtatatacttgtatggactgcacagaggtttccccattactgtctcttgttttttgggagggtggacatttccatccagaagggataacgatcaggaaactattgctgtagatgagtggattgtatttcagtctccagcaagaattgcccatcttgttaagagagctgtagtacacatggatgaacgacgagaagaacaaattgtacagttactgaattctgttcaagcgaagaatgataaagagtcagaagcacagatatcctggtttgctcctgaggatcatgggtacgacaagaaatatttttttaaagaatag

SEQ ID NO: 122049 - DNA, 394 bp, Homo sapiens
actacatggcttgttttattttaatggctgatctatgtaatcacagacgccaggatgtacagacaaagggggaggtattatttcttggtctcttcctccttggataaagtcttgatgatctccttcttgttgggctggaggcgctcttcacggcgcttgcgtgctttcttggtcttacacctgcgggcctcaccctgggcacccaggagcttcgtgcggcccgtgtccgccttcagcgtggggatgtgccacatgaaaacccgcgtgtttgagaacacattccccttcactcttgggcacactgtgagatacgtggggagagagatctttatagattcacggtatcttgtgaacacgcggcgcaaaactcttattcttcatatacgtgagactt

SEQ ID NO: 122050 - DNA, 1347 bp, Homo sapiens
tcagcagatccggaagttgatcaaagttgggctgatcatccacaagcctgtgattgtccattcccaggttggatgccagaaaagcacctttagcccaccagaaagggcaggcacatgggcacaggttagcgcaagagtacagccaatttccaaatgccagagaaggtcacttggatgaggagaatgaggattttgcactggttgtttggaagataccatgaatctaagaagactgatcaccacatgtatcacagcctgtacctgaaggtgcaggggaatatgttcacaaacaagcagattctcatggaacacaaccacaagctgaaggcagacaaggcccacaagaagttcctggctgaccaggctgaagcccgcagctctaagaccaataaagcaagcaagctccgtgaagagcgctaattctaattggttgacataaaaacagcattcttcctctagaaaaagacataagccaccttttccagcagttaggagatccagtccccttctattttgtaaagcaactgctgccaaggagtctgtttgagtttgtgttgtgacgatactttgggcaatgtcatccaagctttccacaaaatccttggaaagtgccctggaggattccgtaaggtcacagtcaccgcctccatcccctacttgccatgtcttcagggctaatgcataacaattatcacaatttacagcagccccacgctctgaagagcttctggaggggatactactcaagcggaggaaggcaagacagggacctcctccctcttcccggacctcttctgataaggaatatttgtaggtggttaagaaaggcagcgggagggcgtgaaggcaaagacaagctttttttctcgtaggaacacacatcttctggtctggctgtgtttccggaggcatttccagaggacctagcgaggaccaacttccggctgcgacttccgcgtcttccgagtttcgagacctgctgcttccgcccggagttgttgtgggctccagcagcgagtagccacttccgctaggagtccctagcggccagggcgtggaagcggattctgaggcggctttctggtggtgccctccgcttgccaacgcgggacccggagcatttttgacgctgctttcgttttggctgtgctggctcccagggaggtactggggggcctgtggacctgcagagggcatccacggccaagcatacactctgcaggtggaaggtgtggggccatgccctgcggtcaccatactagcaggaataccaaaccagctccccaggagaccatgaagagaggccctgagaccttgaattctttcatgggcaaagccaagaaccat

SEQ ID NO: 122051 - DNA, 324 bp, Homo sapiens
gaaagaaaagaccagagctaagggaccttctgaatcaagcaaggaaagaaacactccccgaaaagaagaccgcagtgccagcagcggggctgagggcgacgtgtcctctgaacgggagccgtagctcaggaggcagaattcagtgtgttatcattgggcagaactggatcctgaaaaattcaagatgctaagcacctacactactttaagaatttggaactgaaacatgaagaggaagagaccaagaaataaaacctcccactttgtctgtacatactggcctctgtgattacatagatcagccattaaaataaaacaagcctt

SEQ ID NO: 122052 - DNA, 1500 bp, Homo sapiens
atggtgttccggtaccctcaactgtattcgcggccgaccacaagagaatcaatacgagaaataacaaccaggagaaattctggtgcagcaaaggaaattggcacagcagatgactttggtggtctgggctgtgctgtcacaacattgcagttgccctctcccgctgcccaagaaaccaactcaaatagcaggacacgtgacacgcagggtgccaacttggctgccatggaaagcccaaagcaggtgtctgcgcaagtggttgcccagcgtggacgactggctgaaccggcggttgcagaaacgggcacacgaaggggcttgtccagcgtgtggatgcgcatgtgcgagcgcaggttgctgcgcgagttgaagccgcggtggcagatgacgcatcgcatgcggcccgcggggccagccgccgagtccgccggtagtgttgaagcccctctagtcaattcccaggtaatatttatgagagtagacagaatagacagctcatgctacacatggtgtgagcagcagcctcctggccacacgcacaagagccctgtcatccctcataacaaggtcaggaagcacatcctgacagggacctggcttctgctgcaggacgtgtgggacagcagagcttggcattcacatccagagaccactccccaggtgaataggtcctctggggccatcaagaaatgcccagggccccagagacctgcagatgtgggtccaagtctggttccagcagctactgaattactggacatgaacaacataaaaggaccagacccagacggccaatttggcagtgagaggcccaaccagctgagtccagggccaggagggcggcccaaacaaccacggcgaaacccgcagcgcgaggaaaaggggggggggaagaacccagccccactgatctcaaagaaaggctcgggaccaaagacgaaagcgaaacaaaagggcgagctcgatagcaaagcacaaggaaccaaaaaggccaattcttccttccggaaagaacagccaggaaggggtggccacccacacgaaacccctggcccaaggcaaggtctggttggacccgatgagaccaatgaaatccccaatgccaatttccgtcagcagatccggaagctgatcaaagatgggctgatcttgcgtcaccgcaagcctgtgacggtccattcccgggctcaaggctggaaaagcaccttggcccgccggaagggcaggcacttgggcatagaatcgaagaagattgatcgccacatgtatcacagcctgtacctgaagttgaaggggaatgtgttcaaacacaagcggattctcacggaacacagccacaagctgaaggcagacaaagcccgcaagaagcccctggctgaccaggctgaggcccgcgggtctaagaccaaggaagcacgcaagctccgtgaagagcacctccagaccaagaaggaagagatcatcaagactttgtcccaggaggaaaaggccaagaaataa

SEQ ID NO: 122053 - DNA, 830 bp, Homo sapiens
gccgtggaattccacaaaaaagtcatggtttaggaagtaattcatgcagcaataggagaaaagaaaggaagctacaagcttagtgaccttgggtggaggaacagctcacaaggcagcctctgatccatcaccaaccagcatctcttcactccgtgtaccctgcaggtatcacagcctgtacctgaaggtgaaggggaatgtgttcaaaaacaagcggattctcatggaacacatccacaagctgaaggcagacaaggcccgcaagaagctcctggcgtaagtttcttttcagagtcttaggggaacattcttagacctttgagagttgttcttagatacttaaaatgtgccaatgcctaagtcttgacttgcacgtagtctgtcttaggaatacagctgttcccttagaggcacccactcctctgtcctgtacacacccactcttcctgtctcgtagggactagaggttagttgaagcaggagcctttggtgggcccagcaactcattccagaagctgactaggctcaaagggagaggtctggggatgtgcttctgtctccctagcatctcatctcttcccaaactgacccgtcttttctcttccctgaccagtgaccaggctgaggcccgcaggtctaagaccaaggaagcacgcaagcgccgtgaagagcgcctccaggccaagaaggaggagatcatcaagactttatccaaggaggaagagaccaagaaataaaacctcccactttgtctgtacatactggcctctgtgattacatagatcagccattaaaataaaacaagccttaatctgcaaaaaaaaaaaaaa

SEQ ID NO: 122054 - DNA, 909 bp, Homo sapiens
cggagctctttcctttcgctgctgcggccgcagccatgcagtatgctcagggcttcagaatgaggctcgcctctgagtgtcctccgcatgtggcagagaacgaatggtctgggttagaccccaatgagacccaatgtaatccgccaatgccaacttcccgtcagcagatcccggaagcttcttcaaagatgggctgatcatccgcaagcctggtgacgggtccattcccgggcctcgatgcccgaaaaaacacctttggcccgccggggaaggggcagggcaacatggggcattaggtaaggcgggaaggggtacaagccaaatgcccggaatgccaggagaaggtcaacatggatgacggagaatggaggattatagacgcgcggctgcttcaggaagatacccgtgaattcttaagaaagatcggatcgcccacatggtatcaccagccttgtaccttgaaggttgaagggggaatgtgttcaaaaaacaagcgggattcttcatggaacacaattccccaaggctgaaggcaagagcaaggccccgcaaagaagcttcctggcttgaccagggctgaggccccgcaggtcttaaggaccaagggaagcacggaaagcgccgttgaaggagcgccttccagggccaagaagggagggagatcaatcaaagactttattccaaggagggaaggagacccagaaataaaaacctcacactttgatctgtacaatacatgacctctgttgattacataggttcagcccattaaaataaaaacaaagccttaagcaaaaaaaaaaaaaaaaaaaaaaaaaaagtcggcgcggccgcaaatttgtaggggtagttgcgcccgggatttggtgcgggggttgcggggtgggagaaggttgtccccagggggga

SEQ ID NO: 122055 - DNA, 2697 bp, Homo sapiens
atgggaaaccaaaatggcttccaccaaaagaaagtaacatcttcatctctgcgcaccggagatgaggccccgactcagcctctgaagaaagcaaacatgtgcccttttagaatcaaagtttggactcttgaagagcttcctgtgcacagaacaggtccaggattggggcacggagatgcaaagaaatgccagtgtcctgttgcccggggatctccaaagacatctttgggtgtgtcttcatgggctgtcaggggtctggcggtttttatgtctgtgaaggggtgtggtttctcgtcacagccagattggaggagagtgccacagtccccaagtttacggcaagttgtatcagtaatggagggctacggcctgtacatacccgagctgggcacccccgagaatcctggtggcgactgggccagccgctgtgagtgcggggctccccagcctacatggaactcgcgctggcccacaagcaccatgcacagcagcagtcccgcccgcgcctctccctccacaccgcccagcaagctgagggagccggctgggccagtccagaaaggggctcccacagtgcagctgcgggatgaaggctcctcaagcacggccagagtaggcgccaaggccgaggaggcgccgagaggaccgagggctgccagcacgctgtcacctttcaagactgcttccttagatgtttctttgggtgatgttagtgcctgtctggtaacgtgcgattgcattggaacagggcgcttctcatgctgccgagcaactcccacgcttgcaggcgttcaaacggccaggaccattaaagtaaatcctgatgccccccagaaaagtgctgcttcttcgtccttgaaggtcttatctggcttgccaaaacatcaaagacctagacgtttttgccagaacacaggaagttaaagtggaccctgataaaccactggaaggcgttcggctgctggtgctgcagaaaacctgaaaacccggggtcacccccggcacctcacaacttcaagtcaggaacaaacccagctgtgaccacccaccacccagtgggctcaaaaccaaggcctgagccacacggcaacagcgaagcaggcgaggtcatacgggggtccccggtcgaaaggacctcaactgcacctgatgctgtctatgctgaagctcttggattgtcggagctcttcggagagctgcgggaggcggggcgcagaggggacccgggccgtcccctgtgcgcgctgcctggccgaccgccacggccgctgcgcctgggcagcgtcaccagcgtcctcgttcggggacgcggtccccggccatggaggggcgccggcggagaggggccgtccaggaggggcgaggggcccggggcgctgcctgcaggcgggagattgcggggcccgagccccctgccccgtccccgcctccggctgcgcctccgcgctgcgctgggctctccggaaatcggagggaaagtggactctgggagcccagtctcctggaagggaaggcctaaggcactgggggcctggggaagagctcatggtcacagctccattgaggaaggtttcaaaataaacccatttagagaaccggggcaaaacaaaatctcaccaggcattgctcatggaaatcgacaaggtggacaggaaatactcaagaacagtcccagaagctgccccctgcactcagaggaagtgtcctctgggcattttgcccccggcccagctctcagccagtgatcccgacatacctcacccagatacccatgtagagaaggaaatggatggagacacaagacagcaaatcgaaaggccgagaacagcggtggaacagcatcaccgagaaatcagaaaggtgcctgatgctggaagcagctggatggtactgcaggacatggccctgtgtatcagctgctgggtagtgcatggcctgggcatctactccaatggggaccgacaccttcccacctcaatgccagttgctgtgcgaccaccacacccttgccccttgccactgggctgggacaacacggcactgggcggtccgtctgtgaaacaggccctgtggatggagcaaacgggtgtccaggagccttgcggtgtagtggcaagtgacacaggatcagggtcagaaagtactgggtctgagtccaaattccacatcttaccgacatgtcgggagcagtcagtgaccctccctgagctcaggttctgcccccgaacaagcagagtaacaaggacagagctggggcaggagcaagcgagggtggctggggtggactgggatgcccatgtgggaagcaaggcctgccccggccggcgttcacatggtatgcctgcaaatgtggccgtggtgcttgtttgcctgcctccaagttctctcaaccagctgctgctacagacacgtgggcctgatcagcaggcgggcaggagggggcagcagaggccgacctggacatgggtgcgctgggagatcccgctaagcgaagctgaacacggaaacgtggcgggcatcctttttcaaaatgagaaaatcagaataacccgtgtgtttggggttcctgggtatccagcccatggaataagtgaccgcaggggagcggcccctcctggagctcccacgcggcacccgaagtccagcacgcacatccctgcctctaccgaaactccgccgtcccggcgcgtcttctaa

SEQ ID NO: 122056 - DNA, 691 bp, Homo sapiens
gaaaagcctaaaacctaacttgcaattgccctgaattaaaaaaacatctcctaacaaggtgtaaatgaacttctcatctgcctcaaacagctcaaaattatttattgtcaaaaccatgctgtctaatgcttaggcctttaggactaactagggtccgtgggaaccctcaaagtgtattctgcttggtcccaggccttcttgggcttgatgttcatgcgtttccagacttcagctgtggtgcggtctgctttggtgacccccactgaaggtcgaacgtggtgatacgggacagggtgcacagcacatattgcctataccctttctctttcctccatggggttcccatggaagtgtcagggctacggagccgacggaaggacagccagcttattccacctcccccaggccgctggatgctgttgccgtgaagatagaggacactccaggttgaagaaagttgttaggacagggtcaatggaagtcaaggtcatttaaaaggacagggtcgatccaggccaggttctctgggtgctccaacagctgtgaagccacctggttgaagtctctcagatcattgagaacattgttattcagccacagggactgggtcagtgatttccccgactttgaacgcttcagtggtcgtagtcctgtccttggctccttcatttaccagatcttgaatgacgtg

SEQ ID NO: 122057 - DNA, 1435 bp, Homo sapiens
atgccagagagcaactgcagcctcacctggaggcactcagtagggagagcagttgcagcgcagggcggtgagcacagcagccaaggtgcaagtctagtgctcggagaacccagaggaggaagcagctggctgctggggctggagggagacacagggctctggggaggcctcctgaaggagggccggctgacagatggaaaagggaagaccattgattgcaaggacgccatcttcatcatgacctccaatgtggccagcgacgagatcgcacagcacgcgctgcagctgaggcaggaagctttggagatgagccgtaaccgtattgccgaaaaccctgggggatgtccagataagtgacaagatcaccatctcaaagaacttcaaggagaatgtgattcgccctatcctgaaagtaagaggtctttcttggcacttcctgctggagcctaaggctcacttccggagggatgagtttctgggacgaactcggtgagatcgtctacttcctccccttctgccactcggagctcatccaactcgtcaacaaggaactaaacttctgggcccaagagagccaagcaaaggcacaaccatcacgctgctctgggacccgcgaggtggcagatgtgctggtcgacggcttacaatgtgcactatggcgcccgctcccatcaaacatgaggtagaacgcccgtgtggtgaacccagctggcagcagccctatgaagcaggaccctgctgcccagggggctgtactttgcgcatcacggtggaggactcagacaagcagctactcaaaagcccagaactgccctcaccccaggctgagaagcgcctccccaagctgcgtctggagatcatcgacaaggacagcaagactcgcagactggacatccgggcaccactgcaccctgagaagggccggctgacagatggaaaagggaagaccattgattgcaaggacgccatcttcatcatgacctccaatgtggccagcgacgagatcgcacagcacgcgctgcagctgaggcaggaagctttggagatgagccgtaaccgtattgccgaaaacctgggggatgtccagataagtgacaagatcaccatctcaaagaacttcaaggagaatgtgattcgccctatcctgaaagtaagaggtctttcttggcacttcctgctggagcctaaggtcctaacaactttcttcaacctgagtgtcctctatcttcacggcaacagcatccagcgcctgggggaggtgaataagctggctgtccttcctcggctccgtagcctgacactccatgggaaccccatggaggaagagaaagggtataggagggcccggggacattctcttcaccaaggcattgagaaatatatttgtgagagtgatgatatcttcagaaagtactgtaataaccagtttctgtag

SEQ ID NO: 122058 - DNA, 792 bp, Homo sapiens
atgacttacagaagctgtgtggctgatagagtcacacagctaatggcattagaagtggaacccaaagtagagcctcttgcaacccccagaagcaccaagagaccaagaaaaatacctaccaggcccattgtgttcattgctctcttgcagaaactggtgattgtggctctgccatctgcagacagcttaagagttaaccagctcagtgccctcttggtatccgggtccttgtctggcatccaggaagaatcaggtcacatggacaaattgaattatggtaaatgtgggggaattttatcgccagatggaggtggctctcagcaggatggacggggagctggaaaggggatggagtgggaagatgatcttcccctagagttcagccattccacggccgatctctccaaccgtccccagccaaactcctctccatgttcagatgctccttctcttctctcctctgccgtgccgctcttctgctcctctgctgttgggctcatggaacttggggaggcccatagcctgggggtgggagaaccatcaaaacagcaggaccaccctacttgctgtggtactgttaccggggggtccttgctcccagagctcccagaatggccaccagccacttccaagatggtggcaagcctcgtgttctctgacctggggttcttgtcctcatggattccaaggaatggaatcttgggccatgcggtgaatgttatagctctattagaagccgtgtgtcacagaagagaaccgtggaacccagtgactagtgttcagctcgattag

SEQ ID NO: 122059 - DNA, 726 bp, Homo sapiens
ttacggctcgagctgagcttttgctcgagctgtttgctcgagcctccgtggagcaaactgttgtttgcctctattgcagacccgccactgacttccatccctctggatctggcagggtgtccgctgtgctcctgatccagtgaggtgcccattgccgctcctgatcaggctaaaggcttgccattgttcccacacagctaagtgcccaggttcatccccaagttccatgagcccaacagcagaggagcagaagagcggcacagcagaggagagaagagaaggagcatctgaacatggagaggagtttggctggggacggttggagagatcggccgtggaatggccgaactctaggggaagatcatcttcccactccatcccctttccagctccccgtccatcctgctgagagccacctccatctggcaataaaattcccccacatttaccataattcaatttgtccatgtgacctgattcttcctggatgccagacaaggacccggataccaagagggcactgagctggttaactcttaagctgtctgcagatggcagagccacaatcaccagtttctgcaagagagcaatgaacacaatgggcctggtaggtatttttcttggtctcttggtgcttctgggggttgcaagaggctctactttgggttccacttctaatgccattagctgtgtgactctatcagccacatagcttctgtaagtcat

SEQ ID NO: 122060 - DNA, 1830 bp, Homo sapiens
atgagcaagggtgaaagtagaaaatgcaatgaggaaaatgtatccaagtcttcaaaggtcgtgaaggtgtttattgtcctgaccccacagtttctgtcccgtgacaaggaccagctgaccaaggagctgcagaagcatgtaaagtcagtgacagtctcatgcaagtccccaaggaagctcctgagtcacatcacacggctacatccaccttcaaagggtcaaggggagaacctgacacacttggtggattccattaaggcgaccatatggtgtcagcctgtgtgggagactgtggaggggcagaggaggagggtagggaattgcattgacttcactaatggatgtgacctggttggcagcagcagcttgcacaacatgcttgtttgcagctcatatgacattaacagacaagacacttttcagaaagacaggacttctgagaagcaccttctggacagcgtctttactgccctccaggactcagctggtcagcaatggccagccagactccatccccagcgtggagaggaggtagctgatcccagaggcgctcctagcaggcatgtggaacccgagaacagctcgccctgccaaggcaatggagagcaggccggcaaggcaggagctcgggctctgtgtggccaggcaaggaggagccccgcaaccatgccaccaccccttactacaagaagcctctgcgagtttgccgtcttcctcctccactggctcttccctgagctcttccactaccgcaagctgggcgagcaggacagctgctacggggacggcggcaagcaggagctggacccgcagaggctgcagatcatctgcaacttcacggaggtctacttcccccacatgcaggaggaggaggcctggcggcaagcaggacctggacccgcagaggctgcagatcatctgcaacttcacggaggtctacttcccccacatgcaggaggaggaggcctggctgcagcggtgcgcccagtgcatcaacgacaagcttcagggcctggggctggacgcaggcagcgaaggcgagccccccacgcgacaactgctacaactcctccagcctgcccgatgacatctcactcttcacccatgacaacctgcacaagcagcacagctgcagcgactccctgggcaagaagcagctggacccgtcctgcatcaagctcattcgccactaagtgcacctgctctacctctgcaccaaaaacaatcgcgtctggacccttgagttcatgggcaacctgcactggaacaggaacagaggcgctcctaccagcagcagtgcaaggtccacgtgctggccccgagtgtaaagacatgaggagctatgcaatcaatcctgagaggttcagagaggagtctgagggtcccccgctgcccccgagaggagcagcaaggacttctgcaagatccccttggatgaggtggtggtccctcactgagcttcccggtgcgctctccctacctgctgtccgacaaggaggtgtgcaagatcgtgcagcagagcctctccgtgggcaactttgccgcggggctcctccaccgccgagaacctccagctgcagtacaacaattttcgggcttgcaacaagaagcagctggaccctacgcagctgcggctcatctgccactaggtggaagccgtctaccccgtggagaaggtggaggaggtgtggcactgcgaatgtatccccagcaacgacgagcagtgccactgccctaacaggaaaaaatgcaacatcctcaagaaagccaagaaagtggagaagtgaaggcccgtggcctgcccagagactcggggtcaccagagactga

SEQ ID NO: 122061 - DNA, 1518 bp, Homo sapiens
atggcggtggatttctctcttgctgttctcatgatagtgagctcatatgacattaacagacaagacacttttcagaaagacaggacttctgagaagcaccttctggacagcgtctttactgccctccaggactcagctggtcagcaatggccagccagactccatccccagcgtggagaggaggtagctgatcccagaggcgctcctagcaggcatgtggaacccgagaacagctcgccctgccaaggcaatggagagcaggccggcaaggcaggagctcgggctctgtgtggccaggcaaggaggagccccgcaaccatgccaccaccccttactacaagaagcctctgcgagtttgccgtcttcctcctccactggctcttccctgagctcttccactaccgcaagctgggcgagcaggacagctgctacggggacggcggcaagcaggagctggacccgcagaggctgcagatcatctgcaacttcacggaggtctacttcccccacatgcaggaggaggaggcctggcggcaagcaggacctggacccgcagaggctgcagatcatctgcaacttcacggaggtctacttcccccacatgcaggaggaggaggcctgggctgcagcggtgcgcccagtgcatcaacgacaagcttcagggcctggggctggacgcaggcagcgaaggcgagccccccacgcgacaactgctacaactcctccagcctgcccgatgacatctcagtaatcagggtggaggatagcttcaagggcgagcgctcttcacccatgacaacctgcacaagcagcacagctgcagcgactccctgggcaagaagcagctggacccgtcctgcatcaagctcattcgccactaagtgcacctgctctacctctgcaccaaaaacaatcgcgtctggacccttgagttcatgggcaacctgcactggaacaggaacagaggcgctcctaccagcagcagtgcaaggtccacgtgctggccccgagtgtaaagacatgaggagctatgcaatcaatcctgagaggttcagagaggagtctgagggtcccccgctgcccccgagaggagcagcaaggacttctgcaagatccccttggatgaggtggtggtccctcactgagcttcccggtgcgctctccctacctgctgtccgacaaggaggtgtgcaagatcgtgcagcagagcctctccgtgggcaactttgccgcggggctcctccaccgccgagaacctccagctgcagtacaacaattttcgggcttgcaacaagaagcagctggaccctacgcagctgcggctcatctgccactaggtggaagccgtctaccccgtggagaaggtggaggaggtgtggcactgcgaatgtatccccagcaacgacgagcagtgccactgccctaacaggaaaaaatgcaacatcctcaagaaagccaagaaagtggagaagtgaaggcccgtggcctgcccagagactcggggtcaccagagactga

SEQ ID NO: 122062 - DNA, 3636 bp, Homo sapiens
atgtgcaacaacctaattcaccttagtttggccaacaataagatcacgacaattaatggcttaaacaagttaccaatcaaaatactttgtctgagcaataaccagattgagatgatcacaggtttggaggatctgaaagccctgcagaacctggatctgtcccacaatcagataagcagcctccaaggcttagagaatcatgacctcctggaagtgatcaacctggaggataataagattgctgagctgagagaaatagaatacattaaaaatttacccatccttcgagttctcaatcttctagaaaatccaattcaggaaaagtctgaatattggttcttcgtaatttttatgcttctgcgattaacagaattagatcagaagaagattaaagtggaagaaaaggtttcagcagtgaataaatatgatcctccccctgaagtggttgcagctcaagaccacctgacccatgttgtcaacagcgtgatgcagccgcagaggatctttgacaggtacttattagaaatccaaaggccggaattcaggctggtcctgaagcttgtgggaaacgagagcttgcccatcgcctctgcagacagtttagcacttacttcagatatggttagaaatggactaggtgatctgttttatgatttcagggcctgtcataccacaagaccaccttactttggagaaggggatcgagttgattatcattttatctctcaagacgtttttgatgaaatggtgaacatggggaaattcattctaacatttagttatggtaatcacaagtatggattaaatagggacaccgtagaaggtatcgcaagagatggtttggcaagctgtattcatatggaaatagaaggtgtaagaagtttgaaatattcctattttgagcctcgttatatcctggtggtgcccatgaacaaggaaaaatatgagggatatttgcggagaaaaggattattcagtcgtgcagaaattgaatttgctgtctccagagtggacctttatattaaaattaatcagaattttccgggatattttgatgaggtaatcaatgcagatgatctggatgttgcctaccaaaaactgagtcagctcattagagaataccttggattgactgaggaacctgccaagagtttggctacaactgcagtgggacaagaagtagagccagtgttcttcctgagtctcagggctgtgaagaaggtgccaaggaatggggaccagatgtttacaggttcagtgcacaagagtggagccaaccatagttaccttaaaacaagtgtcagtgtgtccagagttggttcctgccagtgggttcgtggtcttgctgacttcaagaatggagccgtggaccttcgtgcaggagctcccgctagcaagaagactgtctctggggtgccagcacacctggttccatctcccaggtgcttggcgaaactgcaagcagatggccagatgacagagcatctctctggaatgcaaattcatgccaagcacctagaaaatcagagcgtaactcctgcccagaaccaagagctggctcaggatggagaaacccatcaaaaagagctttctcctgacagccatctcaatcctgagctccctcaacacctcagttcatcagcactgggtcttcctcagcaggcccaggacctatccctaaacccaacggaagaggatgtccaacaatcagatcttcccctaaaacaaatagccactgagacagatgtccctgagatggaagccagtgaggttgggcagtctcccatcaccccgaccctggtgcctcctgtgcacccttcccctccctcgtcccgcagccctcagccaggccaggacaaggagtcaggggaggcccaggtaacccctactggccctcctctgtctgaacctctacagggacctggccccactcccctcagccctcagagaattcaggatgaggaaattgagtcagacaaacttccacccagcagttcccaccatgatcctccaaaagattcttcccacactgacttggtgcagaaacttgctggcgattctcagcaagctctgaaggaggaaacctccaaaccggaagccatccgagtcagtatccctcacccagaactgccacatccccaagacttagcaacagataccaagcagccccaggccaggggagccccggggaccttgcttcctagaagccggctggctcccactcggctgccccagcctcaggtgctggctcccctccagagcaggaggcccacacccaaactcctatcgcccagcagggaagaggctttaggaacaacctcccatcaaaccatgacggtctctcccaggcttccaccaacccgggaagcagacaccagtaaacttcctcccatcagccctccgcactcaaaaccaccaccaaatctgagcccccaggcagcccacagtcttcagcaagtccaggaagagaaggtcagtgaggtgaaactccctcttatcagtccccccagccaggagcaagcagaacctcgcatcctcagtcccgcccaggaggaggcggctcagaaagtgaggctccctcgcattcctgctcctcttccggagccagggctgccccagaactcggggactcagcctgatccaaggcctgcaaaggaaaggaaagctccccaagcaggcagctcctccaggaggaagattccagacatgcgggcctcaccccacaaccaggggccacttcagcagacaggggctagggaaaaaaagctccccaaccagaaagggacggctagaggactggcacctctggaagaggcaccacctgggaaccaccagccagccttgcagctagaaccccacgatcagccagctcccaccatgagggaaaaggcccctgcggagtcgctacaggatagctcggctcctgtggagcatccagggagaaagggacaggttcatcgaaagggcaggtctcagaggagagagattgcttcgcaatccccagagcaggacagtgagcccccaacccagcagcctgtcaaagacacaccagcccatcaggggagagcaaaccaaagagaagcgaacctgaaaacatggggcagtgccacaggacaaaagccccgccactccccagaaccaggtgtctactgtggagcagggcagctggaagggaagactgcgccccaggagcagtcagagcaccaaggtttaagccatccctggagccaccagctcattaaggtctgggaaccccgaggcagcactgtcacagaacgaccagctatggctgggtcctgtgagtctccacactggcttcctcctgaacccatggtcagcgtaggtggaggggctgttcagcactgtccaaaccttggattcctagaaggcagccaatctgcactcctgtgcctcttctgctgttgccgtcacagcctggaagagcagttgttgcagagggatgcagctctatcagctgctgccaccaaattgagccattctggaaggctggtgtcagcaagtagcctttgtgtccagacacgaatccaacctgagttccaactctggctgaagcagggccatattgccattaagttttcttctcttcataaggaaaattcgcttctagacttctag

SEQ ID NO: 122063 - DNA, 1038 bp, Homo sapiens
ttacatggacagttcaaggggaatggggcataaacttcccttgaatgtagatgtagcctcttccaaaacgggtatggtgtagctatttctgcttctcccacatttttgtgagtttctctgtgccccaaactcggtggtctctgatatccttcccgttggatttggggccagtcttcccaacagcatgcaggaaggaaaggtcagagaaagcatccactggcgatgatctctccgcagtcctggctgactttctgtgaatgacaccaccatcggtccttccgtgaccgagcctttcctattgacacccagattattctctcccattcccattttcacctccagtcctttgttttccccaccctgttcaaggtctttactcagtgttatttgtgaacactgccgcggagcccagagagaaaagtgcaatggccattctgcctctttctggacatgcatgttcacatgtgtgtttgggatctcaccaaagcctcttccaaagagcatgtggtcgttgtcccagaccgctttccgggtctcttcggtctcactgtcactggctcctgatcctaggtgtgaagaaatgctcccctccggaggctggaaaggcaattcttttgaccacggacagaaccgaaacaatgaacatttcatggaaaccaaggaatccttcccacactgtgcctcatccccaccatatttgctgtcattggagaatctgaaattgatcacacgaaaatggctgatatttaagccattacgttttggataaatcttgccttttaatgagggccaacgtcttaaaagaatgcagctctcatggcagatttcaggcctcttttcaggatatggtccaaatggaggtttaaaatagtcttcacaaagatcaaaacttttccagagttcttctaaagttgtataatagtgtagaccactggtgagaggtgctggtactggacccctatgagtgagaacatgtggtgtttgatttcctgtccttgcgatagtttgctcagaatgatggtttctagcttcatccat

SEQ ID NO: 122064 - DNA, 1953 bp, Homo sapiens
atggagaatgaattgattgccttgggtgcctcattcagggatgtgacagcagctagtacacactgcatttgtgataaggctgatacgagggacaacagagggtgcttggcgaaactgcaagcagatggccagatgacagagcatctctctggaatgcaaattcatgccaaggacctagaaaatcagagcgtaactcctgcccagaaccaagagctggctcaggatggagaaacccatcaaaaagagctttctcctgacagccatctcaatcctgagctccctcaacacctcagttcatcagcactgggtcttcatcagcaggcccaggacctatccctaaacccaacggaagaggatgtccaacaatcagatcttcccctaaaacaaatagccactgagacagatgtccctgaggtggaagccagtgaggttgggcagtctcccatcaccccgaccctggtgcctcctgtgcacccttcccctccctcgtcccgcagccctcagccaggccaggacaaggagtcaggggagccccaggtaacccgtactggccctcctctgtctgaacctctacagggacctggccccactcccctcagccctcagagaattcaggatgaggaaattgagtcagacaaacttccacccagcagtgcccaccatgatcctccaaaagattcttcccacactgacttggtgcagaaacttgctggcgattctcagcaagctctgaaggaggaaacctccaaaccggaagccatccgagtcagtatccctcacccagaactgccacatccccaagacttagcaacagataccaagcagccccaggccaggggagccccggggaccttgcttcctagaagccggctggctcccactcggctgccccagcctcaggtgctggctcccctccagagcaggaggcccacacccaaactcctatcgcccagcagggaagaggctttaggaacaacctcccatcaaaccatgacggtctctcccaggcttccaccaacccgggaagcagacaccagtaaacttcctcccatcagccctccgcactcaaaaccaccaccaaatctgagcccccaggcagcccacagtcttcagcaagtccaggaagagaaggtcagtgaggtgaaactccctcttatcagtccccccagccaggagcaagcagaacctcgcatcctcagtcccgcccaggaggaggcggctcagaaagtgaggctccctcgcattcctgctcctcttccggagccagggctgccccagaactcggggactcagcctgatccaaggcctgcaaaggaaaggaaagctccccaagcaggcagctcctccaggaggaagattccagacatgcgggcctcaccccacaaccaggggccacttcagcagacaggggctagggaaaaaaagctccccaaccagaaagggacggctagaggactggcacctctggaagaagcaccacctgggggtccagtaccagcacctctcaccagtggtctacactattatacaactttagaagaactctggaaaagttttgatctttgtgaagactattttaaacctctatttggaccatatcctgaaaagagtattctcaacgttttcagcgaatatcgagatatgacgggatttctccgtgtatgccgagttaagccaaatatatgccaattttcgcacaattcaggatatatctcgttttttcgcaatgttcgccggatttccaggattttatcccgatattaccgtgttacggtcattttctcgcggattcgtgtgaaattcgcggagatgttccgcgatagcccggaattttgcagctatattgccaaatttcgcgtgtatacgcttattcgtggatataccggaatatgcctattattggcctttttcgcaatttctcatatattcgagtctcggtattttactatatag

SEQ ID NO: 122065 - DNA, 1134 bp, Homo sapiens
gggggttttccgggaggcgcgtggggcttgaggccgagaacggcccttgctgtcaccatacatggagactttgtaccgtgtcccgttcttagtgctcgaatgtcccaacctgaagctgaagaagccgccctggttgcacatgccgtcggccatgactgtgtatgctctggtggtggtgtcttacttcctcatcaccggaggaataatttatgatgttattgttgaacctccaagtgtcggttctatgactgatgaacatgggcatcagaggccagtagctttccttggcctacagagtaaaatggacaataatattaatgggaaaggactttgcatccaagcttcctaatttacaatgggaggttttaggttttcataaatcctggacccgatcgaatgcaccaaatatcccaaaacttcaataggattccttcttctgttccattgggatttcgtctgtggtcctattggagttttttccatgggctagaagtaattccatgaggaatggaaactgcccggggctaatctgatggggttagagtgccctttgagaagaaaatccagtggatacctggatttgctcctggtcaatgaaagttttaaaaggctgtaccaatccctctaatatgaaatgtgggaaaagaaatgaagagcagcagtaaaaggaaatatctagtgaaaaaaccaggaagcggtattgaagcttggactagaatttcttcttgggtattaaagagaccaagtttatcaccaggaattttttttcctgctggcctaattgcctatacccaatgatgtttgagtggcattttctttttagtttttcattaaaatatattcccatatcctacaacgtataatatcaaataaagtgattattttttacaacccccctcttaacattttttggagatgacatttctgattttcagaaattaaacataaaatccagaagcaagattccgtaagcttgagaactctggacagttgatcagctttacctatggtgctttgcctttaactagagtgtgtgatggtagattatttcaagatatgtatgtaaaactgtttcctgaacaataagatgtatgaacggagcagaaataaatactttttctaattaataccttt

SEQ ID NO: 122066 - DNA, 1299 bp, Homo sapiens
aggaattctacattaaaaaaaagctaaatgtcttcactgaagctttgcatctctctgtaaaaatgacgatttggttcagtgaagacactgagtgattcgatgtccatgactgcatgccaaggttgacccaggcccagggatacctgctcaataaggttatgcactggatctacatcctggtcggccagttcaccttggtcaaaatcaatgctttcttcggtgacttcaagcactttcagatcagagccccgaagacgagcaatggcaatgagattgtgtgcccacaccgtgtaaccatgaattgccagaagagagagctttgtgcacctccatgctaataaaaccaacggatcttcatttcggttgtcactaagatctggaaaaccagatgtgtcaatcacatcattcattaaaataaaatgagtgaggaacttgtcatattgcctggatataagatcaacaatagcccctgaaacacaagtgatatagctatcaaaatgaatcctctctagtggtatactgggtttcagaatctttaacatatcttcactcttgatatcaaaagccattatatagacccgaaagctggtgctctttcgtgacagggctttccaatgctcatcatttggcatgttgtccagagacttgtgcattacagaaacattgtgaaccagaagagacagtcgttgcaaaggcacatggttgctatcagttaagactcttgccatctcagctgtaaagtcacaaaaatccaaggcaagtgagtgcagattcacaaatcgctccagttcaactgcagtaataagagtgctgttaccaggaatattattgtccagtaaactgaggtgctccatggtgttggcaacagcattagagagagatgacagtgatgttggggttactatttccagcataaacccacaggacagccatttcagttgcctactattactcaggatttcttcaaacagttgctgaatttgtttaatttttttgccatcagggtccaccttgctgaggtatgtatttgacaaacttccttgctgttgtagaacacttatgtctccaaaaagactaaacttctgaaggttcctgttgttccggatgctgaccagcacgcaaagcaccagctccaagtaggtgcgcagcacttccagccaacgagctgagagctgcagggcctcgacttcctcccctccagtcccggtgtccgcgccacctccgtcccctgggccaccgccgctcagatagttctcggcggcgaattcaacacgcagctctcgcacgaaccagccgcac

SEQ ID NO: 122067 - DNA, 507 bp, Homo sapiens; identical to SEQ ID NO: 117656
  misc_feature (1)...(507): n = a,t,c or g

SEQ ID NO: 122068 - DNA, 1216 bp, Homo sapiens
gagcagtgtgtggcaggcccccgtggaggatcaacgcagtggctgaacaccgggaaggaactggcacttggagtctggacatttgaaacttgggagagaggctcaccacttttgagtccacggggcttgcacctccacaagacaaacatccctaggccacccagagtaggcaagagaggaggtgaagcctcgggagaaacccctcccttggcagctggtttaagacccaaaacggggatacaaatgcccctgagagagcagtggtatactggaatagatgaggatgggcacatggtggagaggcgtgtttttgtgtaccagcccttcttctctgccgacctcctcaactggaaaaacaataccccatcctatactgaaaagccgcaagctctaattgatttgctccaaactattatccagacccataaccccacttgggctgattgccaccagttgctcatgttcctctttaacacagatgaaaggcggagagtgctccaagcagcaactaagtggctagaggaacatgcaccggctgattaccaaaacccccaagagtatgtaaggacccagttaccgggaaccgacccccagtgggacccaaatgaaagagaggatatgcaaaggctaaaccgatacagggaagctctcttggaaggattaaagaggggagcccagaaggccacaaacgtggccattcagggaaaagaagaaagtccagcacaattctacgagaggctgtgtgaggcctattgtatgtatactccctttgatcccaatagtcctgaaaatcagcgcatgattaacatggctttagttagtcaaagtgcagaagacattagaagaaaactgcagaaacaggctgggtttgcagggatgaacacatcacagttattagaaatagctaaccaggtgtttgtaaacagggatgcagtaagccctaaggaaaaccgcagagagaatgaacatcaggtccggcgaaatgccgacctgttagctgcagcaatcacaggggtccccccaaagaggcaagggaaggggggccccgggaaagaaattcagcctggttgtcagagcttgcagcgtaatcagtgtgcttattgtaaagaaataggacattggaagaacaaatgccctcagctaaaaggaaaacaaggtgactcggagcaggaggatccagacaaggaggaaggggccctgctcaacctggcagaaa

SEQ ID NO: 122069 - DNA, 1032 bp, Homo sapiens; identical to SEQ ID NO: 117671

SEQ ID NO: 122070 - DNA, 1761 bp, Homo sapiens; identical to SEQ ID NO: 117672

SEQ ID NO: 122071 - DNA, 711 bp, Homo sapiens
atggataaattcctcaacacgtacaccctcccaaggctaaaccaggaagacgttgaatctctgaatagaccaataacaggctctgaaattgaggcaataattaatagcttaccaaccaaaaaaagtccaggaccagacggattcacagccgaattctaccagaggtacaaggaggagctgctgcagaccgacactgcccaatcgatcgcctcggaagcctacaggaccatcacagacgctctaggttactctcacagtggagtccctgaaaatcaacgcatgattaacacggctttagttagtcaaagtgcagaagacattagaagaaaactgcagcaacaggctgagtttgcagggatgaacacatcagagttattacaaatagctaaccaggcgtttgtaaacagggatgcagtaagccgtaaggaaaaccacagagacaatgaacgtcaggcccagcgaaacaccgacctgttagcggcagcaatcagaggggtccccccaaagaggcaagggaaagggggccccgggaaggaaactcagcctggctgtcagagcttgcagcgtaatcagtgtgcttattgtaaagaaataggacattggaaaaacaaatgccctcagctaaaaagaaaaccaggtgactcagagcaggaggccccagacaaggatgaaggggccctgctcaacctggcagaagggttattggactga

SEQ ID NO: 122072 - DNA, 512 bp, Homo sapiens
ctgtccaggtccagccctctcttgcccttagtgtggcaccaggccatggtggggagcatggatgtggagccagcggcctgggtgttgatgaccttctgctgggacaccccacggcagtcgggtgtgccacgggaacggatgccccacaccggcacctggaggactgtgggtataaggtgtccaaaaaaaaagctcagatctgccaacagcagcatgatgcgaggcaaggtccagccgttccgcccggcatacaagcttatggagcagccccctttgaagatctccaggtagacttcagagagatgccaaagtgtggaggtaacaagtatgtactagttcttgggcgtacctactctgggtgggtggaggcctatccaacacgaactgagaaaactcgtgaagtaacccctgtccttcttcgagatctgattcgtagatttcgaccgcccttatggatcggctcagacaacgggcctgcatttttggctgccttggtacagaagacggcaaag

SEQ ID NO: 122073 - DNA, 764 bp, Homo sapiens
ctaagcaggtgttggtaaacggggacgcagtaagccgcgaggaaaagcgcaaagagaatgaacgtcaggcccggcgaaacgccgacctgttggttagctgcagcaatcagagcggtccccccaaagaagcaagggaagagctatggaccaaggactacaggccgggacaggatttgcgcttgcttagtcaagctaccctgactttccatccaacagtacctagcccgtccacattgttggggttgctgccagctgaggacagctggttcacctgcttggacctgaaagacgctttctttcctatcagatcagcccctgagagccagaagctgtttgcctttcagtgggaagatccggagtcagcccttgccaaaacggtgaggcagcgttgtgtcagctgccgacagcatcatgcgaggcaaggtccagccgttccgcccggcatacaagcttatggagcagccgcctttgaagatctccaggtagacttcacagagatgccagagtgtggagggaataagtatttaccagttcttgggcgtacctactctgggtgggtggagacctatccaacaagagctgagaaagctcgtgaagtaacccgtgtgcttcttcgagatctgattcctagattggaactgcccttccggatcggctcagataacgggcctgcgtttgtggctgacttgctacagaagacggcaacggtattggggatcacacggaaactgcatgccgcctcccggcctcagagttccggaaag

SEQ ID NO: 122074 - DNA, 1548 bp, Homo sapiens
gcttggtcagcatgttgatgtatctacggagctcagctgtgtactgggccatctgctccggtgtggtattgtcccctgggtacaatggctccaacggggctccccgggcacccagcagtggctacagcaacagagccacacagggagaggggctccccacttttgattccacagtgcttgtacctccgcaagacaaacatatccttaggccacccacagtagacaagagaggaggtgaagcctcgggagaaacccctcccttggcagctcgtttaagacacaaaactgggatacaaatgcccctgagagagcagcagtatactggaatagatgagtatggtcacgtggtggagaggcgtgtttttgggtaccagcccttcacctctgcccaccttctcaactggaaaagcaataccccatcctatactgaaaagccacaagctctaattgatttgctccaaactattatccagacccataaccccactagggctgattgccaccagttgctcatgttcctctttaacacagatgaaaggcggagagtgctccaagcagcaactaagtggctagaggaacatgcaccgactgattacaaaaacccccaagaggatgtaaggacccagttactgggaacctacccccagtgggacccaaatgaaagacaggatatgcaaaggctaaaccgatacagggaagctctcttggaaggattaaagaggggagcccagaaggccacaaacattaacaaggtctctgaggtcattcagagaaaagaagaaagtccagcacaattctacgagagactgtgtgaggcctatcgtatgtatactccctttgatcccaatagccctgaaaatcagtgcatgattaacatggctttagttattcaaagcacagaagacattagaagaaaactgcagaaacaggctgggtttgcaaggatgaacacatcacagttattagaaatagctaaccaggtgtttgtaaacagggatgcagtaagccgtaaggaaaaccagaaagagaatggaggatggcccccctgtttgagggccttggcagcaactgccctgctagtacaagaagcaaataagctgactcttgggcaaaacctgaacataaaggcctcccgtgctgtggtgactttaatgaatactaaaggacatcattggctaacggatgccagactcaccaagtaccaaactttgctctgtgaaaatccccgtataaccactgaagtttgtaacaccctacaccctgccaccttgctcccggtatcagagagccctgtcgagcctgattgtgtagaagtgttggactcagttgactctagcagacctgacctccgggaccaggcttgggcatcagtagactgggaactatacgtggatgggagcagcttcttcaacccccaaggagagagaggtgcagggtatgcagtggtaaccctggacactgttgttgaagccagatcgttgccccaggccacttcagcccagaaagctgaactcgttgctttcattcgggccttagaactcagtgaag

SEQ ID NO: 122075 - DNA, 1495 bp, Homo sapiens
atggatggagctggaatctgttatcttcatcaaactaatgcaggaacagaaatccaaacaccacatgttctcacctataagagggagctgaataatgagaacatgtgggcacacaggggagacaacacacactggggtccagagggttcaaccaattctcctgcctcagcctctggagtagctgatgtatccagagttggttccctccagtgggttcttggtctcgctgacttcaagaatgaagccaaggaacttcgtctttataagcaggagaaaagggagaaagcaaaacgttggaaggaaacagaaaagggatttaatggagactatggggttactatgacaccagggaaatgtagaacttattttgaaatagattggtcaaaattagaagtgggttggccatcagaaggaaacctggagaggtcccttgtttctaaggtatggcacaaggtaactggtaagtcaggacactcagaccagtttccatacatagccacttggttacagctggtgctagaccccccacagtggctaagagggcaggcagcagcagtgctagtagcaaagggacagattgccaaggaaggatcctactccacccggccgagggaaatcaactcctgaagttctgtttgacccaacatcagaagatcccttgcaggagatggaaccagtgatcccagtggtgccctccccttaccagggaaagatgctccccactcttgagcccacagtccttgtgcctccacaagacaaacatatccctaggccacccggagtagacaagagaggaggtgaagcctcgagagaaacccctacattggcagctcgtttaagacccaaaactgggatacaaatgcccctgagagagcagtggtatactgggatagatgaggatggtcacatggtggagagaggacatcagcaagcttcaaccttggtgggcttggggaattcctgcactgacttagaggctcaaaaagcagcatctgacctcttccaggcctcaatcacagcccccctgttccctcaagcacctggtcttgtacctacttattctaaagaagaaaaagactttctccaggcagagggaggacaggtgataaaggaaggatgggttcggttaccagatgggagagtagctgtgccacagatgctaggagctgcagttgtactggctgttcatgaaaccacccatctagaggcttatccaacaccaactgagaaagctcgtgaagtaacccatgtgcttcttcgagatcttattcctagatttggactacccttacggatcggctcagataacgggccatcatttctgactgacttggcacagaagatagcaaagtattggggatcacaaggaaactacatgccacttacgggcctcagagttccagaaagtatacctctaaatgatgatgatgatgatgatgatgataatgatgatgatgatgatgatgatgatagtgataatagtacattttgctga

SEQ ID NO: 122076 - DNA, 1959 bp, Homo sapiens
atgttgaaaaattttaagaagggatttaatggcgactatggggttactatgacaccagggaaacttagaactttgtgtgaaatagattggccaacattagaagtgggttggccatcagaaggaagcctggacaggtcccttgtttctaaggtatggcacaaggtaactggtaagtcaggacactcagaccagtttccatacatagacacttggttaccacagtgggtaagagggcaggcagcagcagtgctagtagcaaagggacagatagtcaaggaaggatcccgctccacccaccgagggaaatcaactcctgaagttctgttcgacccaacatcagacgatccattgcaggagatggcaaaagtcatcccagtggtgccctccccttaccagggagagaggctccccacttttgagtccacagtgcttgtgcctccgcaagacaaacatatccctaggccacccagagtagacaagagaggaggtgaagcctcaggagaaacccctcccttggcagctcgtttaagacccaaaacggggatacaaatgcccttgagagagcagcggtatactggaatagatgaggatgggcacatggcggagaggcgtgtttttgtgtgccagcccttcacctctgccgaccttctcaactggaaaaacaataccccgtcctgtactgaaaagccacaagctctaattgatttgctccaaactattatccagacccataaccccacttgggctgattgccaccagttgctcatgttcctctttaacacagatgaaaggcggagagtgctccaagcagcaactaagtggctaggggaacatgcaccggctgattaccaaaacccccaagagtatggaaaagaagaaagtccagcacaattctacgagagactgtgtgaggcctatcacatgtatactccctttgatcccgatagccctgaaaatcaacgcatgattaacatggctttagttagtcaaagcgcagaagacattagaagaaaactgcagaaacaggctgggtttgcagggatgaacacatcacaattattagaaatagctaaccaggtgtttgtaaacagggatgcagtaagccataccggtgctgaacattcggtagtaaccggcccagtcgcccccttatccaaaaagactattgacatcatcggagccatgggagtttcagcaaaacaagctttctgcttgccccggacttgtactcctgggaccaaggactacaggctggtacaggatttgcgcttggttaatcaggctacagtgactttacatccaacagtacctaacccgtacatattgctggggttgctgccagctgaggacagctggttcacctgcttggacctgaaagacgctttctttagcatcagattagcccctgagaggcagaagctgtttgcctttcagtgggaagatccggagtcaggtgtcactactcagtacacttggacctggcttccccaagggttcaagaactcccccaccatcttcggggaggcattggctcgagacctccagaagtttcccaccagagacctaggctgcgtgttgctccagtacgttgatgaccttttgctgggacaccccacggcagtcgggtgcgccaagagaacagatgctctactccggcacctggaggactgtgggtataaggtgtccaagaaaaaaagctcagatctgccaacagcaggtacgttacttgggatttactatccgacaggcggagcgcacgctgggatcaggaagaaagcaggtcatttgcaatctgccagagcctaagaccagaaggcaggtgagagaattcttaggagctgcggggttttgcagactgtggatcccaaactttgcagtattagccaagcctttgtatgaggtcacaaagtagggggaccgggaacctttcgaatggggatcccaacaacagcaagcctt

SEQ ID NO: 122077 - DNA, 369 bp, Homo sapiens
aagagcaactccaagacacataattgtcagattcaccaaagttgaaatgaaggaaaaaatgctaagggcagccagagagaaaggtcgggttaccctcaaagggaagcccatcagactaacagcggatctctcggcagaaaccctacaagccagaagagagtgggggccaatattcaacattcttaaagaaaagaattttcaacccagcacttcatatccagccaaactaagcttcataagtgaaggagaaataaaatcctttacagacaagcaaatgctgagagattttgtcaccaccaggaaggaagcactaaacatggaaaggaacaaccagtaccagccgctgcaaaatcatgccaaaatgtaaag

SEQ ID NO: 122078 - DNA, 690 bp, Homo sapiens
atggtggaagaaggcaaaggaggagcaaagtcacgtctacatggtggcaagcaagagagagctcgtgtaggggaactctcctttataaaactatcagatcttgtgacacttattcactatcacaagaacagcatggaccaaatctacatcctgattggtgtacctgaaagtgacggacagaatggaaccaagttggaaaacactctgcaggatattatccaggagaacttccccaatctagcaaggcaggccaacattcagattcaggaaatacagagaatgccacaaagatactcctcgagaagagcaactccaagacacataattgtcagattcaccaaagttgaaatgaaggaaaaaatgttaagggcagccagagagaaaggtcgggttacccacaaagggaagcccatcagactaccagcagatctcttggtagaaactctacaagccagaagagagtgggggccaatattcaacattcttaaagaaaagaattttcaacccagaatttcatatccagccaaactaagcttcataagtgaaggagaaataaaatactttacagacaagcaaatgctgagagattttgtcaccaccaggcctgccctacaagagctcctgaaggaagcactaaacatggaaaggaacaactggtaccagccactgcaaaatcatgccaaattgtaa

SEQ ID NO: 122079 - DNA, 996 bp, Homo sapiens
atgatgatgataaaggctgtgaccatagataaactgcagggaagttctgttactgtatctaccgaagatggtttgctgaaagccaagtatctttatacagaatcatcatttctgtcttctgctgctggggatattacattaggaagtgttcatgattcgtcttctggatgtctaaaagcctcaactaatcagggtgccatagatgtttatgtcagccaactggggaaagtggaattgaaatcccataaaggcacatctgaaagcacaagagctcagtgttctagttgtgttataataatgaggtcacaagtcctgtactacgatgaggtaggagtgtgtgaaataccatggtggttaaaagcatgggctttagggtggagccaagatgctgaatacgaacagctccagtctacagctgccagcgtgagcgacgcagaagacagaccaaatctacatctgattggtgtacctgaaagtgatggggagaatggaaccaagttggaaaacactctgcaggatattatccaggagaacttccccagtctagcaaggcaggccaacattcagattgaggaaatacagagaatgccacaaagatactcctcgagaagagcaactccaagacacataattgtcagattcaccaaagttgaaatgaaggaaaaaatgttaagggcagccagagagaaaggtcgggttacccacaaagggaagcccatcagactaacagctgatctctcagcagaaactctacaagccagaagtgagtgggggccaatattcaacgttcttaaagaaaagaattttcaacccagaatttcatatccagccaaactaagcttcataagtgaagaagaaataaaatactttacagacaagcaactgctgagagattttgtcaccaacaggccgcccctaaaacagctcctgaaggaagcactaaacatggaaaggaacaaccagtaccagccactgcaaaaacatgccaaattgtga

SEQ ID NO: 122080 - DNA, 1223 bp, Homo sapiens
atggctgaacaggaacagctccagtctgcagttcccagtcctctgctggtgatacccaggcaaaaagggtctggagtggacttccagcaatctccaacagacctgcagctgagggacctgactgataggaggaaaactaacaaacaaaaaggaatagcatcaacattaacaaaaaggacatccacaccaaaaccccatctgtacgtcaccaacatcaaagaccaaagaccaaatccacgtctgattggtgtacctgaaagtgatggggagaaaggaaccaagttggaaaacactctgcaggatattatccaggagaacttccccaatctagcaaggcaggccaacattcaaattcgggaaatacaaagaacgccacaaagatactcctcgagaagagcaactccaagcacacctaattgtcagattcaccaaagttgaaatgaagggaaaaaatattaagggcagcccagagagaaaggtcggggttacccacaaagggaagcccatcagactaacaacagctgatctctcagcagaaacttctacaagccagaagacagagtgggggccaatattcaacattctctaaagaaaagaattttccaacccagaatttccatatccagccaaacctaagcttcttcataagtgaaggagaaatcaaaatactttacagacaagcaaatgctgagagatttttgtcaccaccagacctgcctgccctaaaagagcaccaggcctgccctaaaagagctcctggaaaggaagcacttaaacatgggaaagggaacaactggtaccagccactgcaaaaaccatgcccaaatttgtaaagaccattgaggctagggaagaaacttgcatcaacttaacgagcaaaataaccagctaacattataacggcaggatccaaattcacacataacaatattaactttaaatgtaaatggggctaaatgctcccatttaaaagacacagactgggcaaattggataaacagtcaagacccatcagtgtgctgtattcaggaaacccatctcatgtgcagagacacacataggctcaaaataaagggagagaggaagatctaccaaggaaatggaaaacaaaaaaaggcaggggttgcaatcctagtctctgataaaacagactttaaaccaacaaagatcaaaagagacaaggccattacataatggtaaagggatcaattcaacaagaagag

SEQ ID NO: 122081 - DNA, 433 bp, Homo sapiens
tttttttttctgagttaacaggtcctttattttgcacacttgctgctgatatatagaaccacgaagtgtttgcacagaccacgaatgcagccgctagcctagaggctggtcacagaagagaatgcgatgaacaccgtcctgccagtgtgaggacggagtgtctgatgtgtttgtgtccccccaccacccccccatatacaaaggccatctctagggcagaaatctctcaacagtatctgtgacttcagcttctctcaaaggcaagatctaatcagactacctatgtgaaattttgtggactattcagaaatatttacagatgtggtcaggtgccttgggtttgggtggcagccttttctcatctccagtatgcctaatcctatgtcaagtgcacagtgaggatcatgagaagggggatgtgaggcctagcatc

SEQ ID NO: 122082 - DNA, 388 bp, Homo sapiens
  misc_feature (1)...(388): n = a,t,c or g
gcacgagnaagatggctgccgacagtgagcccgaatccgaggtatttgagatcacggacttcaccactgcctcggaatgggaaaggtttatttccaaagttgaagaagtcttgaatgactggaaactgattggaaactctttggaaaagccactcgaaaaggtcagatctatttgctggtgtctctaaatgactatttactttgaaacctctattttccagccctttgctgcatttggcacatttgaattaaatgttttttaaagttacgtataatctataaacatcaaatagcatttggaagaatttggatttaaatctgtggcaaatgatatatgtaagacatttgtgaaatgtttaataaagttatatataagtgtgtgtgtaaa

SEQ ID NO: 122083 - DNA, 1539 bp, Homo sapiens
tttcgtaggatttgcacttctgtaagtggctgcttcatcctttgacacctgcgctgatcatttgtgtgcgctgcacctccttcaggtgctgcactatctggcaatccagaaacctgcagaccttgctcggcacctgttaccttgtgtgattcatgcagctgtactcaaggtaaaggaagaagaaagtctcgaaaacatttcttcagttaagaagatcataaagcagataatatcccattccagtaaagttttgcacttccccaatccagaagacaagaaattggaagaaatcattcaccagattactaatgtggaagctctcattgccagagctcggtcactaaaagccaagtttggaactgagaaatgtgaacaggaggaggaaaaggaagatcttgaaaggtttgtgagttgcctgctggagcagcctgaagtgttagtcaccggtgcaggaagaggacatgctggcaggatcattcacaagctgtttgtgaatgcccagaacgtggcaagctatgactccaccaagaggaggaattgaagagaatgggctccccagaggaaaggaaggcagaactcccgtgtcagacttcccaaccccctgctggccgggaattcattttgcgcaccactgtgccgcgccctgctccctactccaaagctctgcctcagcggatgtacagtgttctcaccaaagaggactttagacttgcagttaaaataatcgatggggatgtgtagcccccccgtgtgaggatgacatcaccacatttctagtttcatggagctcaagatgtcttgtgtctgtgtggctagatggcctctgcttggtaatcttatttttaggcctaaaattcccacttaaatccaaagtaaaaatggttatactgaagcataaacccttgcctgtgtaattttaaaaaattaatagagctgtgccaaaccctgttatttttgtaaaaaaaaaaaaaaaaatacatatctatatataatatgtgtgtgtgtgtgacatatgcacacgtctctgtgtatgtgaagtaggggaggccctgggggatgacctcccagcctttatgatgcttttctctatgctgctggacttcattcttactggtccacggcaggatgcagggcggcctgaggcaggtggctgttaccaagtaggaaggacggttcctaagggacagagttttgtctgttttcttaacaaaggaaaaattctacaaaggagaggttgggcgttacaaaggcattgtggaatctaattaaaagggaaagtgtccgctttctgtggcgttttctttcattttctcccgctgaggcatttcagtctaatttcatgtggttttgtgctgtctcagctctaatgtttgcagcctgctgagcctaacaaggcagtggtctcaagaacattctttgtgcctttttaaagtactccattttatttttatgatagttatgtatttatttcacagatatatttaagtacccactttgtgtcaggtacagtacaagcaatgaagataaaacagaaaccaa

SEQ ID NO: 122084 - DNA, 4509 bp, Homo sapiens
agatggctgccgacagtgagcccgaatccgaggtatttgagatcacggacttcaccactgcctcggaatgggaaaggtttatttccaaagttgaagaagtcttgaatgactggaaactgattggaaactctttgggaaagccactcgaaaagggtatatttacttctggcacatgggaagagaaatcagatgaaatttcctttgctgacttcaagttctcagtcactcatcattatcttgtacaagagtccactgataaagaaggaaaggatgagttattagaggatgttgttccacaatctatgcaagatttgctgggtatgaataatgactttcctccaagagcacattgcctggtaagatggtatgggctacgtgagttcgtggtgattgcccctgctgcacacagtgacgctgttctcagcgaatctaagtgcaaccttcttctgagttctgtttctattgccttgggaaacactggctgtcaggtgccactctttgtgcaaattcaccacaaatggcgaagaatgtatgtaggagaatgtcaaggtcctggtgtacgaactgatttcgaaatggttcatcttagaaaagtgccaaatcagtacactcacttatcaggtctgctggatatcttcaaatcaaagattggatgtcctttaactccattgcctccagttagtattgctattcgatttacctatgtacttcaagattggcagcagtatttttggcctcagcaacctccagacatagatgcccttgtaggaggagaagttggaggcttggagtttggcaagttaccatttggtgcctgcgaagatcctattagtgaactccatttagctaccatcgatggcactcagtctgaccgaagggatcattgtggataatgatgtttattctgatttggatcctattcaagctccacattggtctgttagagttcgaagagctgataatcctcagtgtttgctaggtgattttgtcactgaattttttaaaatgtgccgtcgaaaggagtcaactgatgagattcttggacgatctgcatttgaggaagaaggcaaagaaactgctgatataactcatgctttgtcaaaattgacagagccggcatcagttccaattcataaattatcagggttcaaatatggtacacactgcaaagaaaaaaatccgaaaacacagaggtgtggaggagtcaccgctaaataatgatggtcttaatactattctcctgttcttattccctgatgctgcttctgagaaaccattagatggaactacttcaacagataataataatcctccatcagagagggaagactataatctctacaatcagttcaagtctgcaccatctgacagtttaacatacaaactggctttgtggctctgtatgaacaatttttaccatggagggttgaaaggagtggcacacctctggcaggaatttgttcttgaaatgcgtttccgatgggaaaacaactttctgattccaggattagcaagtggacccccagatctgaggtgttgtttactgcatcagaaactacagatgttaaattggttgattgaaagaaagaaggcacgtgatgaggggaaaaagacaagtgcttcagatgtcactaatatatatccaggggatgctggaaaagcaggagaccagttggtgccagataatctaaaagaaacagataaggaaaagggagaggtaggaaaatcttgggattcctggagtgacagcgaagaagaattttttgaatgcctaagtgatacttatagaacttaaaggaaatggacaagagagtggcgggaaaggaggacctaaggagatggcaaatttaaggccggaaggacggctctatcagcatgggaaacttacactgctgcataatggagaacctctctacattccagtaacccaggaaccagcacctatgacagaagatctgctagaagagcagtctgaagttttagctaaattaggtacatcggcagagggggctcaccttcgagcacgcatggcaaagggcctgtctgctctcagatatggagtcttttaaggcagctaatccaggttgctccctggaagattttgtgaggtggtattcaccccgggattatattgaagaggaggtgattgatgaaaagggcaatgtggtgctgaaaggagaactgagtgcccggatgaagattccaagcaatatgtgggtagaagcctgggaaacagctaagccaattcctgctagaaggcaaaggagactctttgatgatacacgggaagcagaaaaggtgctgcactatctggcaatccagaaacctgcagaccttgctcggcacctgttaccttgtgtgattcatgcagctgtactcaaggtaaagggaagaagaaagtctcgaaaacatttcttcagtgaagaagatcataaagcagataatatcccattccagtaaagttttgcacttccccaatccagaagacaagaaattggaagaaatcattcaccagattactaatgtggaagctctcattgccagagctcgggtcactaaaagccaagtttggaaactgagaaatgtgaacaggaggaggaaaaggaagatcttgaaaggttttgtgagttgcttgctgagcaagcctgaagtgttagtcaccggtgcaggaagaggacatgctggcaggatccattcacaagctgtttgtgaatgccccagacgtggccagcttatgactccaccaggaggagggaattgaagagaatgggctccccagagaaaagaaggcagaactccgtgtcagacttcccaccccctgctggccgggaattcattttgcgcaccactgtgcggcgccctgctccctactccaaagctctgcctcagcggatgtacagtgttctcaccaaagaggactttagacttgcaggtgccttttcatcagatacttccttcttctgattcttctagcattactcgttggtggcttcagagaaagttctggctccctcctgaagggaggggaaggtaccagggagaacctgggaggtcctggagagggccctgtcccagttgggtgaatcaggaatcaaaccagcatcggaaagacttcccagccaccaggcttaagctgtgtcggtttcgtggagggggcagccgaggatgggcttgagctgttgagagatttctgcccctagagatggccctttgtatatgggggggggtggtggggggacacaaacacatcagacactccgtcctcacactgagcaggacggtgttcatcgcattctcttctgtgaccagcctctaggctagcggctgcattcgtggtctgtgcaaacacttcgtggttctatatatcaacagcaagtgtgcaaaataaaggacctgttaactcagatttctggatattttggtggtagcttctagtcccagaatctgtgtttttaaaatactacatgacgattctgtctattcaatcacctggtggtcatctttcttgtactaattaactgttgatgagcattttggatattctaggagaaagcctataatttcacatagtttctctttttcatgtaactgtaacctaaatgtattacttctgataaaactgatatatcaaatgatcaaatgatcaatagaaaaattaagattttatatcatgtcatgtgagatttgtcttacttatttttcttttggttgccatggaagttatggcccctgaaaatcgtctccctccccattctcattgctgtaccagccatgcgttctctttttgtggttgctggctgggtactgtatttaatgaagtagagaatagcacttgcaaaaatacagtcttggtacctagagactgtcatgcagatatgtataatttgggatatgtgctaatgcatttgagtaggagggttattttaacacacgtattttgcttttgtattttagttaaaataatcgatgggggatgtgtagccccccccgtgtgaggatgacatcaccacatttctagtttcatggagctcaagatgtcttgtgtctgtgtggctagatggcctctgcttggtaatcttatttttaggcctaaaattcccacttaaatccaaagtaaaaatggttatactgaagcataaaccttgcctgtgtaattttaaaaaattaatagagctgtgcaaaccctgttatttttgtaaaaaaaaaaaaaaatacatatctatatataatatgtgtgtgtgtgtgacatatgcacacgtctctgtgtatgtgaagtaggggaggccctgggggatgacctcccagcctttatgaatcttttctctatgctgctggacttcattcttactggtcacgcgatgcaggcggctgaggcagtgctgtaccaagtagaagacggttcctaaggacagagtttgtctgttttctaacaaagaaaaattctacaaaggagtggttaaagttacaaaggcattgtgaatctaataaaaggaaaggtgtcgcttaaaa

SEQ ID NO: 122085 - DNA, 1726 bp, Homo sapiens
atgagagaaaaaccttgccaaagtaatgagtgtggcaaagcctttaattatagctcactcttaaggagacaccacataacccattcaagagagagagaatataaatgtgatgtatgtggcaagatctttaatcagaagcaatacattgtatatcatcatagatgtcacactggtgagaaaacttacaagtgtaatgagtgtgggaagaccttcactcagatgtcatcccttgtatgccatcgtagacttcatactggagagaaaccttacaagtgtaatgagtgtggcaagaccttcagtgagaagtcatcccttagatgccatcgtagacttcatactggagagaaaccttacaagtgtaatgagtgtggcaagacttttggtcgaaattcagcccttgtaattcataaggcaattcatactggagagaaaccttacaagtgtaatgagtgtggcaagaccttcagtcagaaatcatcccttcaatgccatcatatacttcacactggagagaaaccttacaaatgtgaagaatgtgacaatgtttacattcgcagatcacaccttgaaagacataggaagattcatactggagagggatcatacaaatgtaaggtttgtgacaaggttttccggagtgattcataccttgcagaacatcagagagttcatactggagagaaaccatacaagtgtaataaatgtggcaggagtttcagtcggaagtcatcccttcaataccatcatacacttcacactggagagaaaccttacacatgtaatgaatgtggcaaggtttttagtcgaagagaaaaccttgcacgtcatcatagacttcatgctggagagaaaccttacaaatgtgaagaatgtgacaaagttttcagtcgcagatcacaccttgaaagacataggagaattcatactggggaaaaaccatacaaatgtaaggtttgtgacaaggctttccggagtgattcatgccttgcaaaccatacggagagttccatactgggagagaaaccttacaagtgttattaaatgttgcggaggttttttaatccaaaagggatccttgccacaacatcagagagttcatactggagagaaaccttacgagtgtaatgaatgtggcaaggtttttaatcaaaaagcaagccttgcaaaacatcaaagagttcatactgcaaagaaaccttacaagtgtaatgactgtggcaagcccttacctgaccagtcaacactatttcaccatcaaagcaatcccatcggtgtagggaaacgttaccaaatgtaatgattgtcacaaagtcttcagtaatgctacaaccattgcaaatcattacagaatccatattgaagagagatctacaagtgtaataaatgtggcaaatttttcagacgtcattcataacttgtagttcatcagtgaactcatactggagagaaaccttacaaatatcatgactgtgacaaggtcttcagtcaagcttcatcctatgcaaaacatagaattcatacaggagagaaacctcacaagtgtgatgattgtggcaaagcctttacttcatgttcacacctcattagacatcagagaatccatactggacagatgccttacaaatgtaagggtggcaaggtcttcactctgtggtcattccatgcagaacatcagaaaattcatttttgagataattgttccaaataaaatgaatataaaaaatca

SEQ ID NO: 122086 - DNA, 1162 bp, Homo sapiens
gctgaggtatgtctctagtagtagatacacatttactctgactcatgtagtctttcactccaggattctggggacgagaaggagtttaatctggatgataacgtgagtttcagggcatccttgtgggatctggctgcaggccctgggcaggggggtgggggtgggagggaaaagtggagggcagtgatttcccgaaccatgaacaggaagatgggcaagatgatggtgaaggccctgtcagaagagatggtgaggcctgcagatataggggatggggtgtccagggggcctggggaccgctctggcagaatgtgagcagagaagatggcgctggccttttctgagcaagaggagcatgaacttccggtgctcagccgccaggcatcaacaggtgagtaggggatgcgggggacacctgccgaatctggaggaaaggactgggttacagccgtgctggtggcagggcctttctgtggccgggcacgagtccacaccgacttcactcccagcccctatgaccacgactcgctgaaactgcaggtaagatcagcatccgggcttctctggagcctggcaggctgtgcccaaaaaggaagctggactgaaccagtgggctctttcaaattcatctatgtggatgtgctgcccgaggaggccgtggggcatgcccgccccagccgccgacagagcaagggcaagaggcccaagcctaagaccctgcatgagctgctggagcgcatcggcctggaggtttgagcttggtcctcactagtatctagtatcagggaggcacaactgccccagggatggggaccaggacacctcaatgagctgaacatcatggatccacagcaccgggccaagctgctcacggccgccgagctgctgctggactatgacagtgagtggctttaggagcggcctggtgagggcgccgagagcagccaggagccagggaggggaggcttgccccaaggtggacatcccgcgcgactcaggctgctttgagggctcggagagcgggcgcgatgacgcagagctggcaggcactgaggagcagctgcaaggcctctccctggccggggcaccttgaggtggcggtggcaataggccaaggctgggacccagctgcaaaggctgtaggagtgggcccagcctcccg

SEQ ID NO: 122087 - DNA, 437 bp, Homo sapiens
  misc_feature (1)...(437): n = a,t,c or g
caggacaactagagctctcgcanccgcgaggnggaattcggaagctgctcaggcattcctgtgcaaaaatggggacccgcagacttctatatttgaccacctggtggccatagagcgcgccggaagagctgctgatggcaattactacaatgcaaggaagatgaacatcaagcacttggttgaccccattgacgatctttttcttgctgcgaagaagattcctggaatctcatcaactggtgtttctaactggggaggctatgccctggcctgcgcactctacatcctgtactcatgtgctgtccacagtcagtacctgaggaaagcagtcggaccctccagggcacctggagatcaggcctggactcatgccctcccgtcggtcattaaggaagaaaaaatgctgggcatcttggtgcagcacaatagccggagtg

SEQ ID NO: 122088 - DNA, 1848 bp, Homo sapiens
atggctggagagctccgaccagccagcctggtggtcctgcccaggtcccttgctccagcttttgaaagattctgccaggtcaacactggtcctctacccctgctgggccagagtgagccagaaaagtggatgctgccccctcaaggtgctatctcagagaccaggatgggccatccccagttctggaaatacgagttcggtgcctgcaccggcagcctggcttcgctggagcagtactcggagcagctgaaggacatggtggccttcttcctgggctgcagcttctccctggaggaggccttggagaaagcggggctccccagaagagacccagcaggtcacagccaggcgggtgcatacaagacaacagtgccttgtgttacccatgctggcttctgctgccctctggtggtcacgatgaggcccattcccaaggacaagctggaagggctggtgcgggcctgctgctccctcggaggggtctccaggggcaaaggccctgaacaaggctcaaaggctctggcagctgtatcagggctgggcttacagatgcccctcaggtttaaagaactgttgggaatcaaagagctttccaaacctgcctacggggatgccatggtgtgtcccccaggggaggttccagtgttctggccttctccgctgaccagtctcggagctgtcagcagctgtgagaccccactggcttttgccagcatcccaggctgcacagttatgactgacctgaaggatgcaaaggctccacctggttgtctcaccccagagagaattccagaggtccatcacatttcccaagatcctctgcactacagcatcgcgtcagtctctgcttctcagaagatcagagaactagagtctatgatcggcatagacccagctaaattagaatctcaatggaaacgatttgaccacctggtggccatagagcgtgccggaagagctgctgatggcaattactacaatgcaaggaagatgaacatcaagcacttggttgaccccattgacgatctttttcttgctgcgaagaagattcctggaatctcatcaactggagtcggtgatggaggcaacgagcttgggatgggtaaagtcaaggaggctgtgaggaggcacatacggcacggggatgtcatcgcctgcgacgtggaggctgactttgccgtcattgctggtgagcactcggatggccgcccagtccggccggctacccagggtgtttctaactggggaggctatgccctggcctgcgcactctacatcctgtactcatgtgctgtccacagtcagtacctgaggaaagcagtcggaccctccagggcacctggagatcaggcctggactcaggccctcccgtcggtcattaaggtaacaaaccccagccagccgctcgcctggaagcagcttttaccctggatgagcagcaggcctgaggtcccaagccagcaagctccgcccccaacaccaattccaggctctaacccgcctcctctggggctcctcaaggagatgggacctgcccctcttggaggagaagctggtggaccagacttgcgggacattcacaatgcctcagtgcttaacgggacacctacttggggaatattcccagggcaggtactgagcacccatggtgacatggatgtggaatatgccatcagcccagggcatagcagccatgtggaagaaaaaatgctgggcatcttggtgcagcacaaagtccggagtggcgtctcgggcatcgtgggcatggaggtggatgggctgcccttccacaacacccacgccgagatgatccagaagctggtggacgtcaccacggcacaggtgtaa

SEQ ID NO: 122089 - DNA, 527 bp, Homo sapiens
ctcagggcacctggagatcaggcctggactcaggccctcccgtcggtcattaaggaagaaaaaatgctgggcatcttggtgcagcacaaagtccggagtggcgtctcgggcatcgtgggcatggaggtggatgggctgcccttccacaacacccacgccgagatgatccagaagctggtggacaaaggacaacatttctctggggctttttaacttttattcctaagactctaaaggcgttgatttcaaccctccttcactctggcttcttcaggcaacccacgtggtctcctgtgagaatcttctcgacagttacttatggggacacttgtgaacaattaactgccaggcagagcatgagaacaaacattcccaggccatgtaggataggatactccagactccagtcatcctcccccatccatggtttctgttactcatggtttcagttactcatagccaactgcagaccgaaaatactaaatgaaaaatttcagaaataaacaactcttaagttttaaaaaaaa

SEQ ID NO: 122090 - DNA, 935 bp, Homo sapiens
gaggaaagcagtcggaccctccagggcacctggagatcaggcctggactcaggccctcccgtcggtcattaaggtaacaaaccccagccagttgctcgcctggaagcagcttttaccctggatgagcagcaggcctgaggtcccaagccgtaagccgagggctggcaccctgctgcccctcaaaagccagaggcagagccagccttgaagcagaggtctcctggattgggtgccctttaagctactcgcagttctgaatcgtgtggcaggcctgatccaagtgaccattttccttctagtttgactttggcaggagagcaaagggagaaagctctatggctaaggccagaagacctagccctgccaataaaatcaacctcattttgtgaatgcctgttgtgtgccaaggaccctgctaagtgctttgcttgaagaaaaaatgctgggcatcttggtgcagcacaaagtccggagtggcgtctcgggcatcgtgggcatggaggtggatgggctgcccttccacaacacccacgccgagatgatccaaaaagctggtggacgtcaccacggcacaggtgtaaccgtccatgttccgtgtgagcagagtccctaccaacgggcaggtctgcatccggggagaatgcagctgcttctggcgacaatcctgctagtaaacactggtcttcggcaacccacgtggtctcctgtgagaatcttctcgacagttacttatggggacacttgtgaacaattaactgccaggcagagcatgagaacaaacattcccaggccatgtaggataagatactccagactccagtcatcctcccccatccatggtttctgttactcatggtttcagttactcatagccaactgcagaccgaaaatactaaatgaaaaatttcagaaataaacaactcttaagttttaaa

SEQ ID NO: 122091 - DNA, 2463 bp, Homo sapiens
atggctggagagctccgaccagccagcctggtggtcctgcccaggtcccttgctccagcttttgaaagattctgccaggtcaacactggtcctctacccctgctgggccagagtgagccagaaaagtggatgctgccccctcaaggtgctatctcagagaccaggatgggccatccccagttctggaaatacgagttcggtgcctgcaccggcagcctggcttcgctggagcagtactcggagcagctgaaggacatggtggccttcttcctgggctgcagcttctccctggaggaggccttggagaaagcggggctccccagaagagacccagcaggtcacagccaggcgggtgcatacaagacaacagtgccttgtgttacccatgctggcttctgctgccctctggtggtcacgatgaggcccattcccaaggacaagctggaagggctggtgcgggcctgctgctccctcggaggggtctccaggggcaaaggccctgaacaaggctcaaaggctctggcagctgtatcagggctgggcttacagatgcccctcaggtttaaagaactgttgggaatcaaagagctttccaaacctgcctacggggatgccatggtgtgtcccccaggggaggttccagtgttctggccttctccgctgaccagtctcggagctgtcagcagctgtgagaccccactggcttttgccagcatcccaggctgcacagttatgactgacctgaaggatgcaaaggctccacctggttgtctcaccccagagagaattccagaggtccatcacatttcccaagatcctctgcactacagcatcgcgtcagtctctgcttctcagaagatcagagaactagagtctatgatcggcatagacccagggaaccgggggattgggcacctgctctgtaaagatgagctgctgaaggcctctctctcgctgtcccatgcccgctcagtgctcatcaccactgggttccccacacatttcaatcatgagcctccagaagagacagatggcccaccaggagctgttgctctggttgccttcctgcaggccttggagaaggaggtcgccataatcgttgaccagagagcctggaacttgcaccagaagattgttgaagatgctgttgagcaagtgtggggaatgacctgccgagtattcttagcaatccggggcagccctggaccaccagagctggggagagtagtggagtatgaagtggctgaaaggctcagacagcagtcccacctggtcgtgatgggcagggctgcacctggagcacccagcctggcttggagacgcctgccagactccactcagagctgggtcttgtctcttgtcctcatgggagctcagagggtagaatttgctatattggattttacagaacttacattacatttgcatgaagaaagtgttctgaagacgcagatcccgatattaacttaccaaggtggatcagtggaagctgctcaggcattcctgtgcaaaaatggggacccgcagacacctagatttgaccacctggtggccatagagcgtgccggaagagctgctgatggcaattactacaatgcaaggaagatgaacatcaagcacttggttgaccccattgacgatctttttcttgctgcgaagaagattcctggaatctcatcaactggagtcggtgatggaggcaacgagcttgggatgggtaaagtcaaggaggctgtgaggaggcacatacggcacggggatgtcatcgcctgcgacgtggaggctgactttgccgtcattgctggtgagcactcggatggccgcccagtccggccggctacccagggtgtttctaactggggaggctatgccctggcctgcgcactctacatcctgtactcatgtgctgtccacagtcagtacctgaggaaagcagtcggaccctccagggcacctggagatcaggcctggactcaggccctcccgtcggtcattaaggtaacaaaccccagccagccgctcgcctggaagcagcttttaccctggatgagcagcaggcctgaggtcccaagccagcaagctccgcccccaacaccaattccaggctctaacccgcctcctctggggctcctcaaggagatgggacctgcccctcttggaggagaagctggtggaccagacttgcgggacattcacaatgcctcagtgcttaacgggacacctacttggggaatattcccagggcaggtactgagcacccatggtgacatggatgtggaatatgccatcagcccagggcatagcagccatgtggaagaaaaaatgctgggcatcttggtgcagcacaaagtccggagtggcgtctcgggcatcgtgggcatggaggtggatgggctgcccttccacaacacccacgccgagatgatccagaagctggtggacgtcaccacggcacaggtgtaa

SEQ ID NO: 122092 - DNA, 1531 bp, Homo sapiens
  misc_feature (1)...(1531): n = a,t,c or g
ctagagtctatgatcggcatagacccagggaaccgggggattgggcacctgctctgtaaagatgagctgctgaaggcctctctctcgctgtcccatgcccgctcagtgctcatcaccactgggttccccacacatttcaatcatgagcctccagaagagacagatggcccaccaggagctgttgctctggttgccttcctgcaggccttggagaaggaggtcgccataatcgttgaccagagagcctgttatcttgcaccagaagattgttgaagatgctgttgagcaaggtgttctgaagacgcagatcccgatattaacttaccaaggtggatcagtggaagctgctcaggcattcctgtgcaaaaataggggacccgcagacacttagatttgaccacctggtggccatagagcgtgccggaagagctgctgatggcaattactacaatgcaaggaagatggaacatcaagcacttggttgaccccatttgacgatctttttctttgctgcgaagaagattcctggaatctcatcaacttggagtcggtgatggaggcaacgagcttgggatgggtaaagtcaaggaggctgtgaggaggcacatacggcacggggatgtcatcgccttgcgacgtggaaggctgagtttgccgtcattgctggtgtttctaactggggaggctatgccctggcctgcgcactctacatcctgtactcatgtgctgtccacagtcagtacctgaggaaagcagtcggaccctccagggcacctgggagattcaggcctggactcaggccctcccgtcggtcattaaggaagaaaaaatgctgggcatcttggtgcagcacaaagtccggagtggcgtctcgggcatcgtgggcatggaggtggatgggctgcccttccacaacacccacgccgagatgatccagaagctggtggacgtcaccacggcacaggtgtaaccgtgccatgttcccgtgtgagcagagtccctaccaaacgggcaggtctgcatccggggagaatgcagctgccttctggcgaaaaaccctgctagtaaaacactggtccttcgggtgaagcaaacggaaaactcgccctggccctgggaaaactgcatgccccacttttctgggaggggttaagtgcaggtgcccgtggacaaaggacaacatttcctctgggggctttttaacttttattccctaagacntcctaaaggcgttgatttcaaccctccttcactctggcttcttcaggcaaccccacgtggtctcctggtgaagaatcttctcgacagttacttatggggacacttgtgaacaatttaactgccagggcagagcatgagaacaaaccattcccagggccatgtagggtagggatactccagactccagtcatcctcccccatccatgggtttctgttactcatgggttttcagttactcatagccaacttgcagaccgaaaatacctaaatgaaaaatttcagaaataaaaagattcttaagttttaacaa

SEQ ID NO: 122093 - DNA, 261 bp, Homo sapiens
tcagccagcaccactctctgggggctgttgatattcctgatccacaggcttggcactgctctccgtgcagtatcttcgtgggggacccacttgacagcgaaggaggtgcagtgtggccatgctgtgggacccactggtcctatcaccatctgcaccaaccaagggctgctggccataaagaatgttgaaaagagcttctgcccaggtctggatcagggccacggctcccgagaacagcaggaggagggttcgggactccat

SEQ ID NO: 122094 - DNA, 2581 bp, Homo sapiens
  misc_feature (1)...(2581): n = a,t,c or g
ttttttttttcatgtgggatccacaacactttaattcatagtttgcctcagggctattataattccccaggcctctatagtacagtcttaagagatctggagaacctggatatactatagaatattaaattcctttatttcattgacaacatcatgttgactgggatggatgagtaagaggaggacggtacactagaggctttggtaaaacatcttctctccagaggggtgaagataaataaaccttacagagattcagaagtggccactgcagtgaagttttacaggtctagtggttaggggcatccagggggtgtcccttccaatgtgaaagacaaactgttgcatctttgcatcctcatgcaagggaagggaagcacactgcctggggtgagccctgttttgagtttcttgacatcaccattcctacatgtaaggttgtatntggctttgacccacacttctaggtgacataggaagaatgcccagcttttgagtggagcctccacaggaaaggacactgcagcagatcccaggccatggcgcagtcaccatccttcaggaccccctggtgctgaaagtgccagtgggtggggtaagatttggggtggagctgaaccaagcaccagtaggagagtcacagtggaagggcctgggaatctggagtaaggccatgtcatccacagcacagaaatatgccccatccaaagcagagaaatatgttggaagcaacttttggcatgttactgtaggccctgataagatagaatgcttgaccatgggacacaaaacaaccatgtgattccaaagtgcccctacggaattagcatctgtgtaactcatgaagtcatacattggacatgccccaacagcatcccatcatgagatggaaaagtttcttgtgagttgagcctgaatccccatgttaacatcccccagaaaacacccaaacctgaaatggccctgaacaaccaagcagaagcactgaaattagccagccttccccatgggtcagcccaggccgggtaggatgggtacataaatggagcaaacacagtggcagggatgaggctacctatgggtccaacagtactgactccctcctaccaaggtagatccagacactgccacctctaaatgtcctactcatcagcatttgaacccaatgatcttccctggtagggctctatttctttaggtgaccaaccagaccctaagtgaggagttgactacattgcactctttccatcctgaaagggccagaggttcatgttcacagggataggcacctattcaatagtggggttttcgtgtcgtgttgtgatcccatcagtcagcaccactttctgggggctgttgatattcgtgatccacaggcttggcactgcttctccgtgcagtatcttcgtgggggacccacttgacagcgaaggaggtgcagtgtggccatgctgtgggacccactgggtcctatcaccatctgcaccaaccaagggctcctggaccataaagaatgttgaaaagagcttctataggcacagctcaacgccagcttgcaggaagcactcctgcgggtgggagggtgccatctttcaggacatggtgcattttaaaaatcaaagacatctctacagttctgtaatctcagtaggaagaacacgtgggtccagataccaaggggtggaagtggatgtggctccatatcccattccttcaactcacctgtcgtgggattttgcacttctctcccaaaaccaccactctgcagggtagaaggtcctggattctaaaggagggtacccttaaaaggagacaaatgagtgcccattgaactacacattacagctgccacaggggaattggacagtatgtgtccagagaccagcgggtgagaagaggagtcccctcctctccaggcacaggtaatagatcctgatccccaggaggaggcatggctgctgtcacacaatgagggtaggaggagttcgtgtggaacccagggatccccttgggggcctcctggttccccttgtcccattgtaagtgtgaggagaatcgtccagccacccaacctgagagggtttgatttccaagagcccagacccctcaggaaggaagatttcagtcgcatttccaggtaatttcccaaggcctcgttcctgtgctctgacatcctcagcagcattggtgcaagaggccctacttctctcaggctgttcccagcgggtgatgggtcacaccagggacaccaaagcaggaccatttcctgggacacatgaggactcctttgatggcctaatagtggctggaggactcttcctacgtgccttgratcaactctccttagattacctgtgttctagaatgcatccaaaacatccttctctccttctgcccatcacttgggggcacacttgcatctcagtctattgccttttccaggagttgtaatgtaaaaatgagatcatttctgccttgattgtaattgtaatctgcccaggtctggatcagggccacggctcccgagaacagcaggaggagggttcgggactccatgacccgcaaccttggcgtctgggcc

SEQ ID NO: 122095 - DNA, 1299 bp, Homo sapiens
atgggctatactgctgaaagccacagcccaccccttgcaagatacagatctggttctccacatacctttggggaacaggttatccaggattccagtgggcctgtcttcctgaggagaagcttgaaagaggtctgtgctgaggagttggagcctgtgactggggccagttgcaaacctaggtctggggctgaggaagaggaggaagagaatgtcattgggaactggttttgggaaggagatgatgctagttttgaccctaatcctcaatctaataaatgtaatcggagaaatttagatccagaattgcagcttcaacaatacaaaacagcaaagctacaagaggctgctgtgccaatctacaagacagtgattcttagtcgttgctggcagggagaggcagaatcacctgcagatgctgcctgtgggctgagtaaaatgcaccaacttttcaaggaaaaacaaggacaggcgattctaggccttaagggaaagatgacacacttggctattgcagaaacacagttccttaaacacaagtccaaaattcaaacagctctgaacattgaaagtttttggcaacctacattgcagcagaatttggcccaaactgacatgagggacttagtaacctgcatcccagctgctccagctgtgactaaaaggggccaagatacagctcagaccatggcttcagaggatgcaagccccaagccttggcagcttccacatggtatagagcctgtgggtacacagaagtcaagaattgaggtttgggaacctcctcttagatttcaaaggatatatggaaatgcctggatgtccaggcagaagtttgctgcagggaccactcactcaggactactcgttcaacgacagtctcttgtggagcaattttccagactgcaaaccctgctcaatttccaaactcctgcatctagtttacatctgtttgtctctggcagtagttcaaaccctcctcccccaatggaaagctctggcaaggagtttattgctcaccctggaaagagagaaccacctcaacagagattgatagtctctagaggggcaagtgaaattacagacaacccttacatgacgtcaatccctgtgaatgcttttcagggactatgcaatgaaaccttgacactgaagctgtacaacaatggctttacttcagtccaaggatatgctttcaatgggacaaagctggatgctgtttacctaaacaagaataaatacctgacagttattgacaaagatgcatttggaggagtatacagtggaccaagcttgctgtga

SEQ ID NO: 122096 - DNA, 2221 bp, Homo sapiens
tttcgtgagggggacgaaacctgggctccgcaaaacagaacgtgggaagaacggcgggatgttaaggagctcaagaagcagagagtctacctgcccgacgcgttcgtggagaggagcagcggttgctgttggaggaggtgggtgcaaggacggcagatggcatccctgaggggtggtgactgagactagatgcgggtgcaggttcctgtaaagatctgtatgtagctgttcacttggaagttaattaagaaagaacaaaaactattcatttggattcaaggtccatctccactggtggctgtggtggctttggattgttggaagaccatcaccttcagcaggtctgcacttgggaacaatcattctcccccagcccgagcgtgcctctgccctctgtatcattgacagaggctgtatgtttggaaagagaactttgtgactgcagaactgacagttgactctaattcttgctaccaagtttttccccgacccagtgaaagagtgttaagacttcgacctaggacacattgagaaccaaggccaagactggacagggccatataactgggcttcaaccatggctgggactaagaataagacaagagcccaggccaaaactgaaaaaaaggctgctatacaagctaaagctggagcagagagggaggctactggtgttgttaggcctgtagccaagaccagggccaaagcaaaagccaagacagggtctaagacagatgcagtagcagagatgaaggcagtgtctaagaacaaggttgttgctgagacgaaggaaggagctctgtcagagcctaagactctgggcaaagccatgggagatttcactcccaaggctgggaatgagtccaccagctccacatgtaaaaatgaggctggtactgatgcctggttctgggctggggaagaggccactatcaattcctggttctggaatggagaagaggctggtaatagtttcagcactaagaatgataaacctgaaattggtgcccaggtctgtgctgaggagttggaacctgcggctggggccgattgcaaacctaggtcaggggctgaggaggaggaggaagagaatgttattgggaactggttttgggaaggagatgatactagttttgaccctaatcctaaacctgtgagcaggatagttaagcctcagcctgtgtatgaaattaatgaaaaaaataggcccaaggactggtctgaggtaactatctggcccaatgcccctgctgtaactccagctgtgttaggatttagatcccaggcaccatctgaggcaagccctccttcatatattgttctggcctccgctgaagaaaatgcctgttctttgcctgtggcaacagcttgccgcccttctaggaacactcgctcatgctcacagcctatccctgagtgtcgttttgattctgacccctgcatccagaccatagatgagattagacgtcaaatcaggatcagggaggtaaatgggattaagccatttgcttgtccttgcaaaatggaatgctatatggattctgaggaatttgaaaaacttgttagcttacttaagtcaactactgatcctcttattcataaaatagcacggattgcaatgggtgtccataatgttcacccatttgcccaagagtttattaacgaagtaggtgtagtgacacttattgaaagcttgctcagttttccttcccctgaaatgagaaaaaagactgtaattactctgaatcctccttctggggatgaaagacaacgcaaaattgaattacatgttaagcatatgtgtaaagaaaccatgtcatttcctttgaactcaccgggacagcaatctggattaaagatactaggacaactgactactgattttgtccatcactacattgttgccaattacttttcagagcttttccatttgctgtcctcaggaaattgcaaaaccagaaatcttgttttgaaactacttttaaatatgtctgaaaatccaactgcagccagagacatgatcaatatgaaggcattggcagcattaaaactcatctttaaccagaaagaggcaaaagccaatcttgttagtggtgtggccatatttattaacataaaggagcatatcagaaaaggctcaattgtagttgttgatcacttgagttataatacactcatggccattttcagggaagttaaagagattattgaaacaatgtaa

SEQ ID NO: 122097 - DNA, 1571 bp, Homo sapiens
  misc_feature (1)...(1571): n = a,t,c or g
atggaaaaactagatgaactaaaaataaaaatagacaacattaatggagcattaatttgtgccaggcacttttctaaatgttcttcgaatgcacaatcacatttatgcccctacctacaagcgtttcctggaggaccagggggcggggcctgcccggctggcctggacgaacgggaagccgggagctcggccacgggtggcgaggctgcggtgaggcctggtctccggctgccagaccatgctgagtggagcacgctgcaggctcgcctcagcgctgcnggcggaacgcgcgcgcacgccgtccgcggtcgcccgtaggtgcctgcacgcagtcaggggtcgcggcctttggcccgaccggggcaagaagactgaggagccgccccgcgacttcgatccaggcgctgctggagttcctggtgtgcccgctctccaagaagccgctcagatatgaagcatcaacaaacgaaattgattaatgaagagttgagaatagcttatccaatcattgatgggattcctaatattatcatattaggcagctaggatgacacgtcaaagtaagaagcaagaagaagtggagcagcgttagtttcattaattttaaaaaaatttaaaaaaacggcaacagccaactttttcttaataccatatacccttttaaaaacacaggtggcaggtaataagtggaagggaaggatgttttctggtctcctccctacgttgactgttcttaattccactggtttctttagcaggactggtctactcaagcctctggtggaagaaaacttcccacaggggctgcactagcacagcccagcctttgcttttacagcctgctccttgccctattaccataccagtggtatggtattcttccacctttggacttgggatgggtattaaactcttcagggcataattgatgcaactagagtcaatatgcctgtatatattaatgatagctcttgggccatcggatctctggaaagctccaaatgggatggaaatttagtttgcggggaaagaggcttttgcttggcgcatatccaggcttagggactgtggggaggccttaagtttgcagatgcttcttttattgtactccttgttctgccccttgttttttggaaggctctgacttataacctgctgtatccgggaagaaaccattttgaccagtgtcttgggttggagatgaacatcgcctaattggacatgtgatgacctatttccttattcccattcatcctaagagtcattgaaattttgttttgccttgtttgtttagcttcaaggtctttggtaaagtcacatgttaaggatgactgaaattaattccaaaggagtgatgttggaatagtcccctctaaggggagagaaatgcatttgaacgaattgtgatataaaacccccataatcaaatagaaacttcatgtacttacaaaaactgagtttgtaaaattaccttcatttctttggacattaaatgcttatattaggcaataaacatgttgacactttcctataaaaaataaaccagtttgcagtaaaaaaaaaaaaaaaaa

SEQ ID NO: 122098 - DNA, 693 bp, Homo sapiens
ccagcctcagcctcccgagtagctgggactacaggcgcgcgccaccacgcccagctaattttgtatttttagtagagacggggttcaccatgttgaccacgatagtcttgatctcttgacctcatcatcccccggcctcagcctcccaaaatgcaggtattgtagcgtgagccacagcccccggcctggaatagcytgccttataacaagactggacttcctcaggggacacagagcagagtccccgccctcgggagctcataaccgatcccccacgctcgccctcgcggccacactttgaaagccctcccctaccggctctacactcaaacagcccgaggcttcgggcagcctcgagttcggattccacttctcagccttctggggtcactgaaaccctcagaactccgaggacaagtcggacacgccttcgcctcagccatcttcgccagcgcaataagtctctgtgtcttcacactcctggtagagggaaaactaaaacctccgggagccagcgtccggcggtgcctgcaatctaaccgggatttggggttccgagccacttttcccacaagccaccgcggtcatggagctttaggcttaaactacatttcccagagggcaacgggaacacccaatctatggcttcccttccgttttcgcgtggttcttttgcaagctgcttgcggctga

SEQ ID NO: 122099 - DNA, 410 bp, Homo sapiens
agggatgcattttgaatatttattgtccttgtttttaacataatttgcaaatttacataattataatggctgtgtttgacaactggcttgcaacaaaattcttgaaaattgaataattggcccacctgggctgggatgagccagctggatcacaccgttgccccctcagcctctaggaggcctcaggattatggcgtccatcttatgatattggccaaaaggagacagtcttggaggtgctgcttactgttgaacttccttttggaatgtatgggagaaggcagggaaaggaatctttaggcagagtgggacagacgctttttattggtctggctggcgtgcctagtggaaagctcaggcagagcttcctatcttgccctggctcccatcttccctctcctgggagttca

SEQ ID NO: 122100 - DNA, 458 bp, Homo sapiens
  misc_feature (1)...(458): n = a,t,c or g
ttggaagacccaaggggttgggggcttttttcgggggtaccccccgcagaggggcaagaaaaacccccttcaggtcacccccttttttacctattaggttccgcaggaggaggttaaccccccccggggcttcaaaccgcagtttcccatttttttannnnnnnnnnncgggggcccccccccggcccccccnnnnnnnnnnnnnngcattttgagtatttattgtccttgtttttaacataatttgcaaatttacataattataatggctgtgtttaacaactggcttgcaacaaaattcttgaaaattgaataattggcccacctgggctgggatgagccagctggagcacaccattgccccctcagcctctaggaggcctcaggattacggcgtccatcttatgatattggccaaaaggagacagtcttggaggtgctgctgactgttgaacttc

SEQ ID NO: 122101 - DNA, 1451 bp, Homo sapiens
  misc_feature (1)...(1451): n = a,t,c or g
atgatcgctcgacatcgatacgactttttttttttttttttttttttttttttcttgcattttgaatatttattgtccttgtttttaacataattttgcaaatttacataattataatggctgtgtttgacaactggcttgcaacaaaatttcttgaaaattgaataattggcccacctgggctggggatgagccagcttggatcacacccgttgccccctcagcctctaggaggcctcagggattatgggcgtccatcttatgatattgggccaaaaggagacaggtcttgggagggtgctgctttactgttgaactttccttttggaattgtatggggagaagggcaggggaaagggaatctttagggcagactgccattccagggggactgcctattctgtttcactgaggattcagcttgtggaaccatctgttctttccttcccccttcctgtctactggcatggcagggcccgggaaggctgagcgtttagtcaaaagggtacagggaaggggaaaagaggaagaggggcaaggccattccccccaagaaaggaagggctctgatgcagaggggagcaggagctgaggtggaggacggccactgcctctctcaccctctggtccaatccctctgctcaagaaaaaccaggcttagcagagtgggaacaaacgctttttattggtctggctggcgttgccttaatgggaaaaactcaaggcaagagcttccctatcttgcccctggctccccatcttcccctctccctgggagttccatcacacatcccgagagggaagcgtgtccctgggcaagaggtggcaggcaaaakchgggtaaaaacttccaagggctgggaagcaaattggggctcaggggtgatgcagaaaatgtgatgttgccaggccatcccaaaaattaaagccatcccatccggggcagaaggaagaagcctgtttcccctgcagacactcctctgccccccaaccagggaatgggaggggcaagaagaagaagcttccccagaggaggcttcccctaacttgggcccttcggtgccatcagcattttccccggatggttgtccctcagctttccctttaaacttcggctccagggtaggactttttctgttcctagttcttttaaatttttccttctgctattttctgcttctctaacagctgacctgtgaattgcttccttggactgaagaataaacattcttcctacaccttcatacatgttagtctcatctaccaaagtcatgatctctgtatctgtaagatgtgcatgctttttcggttctgtttagctgttcaatctgtatgtctgcgagcttcaccttctgttgagtgtcaataactttggcttgaaagctctgtgaagggccttcttcagctctagatccncgggaagtccaccaaactggaaanaggtctccaat

SEQ ID NO: 122102 - DNA, 1563 bp, Homo sapiens
tttcgtcgccggtgctgttgtagttggagtctgttcacgggcctgagcttcgaggccaggctcccgggtgtcgttaatgttcggggccgccgggcgccaacccgatcggagctccagcagcccgggaaccagctggccatttccagtagaacccatggaggagctggttcatgaccttgtctcagcattggaaagagagctccagagcaagcctcgaggtggatttgctgaaccaggagacccattctccgaagtatatcttgccctctgaaacgcccagcaaggaaaaggagagggagaaaacggaggttcgtataatgtgcatcacccgtgggaggactggtcactggcttaaagtgaaggctctgattctagttttagaagaacaaagtcaaaaaaaagaaagttgaaaataatcagacaaggaccaaaaatccaagatgaaggagtagttttagaaagtgaggaaacgaaccagaccaataaggacaaaatggaatgtgaagagcaaaaagtctcagatgagctcatgagtgaaagtgattccagcagtctcagcagcactgatgctggattgtttaccaatgatgagggaagacaaggtgatgatgaacagagtgactggttctacgaaaaggaatcaggtggagcatgtggtatcactggagttgtgccctggtgggaaaaggaagatcctactgagctagacaaaaatgtaccagatcctgtctttgaaagtatcttaactggttcttttccccttatgtcacacccaagcagaagaggttttccaactaagactcagtcggccttcatggaatgtcttcaaagaatattaaaaaatctggagggactccaacttcaatggtacccattcctggcccagtgggtaacaagagaatggttcatttttccccggattctcatcaccatgaccattggtttagccctggggctaggacagagcatgaccagcatcagcttctgagagataatcgagctgaaagaggacacaagaaaaattgttctgtgagaacagccagcaggcaaacaagcatgcatttaggatccttatgcacgggagatatcaaacggagaagaaaagctgcacctttgcctggacctactactgcagattatttctcccccattcccaagccagttatagtaaaagaatgtggaagtttagctgatcatgaaaagctcagagatgcacaggaacaagggggagcggcaccccagggctactacttaaaatgtcaggtgtggaaagtaatgagtctctgcttagtaggaatcaagcagaaagagtcttcatggtccacttatcaggtcctctttttaaaaaccaacgtgaaaagtaatgcagcaaaagcctatgtggtattaaaaccaggaacaaacagcctcgacatcaacaagacacgactacgactgaatacagaagttctcaagctcatagatagtgatagtgatgcttctaggcagcttctcagttcatttccaccttttgctgaagaactcactcaaatagtgagaatggttgagaagcgtattggttga

SEQ ID NO: 122103 - DNA, 1024 bp, Homo sapiens
tcctaactcgcccggtggactagcgccctggaacaatacatttgggtcgtggagtgcgagcacggccggccaatcgccgacgtcagagggccaggaggggcgcggccatttcgccgccaggcccctgctccgtggctggttttctccgcgggcgcctcgggcggaacctggagataatgggcagcacctgggggagccctggctcgggtgcggctcgctctttgcctgacgggcttagtgctctcgctctacgcgctgcacgtgaaggcggcgcgcgcccggggaccgggaattaccgcgcgctcctgcaacgtgggcaccgccaatcaagcttgttccgcgcgtcttctcctccaaggtggggcaaggggtttcgggcttggtggaagcaatgtgcttgggacaggacagcatcctcaatcaatccaacaagcataattcggttgcatcttctaacacaattacagttattggttaaggttgcctgcggaaaacgctgggcctctggtcctgattgctgctgaaactcccctggtgtctcttcgctggttctgtcttacctgggcctgggatcctgttctttcgtgctcctatgaatttctgcaattgtttgtatcacccaccctatgcttatcaacggtgagcctgatgtggctcaagtttccgggaaggtcccaagaacccccagggcaaggcttaagaggcactgagccctcaaccccaagcccaggctgaacctcatcgtgctttgcctttggaatgtgaaccttgcctaaagggggggcatatcttgggtccctagaaggccctaaaatgtggggcttctagattaccccctcctcctgccatacccgcacatgacgaatggaccaaatgtgccaccacgctcgctctttttttacacccaagtgcctctgactctgtccccagttgcgtggtctccaaagctcttttccattgcccagggagggaaggtttttggccattaaagtttcttagatcaagcaaaaaaataaaaaaaaaa

SEQ ID NO: 122104 - DNA, 433 bp, Homo sapiens
agcctgtgtgcgatgcccttggtgctttagtgcaagaagcctaggctcagaagcacagcagcgccatctttccgtttcaggggttgtgatgaaggccaaggaaaaacatttatctttactattttacctacgtataaagttttagttcattgggtgtgcgaaacaccctttttatcacttttaaatttgcactttattttttttcttccatgcttgttctctggacatttggggatgtgagtgttagagctggtgagagaggagtcaggcggccttccctgcctgatcaccgctttccaatttgcccttcagagaacttaagtcaaggagagttgaaattcacaggccagggcacatcttttatttatttcattatgttggccaacagaacttgattgtaaataataataaagaaatctgttatatacttttc

SEQ ID NO: 122105 - DNA, 371 bp, Homo sapiens
ccatggcccttttgccaagcctgtgtgcgatgcccttggtgctttagtgcaagaagcctaggctcagaagcacagcagcgccatctttccgtttcaggggttgtgatgaaggccaaggaaaaacatttatctttactattttacctacgtataaagttttagttcattgggtgtgcgaaacaccctttttatcacttttaaatttgcactttattttttttcttccaatttgcccttcagagaacttaagtcaaggagagttgaaattcacaggccagggcacatcttttatttatttcattatgttggccaacagaacttgattgtaaataataataaagaaatctgttatatacttttcaaacctcgaa

SEQ ID NO: 122106 - DNA, 2398 bp, Homo sapiens
ccgagtctccccttttgggacatcattcttcttctgatgctgccaggagacgctctgtctcttccttcccagtcccccaggacaatgtggatgctcatcctggttctggtaaagaagtgagggtaccagctactgccttgtgtgtcttcgatgcacatgatggggaagtcaacgctgtgcagttcagtccaggttcccggttactggccactggaggcatggaccgcagggttaagctttgggaagtatttggagaaaaatgtgagttcaagggttccctatctggcagtaatgcaggaattacaagcattgaatttgatagtgctggatcttacctcttagcagcttcaaatgattttgcaagccgaatctggactgtggatgattatcgattacggcacacactcacgggacacagtgggaaagtgctgtctgctaagttcctgctggacaatgcgcggattgtctcaggaagtcacgaccggactctcaaactctgggatctacgcagcaaagtctgcataaagacagtgtttgcaggatccagttgcaatgatattgtctgcacagagcaatgtgtaatgagtggacattttgacaagaaaattcgtttctgggacattcgatcagagagcatagttcgagagatggagctgttgggaaagattactgccctggacttaaacccagaaaggactgagctcctgagctgctcccgtgatgacttgctaaaagttattgatctccgaacaaatgctatcaagcagacattcagtgcacctgggttcaagtgcggctctgactggaccagagttgtcttcagccctgatggcagttaccgtggcggcaggctcctgctgaagggctctcctgtatatctgggagtgtgctcacagggaaagtggaaaaggttctttcaaaagcagcacagctcatcccatcaatgcgggtggccgtggtcgccctcctgggctcgcacggtttgtcagtgtggacaaaggatgcaaagctgtgctgtggggcacagtactgacggggctctcagggctgggaggaccccagtgccctcctcacgaagaagcacatgggctcctgcagccctggtcctggcaggtgaatgtgctggggtatagcatggacctcccagagaagctcaaagctaatgttgggcactgtaagctttgcccgtgaatggggattttcttgaaagatttgactgaggtctctcttgggcctggaaagaattaacacctgaaaaaaaacctgaacgctgcgggtcacttagcagaggctcaggtttctttgcctttgggaaaacactactagctctgagccttccataacctcacttgggggagcacagggccccgctgggcctccctcaccaacggcagtgccaaaatcaagcccccacatcaaggtggtgttctctgtgctttctctcgtccttccaaaagtcggttctggcctaacgcatgtcccaacaccttgggttcatttgcccggtgaactcactttaagcattggattaacggaaactcccgaactacagacccctccctgggtgggttgcatgaatgtgtcttcattacttgcttgaaatgtcctcacatctcttccactgttcttcagagctttctggctctcatttcccccacaaaattccgacacatttaaaaatctccggtgtggctttaaaaaatggttttttgtttttttgtttttttgaggtggggagaggatgtgtggaaaattttttccaggggaaatgggttccgctgcagaggtaaggaatgtgttcccgtatcgatctgcagacacccagaaagtgggtgcaacactgcatgcttgggggtgccaagggattcgagacctccaacatacttgtctgaaggtggtgattctggccatggcccctctgccaagcctgtgtgcgatgcccttggtgctttagtgcaagaagcctaggctcagaagcacagcagcgccatctttccgtttcaggggttgtgatgaaggccaaggaaaaacatttatctttactattttacctacgtataaagttttagttcattgggtgtgcgaaacacccttttttatcacttttaaatttgcactttatttttttttcttccatgcttgttctctggacatttggggatgtgagtgttagagctggtgagagaggagtcaggcggccttcccaccgatggtcctggcctccacctgccctctcttccctgcctgatcaccgctttccaatttgcccttcagagaacttaagtcaaggagagttgaaattcacaggccagggcacatcttttatttatttcattatgttggccaacagaacttgattgtaaataataataaagaaatctgttatatacttttcaaa

SEQ ID NO: 122107 - DNA, 924 bp, Homo sapiens
attttacctctgactggagcagtaactatctcttgctgaatcctattgacgacacccaggatgtgctcaccgggccctggccttacccggtggctgcccggcgggaaagctctgactttcaaaaagtaacagatgctggtgaggttgcgaagaaaagggaacacttatacactgttggtgggagtgtaattcaacccattgttgaaggcaatatgacgattcctcaaagagctaaaagtagaactaccattagacccagcaatcccatcactgggtttatcaaagattgggacaggaaagaaggtatggcaaaggctgcctaattgtcccacaatctctcttttctcctttttccacaagaatagacatactggcacttacagacgacgtttcttagactcacttgcagttagatgtccgtgcaaccctgcaacttttgggagcaaaagtgatgtgtgcaatttttgggtcatgccttcaactggaaagaaatgtgcccttccctctcatcccctctttcctaatggcttaaatgcagacgtggtgtgcctgagtgacagtgagaacctgtctcaaaagattctcctcattctagaagtttctgattctgtaatcttaggtaaactctcacataagaacatcatccagcatgactgcatagaagagccccttactttgcttcgtaatacacaacagttcagattcttgtgcattgcttgccacggctgtacatctcagtattccactttcctggtcaaagccagctggacaaggagccagggcttgatccaaagacagccttctgcaggcagtggttacccagaaaagctgttctctgagggtgctggtgatgaaggtgttgatctcctcccactactggcaaaaccagcgagccctgatgagcaactgagacatagtctttaa

SEQ ID NO: 122108 - DNA, 494 bp, Homo sapiens
ttttttaaaaaaacaggacccagtttactactgaagctgcagcgaggttacagaggcgtcttggggctcagtccctgagctccgggacgcccaactgggagtgggcctccactctcctacgtacagacacccccatagggaaacgctcacatgctgtcctgctgggacgctgcaggcctggccgttctgtggccgcatccgcgtccgggtccctgtgtcctggctgggcgagccggggagggggctgattcctgggagcggttcagcagcgagttctgaatgtcttccaggacttcacggaagagctcctctcgggacttcatgccgtccaggtagaccacttccacaccgttggcctccatctcctgcctatacttctggtacatgggccacacgtggccatcgaagaggccggggggatcagggactgtgtagttgcgggtacttctcctccacttgcactcttcatacgggacggtcaggaagtaccggcg

SEQ ID NO: 122109 - DNA, 984 bp, Homo sapiens
atggtcctccacgtcctcctgcctgacgtggacatggcggccgcccggagaatacggccggcgccgccgcgctggccaccgccgccgctccagaagccccgcgcccctgccgccgcgacgcgcctgcgccgacgtcacgcacccgccagtgcccacccccgggaaacgaaccccgccgcctattggcggtgcgcccgccgctcgtgccgcacctcgacgtcccgcccccagctgcttttcggcacccacacccggatgcagcctcaccactggctgaacactcgcatccctgatttcattggctgcagtcgacgctggtcaagcggacggaaaaaggccgacttccggtcccttcatcgccccgcccgcctctcctctgaccaggtgctgaagctgcgagaacgcgggccccagccggagtttgtgctgcccaggtctgaagagaagccagaggtgcaccagtggaaaacaggtctgctctggtctcagaagatcaggaaacaagctccagcccctgcacagatcaagctgatgccacgtggcccaagttccaacctaagtcacgttgctgccgagaccataaaggcgccaggttttctcaatgaagccgggacgcactccggagcgcctgcgtggtcgcaccctacccgggctgccttggaagtcgtccccgccgccctccgcaccggcatgaagctcatcgtgggcatcggagggcccctggtggacttgtacagccgccggtacttcctgaccgtcccgatgaagagtgcaagtggaggagaaggtgcacttggtgtctggggtacccgcaactacacagtccctgatcccccggcctcttcgatggccacgtgtggcccatgtaccagaagtatagcaggagatggaggccaacggtgtggaagtggtctacctggacggatgaagtcccgagaggagctcttccgtgaagtcctggaagacattcagactcgctgctga

SEQ ID NO: 122110 - DNA, 965 bp, Homo sapiens
cgcctccgccccatccccaggggccgcctcccccggggcggcctccaggctgctgacgacctataaaggccgccaggttttctcaatgaagccgggacgcactccggagcgcactgcgtggtcgcaccctacccgggctgccttggaagtcgtccccgccgcccctccgcaccggcatgaagctcatcgggggcatcggaggcatgaccaacggcggcaagaccacgctgaccaacagcctgctcagagccctgcccaactgctgcgtgatccatcaggatgacttcttcaagccccaagaccaaatagcagttggggaagacggcttcaaacagtgggacgtgctggagtctctggacatggaggccatgctggacaccgtgcaggcctggctgagcagcccgcagaagtttgcccgtgcccacggggtcagcgtccagccagaggcctcggacacccacatcctcctcctggaaggcttcctgctctacagctacaatacccgcaactacacagtccctgatccccccggcctcttcgatggccacgtgtggcccatgtaccagaagtataggcaggagatggaggccaacggtgtggaagtggtctacctggacggcatgaagtcccgagaggagctcttccgtgaagtcctggaagacattcagaactcgctgctgaaccgctcccaagaatcagcccccttccccgctcgcccagccaggacacagggcacccggacgtggatgcggccacagaacggccaggactgcagcgtcccagcaggacagcatgtgagcgtttccctatgggggtgtctgtacgtaggagagtggaggccccactcccagttgggcgtcccggagctcagggactgagccccaagacgcctctgtaacctcgctgcagcttcagtagtaaactgggtcctgtttttttaactgttggtgtctaccgtgttctgt

SEQ ID NO: 122111 - DNA, 4785 bp, Homo sapiens
  misc_feature (1)...(4785): n = a,t,c or g
cgagcttgctgtggtttttgctctgggtcctctgggatggcgcctggctgtggccgcgtggtctctcacgcaggggcgccgggcgggggaacgcggccaccctgagtctggtgagtcgactgcggcggcctgtgtccgaagtgtccggggccgtgaaacaagggccaagcgccctggcctcaggcccgcgtttcccacgtttggaaaacggggagcttcgttcgaattttgtttacatcatcgaactatgccagggagttctccagataagcctggttttattttccgtcagtgaaaaaggccttaaccgtataaactgacttnatgnatttnatgcttgccctgcccccgtataaaataacttaaaaagcagcgtgcccggttacagctgtttcccacgtgcggtgctcgtcgggagtgatcaccctaccctacaggtggaaagattggatgcctgaagtgtagactgctgctagctgaataccatctggggaagcataaaggtgaccctgaaggatgtccttggtgaggattttggaaaatttgatcttcacaagagttgcctgggatcatttgaaatttctgggagtctgaggagtactgacataattacctgctgggagtctgtaaatacacatttaaggacagtgaggatgtgaataaatatattaatgcactttggcatttgtattttaagtgattaactgccagaaacagctatttctaaaaagttataagggaggaggggttcttttttgatcagtattcactgctgtcaccataattaatagccttaaaatagcttgtgtttggcccaaagagaaatgtactttcttccagtgactcaaaaatcgtggctagaactagactgatttctagtgacaggtgtgctttactgcactcaatgcgtatttttcctccaactaaattgtacatttaatgttgccatatcttctgcctttgctttgcaggaagcgacaaataatgtatagaggtattcaaaaaatttattgaaagcactgtactaggagctgagaacacgatgatgagcacaacacagttcttccctttggaaacatagataagtggagggaatgtcatcaaaaatgtaaaacttcactatgagatgagttccgtgataggattttcttagggaaacctgagaaagagttgagactaaaggtatgtgtcatatttttcacaaaggcaaactgggggaatgagatatacagaggcttgggctagaaaaaagataccgttagtccacttacttttgagacagttttgggctgctttccctcttcagtgccctgttttaggaactgagtccttactgagggcttgtaagatgggctattatgggaggtgagagtgttacaaaatgaggctgaagaggtaggtaaagaagccagaccacttcaggctccctctggctttattaaagcaagataaatccatggtggaaaatcagatttgcaagaaaaggtagttgaactaggttgcttattgttgtctagacaagagaccagcttggactagtaaaattagtgaaataagatcgtttatagttggatgacagagccaactagacgtggtaatagtggaggtgtccataactgctaggtgtccagcttgcacactgatgagcataatgaccctagattcagctggggagcagcatttaaacagctgaatttttaaattacctttgagaaacccacactggtctttttgcagtagcacattactcagtagtctagactacagaaataaaccttaaggccatgggtataaatgagatctgctggtggtagaggaagagggcctagggtctgaagtttgagaaactccactaattaatggcaaggtaaagcatgataagccagaaaggatggtcagtggtaggagcaaaataggattatattaaagaagcaaaagaatgtcctaaaaattctccctgggattaagtaacacagtgattgatattagtggagtagagggaaagatccatgttagagatagcttaagatagggattagatgaattgagggcaatgactaaagatactgcttgcaagaaaactggctgagaatgagaggaaaatcttagttgcttggcgggagggggtttgtggttgtgaaagatagttttgtttaatcttagtcttaaatttaaaaccaagtagcaaggatctagctgagagaataattgaatacattaatataggaggacagacaaagatcctgaaaaggctgggagaagagcatccaaagcacaggtggagagacaaaaaggttagggctgctggcagctgtggagagaactgtacgtggtaagggggagatataagatgtcctgcataagtattttccctgtagattgcaaagtcatctatggagaggaaaggtccaaaatagtcactggggagagcaggtgaattagatggccaagcagggtggatggatcatttgaggtttggggtgacagatcaactgagatccacttacacttctgaaaacgcaagaacactttagaaattaacaacacttaaagctttttacatcatttgtaaataactggtggaacttaacaccacaaaataaagtattataaagaactttatatgaataaaaatatatgcagtctgaaagtgatgcctcagtccttttgcatctgggcactagttgagaaccagcccagccctgggaagacgtcctcccacttgtactattgcacagcaggctagctgcagttcagaattccagaatgttcatcagatgcatctggtcttggttgtggtggacacagacacaagatagaaatgaatgattgctatcctgttccagaaatgaaaatgtggtatcaagtgaatttttacaaaatacttattcttccagttaaaacaaaaaggtccttcagcacaactgtgctgtagttaaaccatggcctataatcccagcactttgggaggctgaggcaggcggatcacttgaggtcaggagttcgagaccagcctgaccaacatggcaaagccctgtctctactaaaaatacaaaaagaattagccgggtgttgtggtgcacgcctgtaatcccagctgctcggtagcctgagacaggagaatcgcttaacccagtaagtggaggctgcggtgagctgacacggtgccgctgcactccagcctgggcgacagagtgataacatctcaaaaaaaaaaaaaaaagaagcaaaagataatgtattttctcatgctgaagaaatacttgcaggtctgagatttgaattaagatacctatttcacagtttcaaaagtaccagtggcgcacacaaccttcccacccctacccttgacccttcatcaggatcaagtctctgtcttgaggcgggaagcttgtatagtttttattgtttttgctgtgtgttttccagccaggttgtttgtagatgtctgaggtttttcttccatcaggctatctttagacccatttcttctctaaaataaaatacatttgaaaaatgtagaaagattcagaagaaaacagccaaatgaagtattttaattacatcagaaaccaagctgctcttaaatttaagatactgagttaattcaaaagtttcataataccaaaagctattcaataaatgttccctctaaatagctgtgcaaaataaagtttgtatttaaactttaatatacaaagttagtctgacatttacatgcataacgattttattcatgaatattaggcataattcacccaaatcagtgtcattacttttgttaacaattcccaaaccaggctctcaacctcactcttccaaacaggatagtgatggagacttggaggcaatttataatcccctgattatattttcagtagtcaatgaatggaacaatgtcttgtgagcccctatcacttgtctcatacggagaaacagggcagctcattaccagagcctgggcaccacatccactagtttgtaaaacttaggttttacacatctcccatcatcacgggtggaggctctgagaatgacactaactcacaactactacttcttatgcgaacccctcctcctcttacttccaaggatggtctaacattgtcagtgtatcaggctggcaagcatatttccttccccaaatgtatattcccataaataatgggctataccgtcccaatctattttgagatttgtttgagctaaaaataaataaatccctcttaaaatgcagctacctttaatctgttcctatgactggcttaatttgttttactgacattcaaaaagcactgatggaataattattctgcctatcatgggaagcatgaacccatctatttgggatggaagatttctagatagccagaggtgggaagagaacaccagtgaatgtgagaggagaatatagcagaagaattaccagaaaaaaagtgctaggagaggacctgaaataagtactatgttgtaagtttgtctaggattgaatctgtccactctgcagaccttaagaaattaagttgctattcttccccattcttagcagcctttgcgtgaaaaggcaaggtgaggtgtaaggcaggtcactgccagaactctggtggcattgtggtggaaattagaacttaaagttgtaccttaaaaatgtacctttccagcttccactggtcactccagccccttctccgcttggcagccagatgagtggcttccttttagcacttggaataaaacagtaagatccaaacgcttcccacagcctttaagtccctgtgttatctg

SEQ ID NO: 122112 - DNA, 1494 bp, Homo sapiens
  misc_feature (1)...(1494): n = a,t,c or g
tcctcactcggctggtgctgagccccgacgcccctgacaggccacgcacctgatcgccgcgnagctggcacagagaaggtgctgcaggccaggagtcggacacctncacgtggtcaaccctgactggctgtggagctgcctggagcgctgggacaaggtngaggagcagctcttcccgctcagggacgatcacaccaaggcacagagggagaacagccctgcnnncttnnccgaccgggagggtgtnccccccaccgccttgtnccacccgatgccggtncttcccaaggcccagcctggncccgaggttcggatctacgactccaacacggggaagctcatcaggacgggcgcccgggggcccccagcaccctccagctccctacccatccgccaggagccctcttccttcaggtggacgacatccttggagaaggcagcgacgacagcgacagcgagaagaggaggcctgaggagcaggaggaggagccccagccccggaagccagggacccgcagggntcggacgctcggggcacctgcgtccagcgagaggagcgcggcagggtccggggtccagaggccacaagaggaagctgaatgaagaggacgccgccagcgagtccagcagggagtccagnaacgagtacgagggcagcagctccgaggccgacgagatggccaaggcgctggaggcggagctcaacgacctcatgtgagcgcgggcagcgggcagggactgaagcctgaccgacctccagcagcactcggacgtccccggaccagccctcagtctcggtccacgctgctttcttcccaaagcacatgtatatttgcagagctccacatacagaaacacattattttgcagaaataggtgtttttaagaagttttactacaggaatgtctacttttgtaagtgacaggtgttaaaggcccaggtgtgctgtgccaaagagctcagcagaggctcacgtggcccaggctggtgcgcccgctgtctcggtaagggctgggttggtgtgttttccccttgtgtaccagagcacattccttaggggacggctttgggggtcccactagacatggactaggagtttaagcaggacagtgtgcgtgcacgagctccgagcccagcacagacatggactaggagtttaagcaggacagtgtgcgtgcacgagctccgagcccagcacagacatgcctggaacccccgccgcctgctgctccctcctagggaacccatttccggggaacgccgtgactgtcgggcagcctggagcttcctgcagcctcctacgcagggtccacgccacgtggcctgggctgccatcctgccgtcctcccactggcatcctggcaagggggcgttgcttttcctgggcggccttttatgtcttggagacacctgatgtaaagtttctgtaaatctatttcatatctgacccaccaaacagatttctctttaataaaaatcctttttgtaaaaaa

SEQ ID NO: 122113 - DNA, 471 bp, Homo sapiens
  misc_feature (1)...(471): n = a,t,c or g
atgggnaaaaaacgcctcctccgtcagcccagcagaagccttggaccacaagtggcatccgaaagaaaagaagctccaagagtcacatctggcaaaactgtcctccctggagcccagggcagccacccgcattcccgggatgatgttggacgtgcacatgtttctgcaggggctgctgggccccactttatggacctggacgttactgtgagtcaaagaggaagatgcattcacagcaggtctgtggctcgagaaggtttgcaccttggtaaaatgttaaaggaacagcagcaaacggtgactgagggtgaagaggcgaagctgcaccagcagtggaggtcacgggcgagggtgccagaggacgccgccagcgagtccagcagggagtccagcaacgaggatgagggcagcagctccgaggccgacgagatggccaaggcgctggaggcggagctcaacgacctcatgtga

SEQ ID NO: 122114 - DNA, 3599 bp, Homo sapiens
atggaggtgccggccgcgggtcgcgttcctgccgagggcgccccgacggcggctgtggccgaggtgcgctgcccggggcccgcgccgctgcgcctgctggagtggagggtggcggcgggcgcggccgtgcgcatcggctcggtgctggccgtgttcgaggccgccgcctccgcgcagtccgccggggcctctcagtcccgtgtagcctccgggggctgcgtgcgccccgcgcggccggaacgcaggctgaggtcggagcgcgcgggcgtggtgcgggagctgtgcgcgcagccgggccaggtggtcgccccaggagcggttctggtgaggttggaaggatgcagccacccggttgtcatgaaaggcctgtgtgctgaatgtggccaagacctcacccagttgcagagtaagaacgggaagcagcaggtgccgctgtccacggcgaccgtgtccatggtgcacagcgtgccggagttgatggtgagctccgagcaagctgaacagctgggaagagaagaccagcagcgactgcaccgaaaccggaagctggtgctcatggtggacttggaccagacgttgattcacacaaccgagcagcactgtcagcagatgtcgaataaaggcatctttcacttccagctgggccggggtgagcccatgctgcacacgcgcctgcgtccacactgcaaggacttcctggagaagatcgccaagctgtacgagctgcacgtcttcaccttcggcagccggctgtacgcacacaccatcgcaggctttttagaccccgagaagaagcttttttctcaccgaatattatcaagggatgaatgtattgacccattttctaaaacgggaaaccttagaaatctctttccttgtggagactccatggtttgcattattgatgatcgaaaagatgtctggaagtttgcccccaatctgataactgtgaagaaatatgtatacttccagggcacgggtgatatgaatgcgccccctgggtcccgagaatctcagacgagaaagaaagtaaatcattctcgaggcactgaggtctcagagccatctccgcccgtgagagaccctgagggggtaacgcaggcccctggagtggagcccagcaatggcctggagaagcctgcacgggagctgaacggcagcgaggccgccaccccgcgggactcaccccgccccgggaagccagacgagagggacatctggccccctgcccaggcccccaccagcagccaagagctggcaggcgctcctgagccccagggatcctgtgcgcagggtggccgggtggcaccgggacagcggcctgcccagggtgccacgggcactgacctggactttgacttatccagcgacagcgagagcagcagtgagtccgagggcacgaagtcctcctcctccgcctctgatggcgaaagcgaggggaaaagaggccggcagaagccgaaggctgccccagagggagccggggcgctggcacagggcagttccctggagccggggcggcctgcagcaccgagtctccccggagaggccgagcctggcgcgcatgccccggacaaggagcctgagctgggtgggcaggaggagggcgagcgggatggcctctgcggcctgggcaacggctgtgccgacaggaaggaggcggagaccgagtcacagaacagcgagctgtcgggggtcactgcgggtgagtccctggaccagagcatggaggaggaggaggaggaggacacggatgaggatgaccacctcatctacctggaggagatcctggtccgtgtacacactgactactatgccaagtatgaccgctacctcaacaaggagatcgaggaggcgccggacatccgcaagatcgtgccggagctcaagagcaaggtgctggcagacgtggccataattttcagtgggctacacccgacaaacttcccgatagagaagacgcgggagcattaccacgccacggcgctgggagcgaagatcctcactcggctggtgctgagccccgacgcccctgacagggccacgcacctgatcgccgcgcgagctggcacagagaaggtgctgcaggcacaggagtgcggacacctgcacgtggtcaaccctgactggctgtggagctgcctggagcgctgggacaaggtggaggagcagctcttcccgctcagggacgatcacaccaaggcacagagggagaacagccctgcggcctttcccgaccgggagggtgtgccccccaccgccttgttccacccgatgccggttcttcccaaggcccagcctggccccgaggttcggatctacgactccaacacggggaagctcatcaggacgggcgcccgggggcccccagcaccctccagctccctacccatccgccaggagccctcttccttcagagcggttccgccaccccagccgcagatgtttggtgaagagctgcctgacgctcaggacggagagcagcctggcccttctagaagaaagcgacagcccagtatgtctgagacaatgccgctgtacactctttgtaaggaggatttagagagtatggacaaagaggtggacgacatccttggagaaggcagcgacgacagcgacagcgagaagaggaggcctgaggagcaggaggaggagccccagccccggaagccagggacccgcaggggagcggacgctcggggcacctgcgtccagcgagaggagcgcggcagggggccgggggcccagaggccacaagaggaagctgaatgaagaggacgccgccagcgagtccagcagggagtccagcaacgaggacgagggcagcagctccgaggccgacgagatggccaaggcgctggaggcggagctcaacgacctcatgtgagcgcgggcagcgggcagggactgaagcctgaccgacctccagcagcactcggacgtccccggaccagccctcagtctcggtccacgctgctttcttcccaaaggacatgtatatttgcagagctccacatacagaaacacattattttgcagaaataggtgtttttaagaagttttactacaggaatgtctacttttgtaagtgacaggtgttaaaggcccaggtgtgctgtgccaaagagctcagcagaggctcacgtggcccagggttggtgcgcccgctgtcttcggtaaggggcgggttggtgtgttttccccttgtgtaccagagcacattccttaggggacggctttccccctcccacgagacatggactaggagtttaagcaggacagtgtgcgtgcacgagctccgagcccagcacagacatgcctggaacccccgccgcctgctgctccctcctagggaacccatttccggggaacgccgtgactgtcgggcagcctggagcttcctgcagcctcctacgcagggtcacgccacgtggcctgggctgccatcctgccgtcctcccactggcatcctggcaagggggcgttgcttttcctgggcggccttttatgtcttggagacacctgatgtaaagtttctgtaaatctatttcatatctgacccaccaaacagatttctctttaataaaaatcctttttgt

SEQ ID NO: 122115 - DNA, 680 bp, Homo sapiens
ggaggcagccctgaccgacttaagggttcaggcgcggtcccagcccgggacgatgtccatcggcacggagaaccgtggctctgggctgtccgcagtggccgtccaggaggtcatctcagatgtggtggaagtcaggctggccaacaggcccggaggtctggaggtgctgctgaaccaggaggtgctgagcttcaccgagcagagctggatggacctgaaaggaatgttcctgtcggtggctgccggggacagggtctgcatcatgctggcatcatgggccgttctgtttgtcagtttgcttggcccgttcctgagtgtgtccgtcctgctgcctgagaagttcctcacccacacccacggcctcctcgggacactcaacaacgaccccaccgacgacttcaccctgcacagcgggcgcgtcctgcccccaggcaccagtccccaggagctgttcctgtttggggccaactggaccgtgcacaatgcgtcctccctgctcacctacgattcctggttcctggtccacaacttcctgtaccaacccaagcacgaccccaccttcgagcccctcttccccagtgagaccaccctcaaccccagcctggcacaagaggcagccaaactatgtggggacgatcatttctgcaactttgatgtggcagccactgggagcctgagca

SEQ ID NO: 122116 - DNA, 3174 bp, Homo sapiens
agggagtgagcttgtctggccgcctcgcctcggagccactgcactgctggctgcagacacaggctgcaccatgaaggacaggccctgcacatggggcagccagtccagtacccgccgggccaggccctcagcatcctctcctccagatgcccaagagagctgctccatgcgctgtggcgccctggacgggccatgttcctgccacccgacgtgctctggccttggcacctgctgcttggatttccgggacttctgcctggagatattgccctactcaggatccatgatgggggcccagaccatcgagaggctcagcctgcaatgacccagcccctcccaccaccaccacgcccacaggtttaaggacagcatccagaccctcggccatgtggactcctccgggcaagtgcactgtgtgtcacctctgctctatgagagcgaagcctcagggcctcctccctgcttccctgggcccaggccctcactcacccctcacctcccctgcccagtgcaccccaacaaagtgtcaatgatggagaagagcgagttggtgaacgagacgcgttggcaatactacggcaccgccaacacctcaggcaacctcagcctgtaggtggcaaggcctggggccaggcctcgaaggaaccccagggctaaccaggcatcctctccctcaggaatgccctactcacaggagtggactgcaaagtggtcgtacctgtaccccctggccacacacatccccaactccggctctttcactttcaccccaaaacctgctcggggtggggagagtggggcgaccatggggtggtgtgggctggcccagctccagcatcatcacctccacagggacgtgcaggcgctctggaccaacgaccacgcactggcctggcacctgagcgatgacttccgagaggaccctgtggcctgggcacgaactcagtgccaggcctgggaggagctggaggatcagctgcccaacagggttggcctcagggaggggatgacagaacccgaggccactgggtgacagccacctgctgctctgcagacggactacggctgtgccggtatggggattggggtcaggggtgggctcccaacagtggcctggccctgactcactggctcctgcagcctccggtacggctcaggtcagcagtgctgctacacagcggacgggacgcagctcctgacagctgactccagcggcggcagcactcccgaccgcggccatgactggggcgcacccccgttccgcacgccaccccgagtgcccagcatgtcccactggctctacgatgtcctcagcttctattactgctgcctctgggcagccccagaccctgggaaagatcgggctgggctggggtgcacccccacgtgaccctccactctcaccctagcctccgccttcggagacccacactttgtgaccttcgacggcaccaacttcacattcaatgggcgcggagagtacgttggcatggggtagaaccaaggtgggaggctggagccaagtggctcccgttctgctcccaccaccgcaggcacggagacccgtggcactgggctgaccgcagtggccgtccaggagggcaactcagatgtggtggaagtcaggctggccaacaggaccggacctgaaaggtgagcagtccagccacgcgaggctgcgggctgccctcacctcctccccattcctgcagggagactgaggggaagccctgggccttcatgcctctcccagtcctggctagaggcctgggtggtccgacctcaggccttcacacccaccgaggtgcccccgtcgtacccacctggtcaaaagccgaggcatggcaggggtggcggagggtcatggtcagcagaattggccccgggaacgccctcccttcccctgcaggtgccctcacccacagcccctgggtgccgaccaccctgtcctggggctgcgggaggggacaagatgctcacagcgggtgaccctaatgcatcccccttgagcccaggaatgttcctgtcggtggctgccggggacagggtctccatcatgctggcatcaggggccggcctggaggtcagcgtgcagggcccgttcctgagtgtgtccgtcctgctgcctgagaagttcctcacccacacccacggcctcctcgggacactcaacaacgaccccaccgacgacttccatggcacgggcagggcttggggaccaaagggagccatgcccagccaggccccggtcatgtatcttccagggaccgtgcacaatgcgtcctccctgctcacctacgattcctggttcctggtccacaacttcctgtaccaacccaagcacgaccccaccttcgagcccctcttccccagtgagaccaccctcaaccccagcctggcacaagaggcagccaaactatgtggggacgatcatttctgcaactttgatgtggcagccactgggagcccccggggtggccagatgtgtgtatgcatggcagctcaggcctgttgtctgcactctgtccccatcccagtggtgtcctgtggctggctggccccacctcccaacggacaaaaggagggcaacaggtacctggcgggttccaccatctacttccactgtgacaacggctacagcctgacacctgcctgcacctgtccccactcaccaccccagagagccccctcactgacactcgctccctcaccaggacgcagctacgcggtgctgttgggcatcatctcttagcccaggaatgtccagaatctgggcacagagcccaggcctcaggccacggtggcccacctgagcagctctttgtcggcgcttcctgtggggcctggcatggaggcacagacctgacagtacaggcacagctggggagcaagggaccccttcttctgccaagctgcttccttctgcaagccccagggtggccgagtgcctgctgtgggccagacctctgctaggcccatcaggacacccctgtcctcagggtccaatgctgccaaggaggaggcgggggggtcggtgcagcgcactgtaggagtgggaagtcaaggaggcatcgtggaggagtgcggcttcccacaggcaccccttcaggctttcaccagctccctttgttgcaaggatgtgaggatgactgactttggaagtcatgccaacca

SEQ ID NO: 122117 - DNA, 2130 bp, Homo sapiens
tcatcttatggcccctgtgccacaggcctccctttcttcaagtgacaagggagccagcccccacacccgtatgctggttttagcctgtgcctccatccatatgggccttgtttgcctgagacactctttcccctcactgcttccagctctccactctgctccctcagaagccttgccagagggtcctggacctatggtgcttatgcagctattcgtcctcaggccttcttcagcttcctgtgtatctctgagtgtttccaaccagctgccttggcatttaccagctgcatggacattacatggctggatggtaataacagcagaaaaaaaccccttaagacactcaccccacttgcagcccacaagcacagggcaggcagcatgtcttgttcggtagtcaccttccccgctccgcaagaggttgtaccagaacacagctgtacccttcttaggccaaattgcagcccccagatcagggaagacggtggcaccaccagcttctacatcactcatgtagtttaagaaagtagccacacgattccccgtccctaaatgcttgaaagtatctcgctcatcattcctagagaagtcgaagtgcggttcatactgtcctcccactccataatttgcaacctgtaacaattctgcagtctctactgttaaccctgtgatatgctgacatccgacgatttactcgggccacaacagggtcatcatcttcctctagccaggagcttttggaaacccggtagctggcgacagtgaggactcctgtctgggaatcacgaaacggtggctcgtgcacgtttaggttttgcgatctcctctgatcctctcgatttcctcatcagacatgacatcgtagtacctgacgatgtgcgggctgtccccactcgtcctccttctttgaaagggggcaatgagcagctgtggggccctgttgccatggtggtacctacagaaaagcctcttctgtctaacgggtgtcagtttgacaccctccccacgacagaggctctcgtaaacatccctctcaggcaggtagtccacaggcctctcatagatgccttctggggttgctagctcagcttctgtctgatttgttaacgttttttctctctcttcctccaattaacttgctcaaagtaccgcacgattccctccaggctcggttcgtggcttgggtcaagggagagcaggcggcgggtgagctccagggcacggtgcagatcacccaactggaagacagcatagctgaggtagtccagcacctgtgacttggttgtggtggcctcctccccggcatcaagctgctttagcacctgctccatccacaacaccgtatgataatagtccccttcattgtaggccgagcggcccatcccaaagcagtcatccacactcagcattgcctggtacttggttcctggaagttcccctctggaaattgtgcctgggtccagcctgtatgtgtcctgaagtctcatcagggctttggcagctcctatctcgtcctcatcagtggggaagaactgccgctgcacagagaggttggcgataaaacctgcagctgagtcctgcaggacaaggtcctccagcgcaggccagtctgtgtttagccgcttcaccagtttgtaggcattcacagggtgagccaggtagccctcagcatcagcagctgacttgctagtcaaggcttccattttgttggcccagctcttaatcttggaaagcttggcttcctccacaaggatgtactctttcagagactgcaccagctctttctctgcataaatcaggtcagtcatgtgcccaatagaggtgaagaattcggcctgcacacagctcaggacaccaaaccaggccatcagcaatgcagacacccagagtttcatggtcacagagggaagtgtcacactgctctgggccaggaccttcccgctcttccaatccgcctgtcccactgggttagcaactgcttgcggtttctggcacacagaagggtcccgtttgttgaattagttaacgaattatcacgggtctccgcagctgccaaggaaaaacaacgctggttccacaaggatgtctggacactcgcagctcccggcgtttccagaacctcccgcggcg

SEQ ID NO: 122118 - DNA, 2832 bp, Homo sapiens
ctacagcccggcgaggggatcgggtcgtggcgacctctccagacgcccaggggctggcaggagggcgggccaaggcccgcaggtgggggcgccaaagccaggcggcgcggagtacgtgcggtgggctgcgggcggcatgaagggcgcgggcggcagctccggctccggctccggctccggctcccgcgaggccgggtagcctggcgttcccaggggtcgcagaggatggcgaaccccggcggagccaccgggctggggaccaggacgcaggcaggcgtgtggagcgtgaggtggggacgtgcggcggctcaagtgggcggagccccggcagcggccggaggcggagtcgcaagggaggaggcgccgagctgaccgggcgacgccgcgggaggttctggaacgccgggagctgcgagtgtccaggtgagcgccccgcccgctcagccgcagatcaaccttagcgctggggcgcgggctggggtcgccaggcggtgcgtctgcccgcgcggggctgagagttaggggccggggccggatccggggccggggtcgcgccgctagccgccagcagcgcagtccgggccgccaccctgcccctccgccctgtttctgcacccgtctgggttcttgtgccgccgcccgcagccttcccgagctcagggtggtgaggtcagcggcgcccttcgtgcagtccctcggctgtcgggcggggctgggaacttggccgctcttccctgtcagctcccgggaagtggcggcctgaccccgggctgccggcctcccaagggctgggagtcctaggtcttgtccgggcaggtccagcttggagcccattagatgggccattggatcagaaagtcttttctccccagacatccttgtggaaccagcgttgtttttccttggcagctgcgggacccgtgataattcgttaactaattcaacaaacgggacccttttagtcaccggtttagactggccccagctgatctcagtcatcccttgagtgccttctgcctgtttggcttctgactggagcgtgccggggctggcactctgagggccaggtgtagtggagatcctcaggcctgggtacttgtaggagccttggtccttggcctgtctaggtggtccttcagtgtcaacctcatcttctccctgagcaccttcccaggtgagcacagccatttccatcacctggcctctgttggttttccagttacgaccaacgtacctggttagatgtctgtgctttccagacaccccgtagacagaagaggcttttcgtaggtaccaccatggcaacagggccccacagctgctcattgcccccttaaagaggaggacgagtgggacagcccgcacatcgtcaggtactacgatgcatgtagaatcttttcctggtttatcatctgacttgtaaggatcccaagggagcgaaaactgtgccatctgttttgcttcttgaggctgtgggaacccagtgtgaggtggtgcagcaggaggtgtttggatgggtttcttggcagaggagcccactgaggttcggaaggaggtggaacttgactcaattgagagaagtacataaggcggaggctcaggctggtggcacagtctcttgcctctgttttatccataggttgtagggtttatctttcacatgaggagcagtttcctctcccctctgctgagagccagctctggggtctgacctggtagcccagcttctcccatccagccatgtaatgtccatgcgctggtaaatgccaaggcagctggttggaaacactcagagatacacaggagctgaagaaggcctgaggacgaatagctgcataagcaccataggtccagaccctctggcaaggcttcagaaacaaacctactagcatcttgatctcggactttccagttcccataaccatgagaaataaatgtttttaattcaatgtatggtattttattatagcagctctacctaagacagtacatgtatagtgtctatttgaacattactgataatgttgaacaacttttcatgtttattagttattaggtttcttcaagtgttcttattcatacaaattttaaaatatgtacacaagttctttgttatatattttgcaaatatcttctgtggcttgtcttttcactattttagttctgtcttttgataaacaggagcttttaatttttatgtcaaatctatcaagctttttctttttgatttatgttttttatgtcttatttgagaaatccttctataccccaagatcatgaggatgtttcctgtgttctcttctgaaagctatatagtctttgtcatttaggtttatctttatacgtggtatgaagtgtaaagttctacttttaattttttgcatattttattaggataggatgggctttttctgtagtaataatccctaaatctcaggggcttaatatataaaattgtctcatgcaaaaaaccactgggtctagggcaattgctatctactgccgtctaatctccctctagtggcttccattggtagaccctaacaggaagccagctgataagggaatctgggaaatgtagtttacagagtggcagctacagtagaacagtagagactacaaggatgagcttgcagctgagaatagaaacgtgactggcacactaggtggtttgtttgtaggttttttcttttcctgtttgagacttttttggattcttgaatttgtacaatggtatccttaatcaattgtggaaaattaaatgattttttctttcagcattgtctgtttcttctgtaactgattaaatgtaagttggatcatatcatgaaa

SEQ ID NO: 122119 - DNA, 367 bp, Homo sapiens
ggcacgaggctgagatctccagtcctgcagtggaaagattgatcagttcggtgttgcggacatgtgatttggaagaggtaaggggcacagccgcaggcatcatgggggcgaggtggggagcagagctgcagagccctccagccccaccctttcagtttcagacctgtctggtgcggcactgcaagcatgcgtttggctgtgcgctggtgcacacctctggctggaaagtggtctattccggggacaccatgccctgcgaggctctggtccggatggggaaagatgccaccctcctgatacatgaagccaccctggaagatggtttggaagaggaagcagtggataagacacacagcacaacgtccca

SEQ ID NO: 122120 - DNA, 1402 bp, Homo sapiens
aacgccagcttggtcgagggagattttggctgaagagctgtgtactcctccagatcctggtgctgcttttgtggtggtagaatgtccagatgaaagcttcattcaacccatctgtgagaatgccacctttcagaggtaccaaggaaaggcagatgcccccgtggccttggtggttcacatggccccagcatctgtgcttgtggacagcaggtaccagcagtggatggagaggtttgggcctgacacccagcacttggtcctgaatgagaactgtgcctcagttcacaaccttcgcagccacaagattcaaacccagctcaacctcatccacccggacatcttccccctgctcaccagtttccgctgtaagaaggagggccccaccctcagtgtgcccatggttcagggtgaatgcctcctcaagtaccagctccgttccaggagggagtgccagagggatgccattattacttgcaatcctgaggaattcatagttgaggcgctgcagcttcccaacttccagcagagcgttgcaggagtacaggaggagtgcgcaggacggcccagccccagcagagaaaagaagtcagtacccagaaatcatcttccttggaacagggtctgccatcccgatgaagattcgaaaatgtcagtgccacacttgtcaaacataagccccgacacgtctctgctactggactgtggtgagggcacatttgggcagctgtgccgtcattacggagaccaggtggacagggtcctgggcaccctggctgctgtgtttgtgtcccacctgcacgcagatcaccacacgggcttgccaagtatcttgctgcagagagaacgcgccttggcatctttgggaaagccgcttcaccctttgctggtggttgcccccaaccagctcaaagcctggctccagcagtaccacaaccagtgccaggaggtcctgcaccacatcagtatgattcctgccaaattgccttcaggaaggtggctgagatctccagtcctgcagtggaaagattgattcagttcgctgttgcgaacatgtgatttgggaagagtttcaaacctgtttggtgcggcattgcaagcatgcgtttggctgtgcgctggtgcacacctctggcttggaaagtggtctattccggggacaccatgccctgcgaggctctggtccggatggggaaagatgccacacggaagcaagcagatgaactaatttcatttcaaggcagtttttaaagaagtcatggaaacagacggcggcacctttcctctaatccagcaaaatgattccctgcacaccagagacaagcagagtaacaggatcagtgggtctaagtgtccgagacttaacgaaaatagtatttcagctgcaataaagattgagtttgca

SEQ ID NO: 122121 - DNA, 1450 bp, Homo sapiens
  misc_feature (1)...(1450): n = a,t,c or g
ccccaccctcagtgtgcccatggttcagggtgaatgcctcctcaagtaccagctccgtcccaggagggagtggcagagggatgccattattacttgcaatcctgaggaattcatagttgaggcgctgcagcttcccaacttccagcagtaccacaaccagtgccaggaggtcctgcaccacatcagtatgattcctgccaaatgccttcaggaaggggctgagatctccagtcctgcagtggaaagattgatcagttcgctgttggacaacatgtgatttggaagagtttcagacctgtctggtgcggcactgcaagcatgcgtttggctgtgcgctggtgcacacctctggctggaaagtggtctattccggggacaccatgccctgcgaggcttctggtccggatggggaaagatgccaccctcctgatacatgaagccaccctgggaagatggttttnggaagagggaagcagttggaaaagacacacagcacaacgtcccaaggccattcagcgtgggggatgcggatgaacgcggagtttcattatggttgaaccactttcaggccaggcgctattgccaaggtccccctcttcagccccaacttcagcgagaaagtgggagttgcctttgaccacatgaaggtctgctttggagactttccaacaatgcccaagctgattcccccactgaaagccctgtttgctggcgacatcgaggagatgggaggagcgcagggagaagcgggagctgcgggcaggtgcggggcggccctcctgttccaggggagctggcaggcggcctttggaggatggggagcctcagcagaagcgggcccacacagaggagccacaggccaagaaggtcagagcccagtgaagatctgggagaccctggaactcagaaggctgtgtgtcctttctgcccccacgcacgcacccccgtatctgcccctcccttgctgggtagaaagctgaagagcacggtcccccccaggaggcagcctcaggataggtggtatggaagctgtgccgaggccttggggtccccacataagcactagtctatagatgccctcttaggaactggtgccctggcacagctgcggcccaggaggctgcccacacggaagcaagccagatgaactaatttcatttccaaggcagtttttaaagaaagtcatggaaacagacggcggcacctttcctctaatccagcaaaatgattccctgcacaccagagacaagcagaggtaacaggatcaagtgggtctaaagtgtccgagacttaacgaaaatagtatttcagtctgcaataaagattgagtttgcaaaaatacaaaggacaaggggggccgctttaaaggaatccccgaggggcccagacttccgcctgtatgcaagggcatacttgtctccgtaaagggatgcttattaaatcctacctt

SEQ ID NO: 122122 - DNA, 699 bp, Homo sapiens
tcacctgggagctgggagacacggctctgggtatggagcttttacaggagctgcaaacacagcctgtgcccctgtttggttggggaattccttgttttcaattccccgatgcagagtggttctgctggggaaccaccgcgcctgcagttcgtgcacctcttcccggagctgcgccagggaattacagacgaactggaaggggccgagaagggccttggccaccacctttagctccaagccttttcgctttttcagatttgggatcctccccggggaggacctcctggcgccccccggcagtttcccgccgcctagggccgacttttccacctcccgctcccgggcgggggaggccccgcagggccgcttagacgggcccgagcgcacagctccacgcagcctctccacactctccccagcgcctgcagcacccgcagtgcgcacagctccgccagtagcttccccgcgcgccgcccctgcaccgcttcgggccataaccttgctggcgactaagtctgaagaacttcccgtggtttcattcttttcttcgcgtttagtcttagctaagaggccaaagcggctggcacagatgcactggggccactgacattttccatgtcctctgtcacgggccacatgctggagcccacaccgcttcactttccatctgtttgatgatggatcaaattgaactcccat

SEQ ID NO: 122123 - DNA, 435 bp, Homo sapiens
caattcctcgacgccgagagtggttctgctggagaaccgccgcgcctgcagttcctgcaccttttcccggaggtgcgccagggaattacggacgaactggaaggggccgagaagaaaggtcttggccaccacctctagctccaagccttttcgctctttcagactttggatcctccccggggaggacctccaggcgccccttggcagtttcccgccgcctaggaccgacttttccacctcctcctctacctccggctcccgggcgagggaggccccgcgccgccccttagactggctgcggccggaagattgcagccgctttgagcttactccttgttttctcataatcaaggagtatggtggagctgggtcaatttcaggcacagcccagccgagtcaggcgaggtccagagagacctgcgcacgcgtgggtcg

SEQ ID NO: 122124 - DNA, 565 bp, Homo sapiens
tcacctgggagctgggagacacggctctgggtatggagcttttacaggagctgcaaacacagcctgtgcccctgtttggttggggaattccttgttttcaattccccgatgcagagtggttctgctggggaaccaccgcgcctgcagttcgtgcacctcttcccggagctgcgccagggaattacagacgaactggaaggggccgagaagggccttggccaccacctttagctccaagccttttcgctttttcagatttgggatcctccccggggaggacctcctggcgccccccggcagtttcccgccgcctagggccgacttttccacctcccgctcccgggcgggggaggccccgcagggccgcttagacgggcccgagcgcacagctccacgcagcctctccacactctccccagcgcctgcagcacccgcagtgcgcacagctccgccagtagcttccccgcgcgccgcccctgcaccgcttcgggccataaccttgctggcgactaagtctgaagaacttcccgtggtttcattcttttcttcgcgtttagtcttagct

SEQ ID NO: 122125 - DNA, 1670 bp, Homo sapiens
tcaggaaaagttgtaaatttgaagactgtctggcttttgttgttgttgctgctgacattgctggaaggccacgagcaatgttctttttggctttctacatccaagggaaagctgacctgacatgattaaatccaactctccattttctccatgtttatacttgggaatctgattatagcaatgtagaattgccacaaagatggcgatgctgagagtggttctgctggggaaccaccgcgcctgcagttcgtgcacctcttcccggagctgcgccagggaattacggacgaactggaaggggtcgagaagggtcttggccaccacctttagctccaagccttttcgctttttcagatttgggatcctccccggggaggacctcctggcgccccctggcagtttcccgccgcctagggccgacttttccacctccagctcccgggcgggggaggccccgtacggccgcttagacgggctggggcgggaagattgcagcggctttgggtttactccttgtttcttcataatccctagtggagctgggtcaatttcaggcacagcccatccgagtcgggcgaggtccagaaaggcctgactcgcctggcagcctcaacggacttgtccccgcagccgttgactagccgttgacgagcggacctaccggtcgtcatggcgactgtgaaatgtagggtggagcgcatgcgttcgaagccattcgcgcgggcagtccctgcgtgtccccctgcgtgtccccccacgtgctccccagcgcgcgcagcacccccgcctctgcgcttccccgagcgtgcagcttccggtgagggcagccccacgcacagcccccaacaccctccccagcgcctgcaagcctttggtgcgcgcagtccccaagcccacatgcgcagttctcaccttgcgcgcagccccacgtacagcccccaacacgctcccagccccactggcgcagaacccatcaccgcttgcccttcacgcgcttcattgggagtgcagctcccaccccgagcgcgcagctccacgcagcctctccacactctccccagcgcttgcagcaccccccagtgcgcacagctctgccagtagcttcccggcgcgccgcccctgcaccgcttcgggccataaccttgctggcgactaagtctgaagaacttcctgtggtttcattcttttcttcaggttacacgttaattaacgaggtattaaaggggaagatctcagctgaaagaaatgactgtaggaagtgtgtcagggaagccaacggaaccgctggcccgccggtggtgcgcccggcattaggaaagtctctacgatcgctgaggtatcgggcagtcagtgcccgttgccaacgcggagggaacgggcggagactgcgggcaacacgtggcagagccggccgtttactgaatcttagagcaaaatgcttttccaatgaggttcctcagaagtcatcggccctaggagcggtgtgctcaagcgctttcagcaccagccaggaccaactaagaggggagcgcttacctcccagtcaccgcgcagccctacaagaggccaaagcggctggcacagatgcactggggccactgacattttccatgtcctctgtcacgggccacatgctggagcccacaccgcttcacttgccatctgtttga

SEQ ID NO: 122126 - DNA, 314 bp, Homo sapiens
tttccagtttgtccaagagcctttattggaaaaatgtccaacaagtgatatcactagcagctgaaggggctgccaggtgagagggggagcacctgaggctccatggaagacattggagtagtgcagtgcagcatctgcctctagggtcagacaattccttttatttgctggggtaagaggagtagggtacaactagtgactctcccctggaccggggaatggaaggagatatcccatctgatatccactccccaggtccaggggcacagactctgaacagacctaccttctggctctgctcacagtggaaagag

SEQ ID NO: 122127 - DNA, 564 bp, Homo sapiens
gtggaggaactcaccgcgaggaccggcggaggagccccgcctggatgtcaagcggatgccaagcggatgccacagttccccccccagcggactccgtggggacatggcttcgctggtgcccctttccccatatctaagccccacggtcctcctgctggtcagctgtgacctgggcttcgtgcgagcagaccggcctccctctcctgtgaatgtgacggtcactcacctcagagccaactcggccactgtgtcctgggacgtcccagaaggcaacatcgtcattggctactccatttcccagcaagtatgaatcacccttctgctcccccaacctgtgtccttggatttcggcacatttcttcacttaagtgggggggatctggaagctggcgtatcctggctcaggctgcccttttcacgctactcccccggagtgcttggatgttgaagagtctctggttgagccttgtggcctggcactggggtgaggctgtcctcctctcccctcatctccctgcagcggcagaatggccccgggcagcgtgtgattcgggaggtgaacct

SEQ ID NO: 122128 - DNA, 1424 bp, Homo sapiens
ggcagccaccgagtcgggcgatgggccgccctctgcgaccgagcagccccccgaggcctgaccaaccgcgagaccggcggaggagccccgcctggatgtcaagcggatgccaagcggatgccacagttcccctcccagcggactccgaggggacatggcttcgctggtgcccctttccccatatctaagccccacggtcctcctgctggtcagctgtgacctgggcttcgtgcgagcagaccggcctccctctcctgtgaatgtgacggtcactcacctcagagccaactcggccactgtgtcctgggacgtcccagaaggcaacatcgtcattggctactccatttcccagcaacggcagaatggccccgggcagcgtgtgattcgggaggtgaacaccaccacccgggcctgtgccctctggggcctggctgaagacagtgactacacagtgcaggtcaggagcatcggccttcggttatgagagtcccccagggccccgggtgcacttccgaactctcaagggttctgaccggctaccttcaaacagttcaagcccaggtgacatcacagtggaaggtctggatggagagcggccactgcagactggggaagtggtcatcattgtggtggtgttgctcatgtgggctgctgtaattgggctgttctgccgtcagtatgacatcatcaaggacaatgactccaacaacaatcccaaggagaagggaaaggggccggaacagagtcctcagggaaggccagtggggacaagacaaaaaaagtcaccatctatcaacaccatcgacgtttgagtgaagaaacacacccagaaaagagatgcactaacaactggggatagggatggggtcagggggagcccaagatggtgatctgcccgagactcccagagggtaatgccactcccacaatctcaggcctggtacccatcctctttcccactgtgaaccagagcccagaaaggtaggtctgttcaaaagtctaatgccccctggaaccctggggagtggaatatgagatggggtatctacttacatatccgcacagggcacaggaggagagacgctaggaggaccctactcccattaggtcccaaatgggggccccatttcacctgtattcaggactttggaggcatccccagctgccctggtatcttgcctctgggcctcagaagaagggtgtttctgtgggtactcctcttaccccatgcaaataaaaggaattgtctgaccctagacggcatgatgctgcacttgcacgtacctccaatgtcttccatggagcctcaggtgctccccctctcacctggcatgccccttcagctgctagtgatatcacttgttggacatttttccaataaaggttcttggacaaactggaaaaaaaaaaaaaaaaaaaagatt

SEQ ID NO: 122129 - DNA, 2535 bp, Homo sapiens
gcggccgccggcggccagggctcggcggtggctgccgaagccgagcccggcaaggaggagccgccggcccgctcatcgctgttccaggagaaggcgaacctgtaccccccaagcaacacgcccggggatgcgctgagccccggcggcggcctgcggcccaacgggcagacgaagcccctgccggcgctgaagctggcgctcgagtacatcgtgccgtgcatgaacaagcacggcatctgtgtggtggacgacttcctcggcaaggagaccggacagcagatcggcgacgaggtgcgcgccctgcacgacaccgggaagttcacggacgggcagctggtcagccagaagagtgactcgtccaaggacatccgaggcgataagatcacctggatcgagggcaaggagcccggctgcgaaaccattgggctgctcatgagcagcatggacgacctgatacgccactgtaacgggaagctgggcagctacaaaatcaatggccggacgaaagccatggttgcttgttatccgggcaatggaacgggttatgtacgtcatgttgataatccaaatggagatggaagatgtgtgacatgtatatattatcttaataaagactgggatgccaaggtaagtggaggtatacttcgaatttttccagaaggcaaagcccagtttgctgacattgaacccaaatttgatagactgctgtttttctggtctgaccgtcgcaaccctcatgaagtacaaccagcatatgctacaaggtacgcaataactgtttggtattttgatgcagatgagagagcacgagctaaagtaaaatatctaacaggtgaaaaaggtgtgagggttgaactcaataaaccttcagattcggtcggtaaagacgtcttctagagcctttgatccagcaataccccacttcacctacaataattgttgacgctatttgttaatttgtgaatacgaataaatgggataaagaaaaatagacaaccagttcgcattttagtaaggaaacagaaacaactttttgtgttgcatcaaacagaagattttgactgctgtgactttgtactgcatgatcaacttcaaatctgtgattgcttacaggaggaagataagctactaattgaaaatggtttttacatctggatatgaaataagtgccctgtgtagaatttttttcattcttatattttgccagatctgttatctagctgagttcatttcatctctacttttttaatatatgtcaagtttgaatttgggataatttttctatgattaggtacaatttatcaaaactgaattgagaaaaaattacagtattattcctcaaaataacatcaatctatttttgtaaacctgttcatactattaaattttgccctaaaagacctcttaataatgattgttgccagtgactgatgattaattttattttacttaaaataggaaaaggagcactttaattacaactgaaaaatcagattgttttgcagtccttcctatcttacactaatttgaactcttaaagattgctgctttttttttgacattgtcaataacgaaacctaattgtaaaacagtcaccatttactaccaataacttttagttaatgttttacaaggaaaaagacacaataagaagagtttaattttttttttttttttgagcctgggcgacagagtgagactccgtctcaaaaaaaaaaaaaaaaagaaatgtttcattttggtttttcaccaaccttcctttgataggacaaagcagatactaagagggggaggaaaggctgttctgtgtctgaacccagttgggctagtccccaagaggagctgagagccatgtactctaatgcctcccttttcttcccccagccctgcctgatgtggctctgggaattcctgcagagaagagcaggggtggccaggagatagtgagcagctcccaggaggcatggagggatccagaacctggactgaagaaccacctagaaataactcagcagaattctgaaaatgaggtcacgctgggtaagaatgcctttttttttttttcatagtcaaagttagctatggagtttctgtagtattcactactccagacctttttcaagttgaattttttttctttttccctatgtctgttcttacgtattttttttaaacttttatttcagtagtgtttggggaacaagtagtgtttggttgcatggaaaagttcttcagtggtgatttctgagattttggtgcacccatcacccaagggtagtcttttttatccatcaagtctgtacccaatgtgtagtctttgtttttttctttttttttttttttgagactgagtctcattctatcacccaggctggagtggagtggtatgatcttgactcactgcaacatctgcctcccgggttcaagtgattctcctgcctcagcctcctgagtcgctgggattactgagattgtgccactgcactccagcctgggcgacagagtgagactccgtctcaaaaaaaaaaaaaaaaa

SEQ ID NO: 122130 - DNA, 255 bp, Homo sapiens
atggtggaggaagagctcgcagtgaattatgtctactcaatctatgcatcaaaggagcagattagatacaagcatggtagaagttttgccaatggccatgtgaaagagctgatggaaggggctcttagtttgatagaggagctgaagtatgtaaccaaacagattggcaaagcatccgaagcagccagggaggaagggaccaaaggttttcgacagagagggcgtgatgcgaagtccttccttcagtggcctaag

SEQ ID NO: 122131 - DNA, 936 bp, Homo sapiens
atgccacagagggccctattgtgtcaactcacttacgcgtgcatctcagcgcagctgatatgtccatttgctatggagcaacagctggttgcctgctgtcaccccatgtctggagagtgtgcctgcaagccgggctggtcaggactctactgtaatgagacatgttctcctggattctacggggaagcttgccagcagatctgcagctgccaaaatggggcagactgtgacagtgtgactggaaagtgcacctgtgccccaggattcaaaggaattgactgctctaccccatgccctctgggaacctatgggataaactgttcctctcgctgtggctgtaaaaatgatgcagtctgctctcctgtggacgggtcttgtacttgcaaggcaggctggcacggggtggactgctccatcagatgtcccagtggcacatggggctttggctgtaacttaacatgccagtgcctcaacgggggagcctgcaacaccctggacgggacctgcacgtgtgcacctggatggcgcggggagaaatgcgaacttccctgccaggatggcacgtacgggctgaactgtgctgagcgctgcgactgcagccacgcagatggctgccaccctaccacgggccattgccgctgcctccccggatggtcagtgttcaccggaaatggtgtaccaattaacaacattcacattatagtttgggactgcttccatgttaaggttcagactgtggtgactttttgcctgattactttagaagccaaaactgtaacacaagacatgaccgtctcagcatcgtggtactgggtggttgttagtattctggaatcctggagggtctgcgtgcttgctcttaatgtgttttcatttggtctgaggccagcaactgccagttcactactaattataacttattgcctttcaatgtga

SEQ ID NO: 122132 - DNA, 2295 bp, Homo sapiens
atgaaagtaggattggaccagataatagaagtggtgccctcacactctgtgacttcaggagcagctgctggtgaatgtggaggtgtccactgtgacagcgtgtgtgctgagggacgctggggccccaactgctccctgccctgctactgtaaaaatggggcttcatgctcccctgatgatggcatctgcgagtgtgcaccaggcttccgaggcaccacttgtcagaggatctgctcccctggtttttatgggcatcgctgcagccagacatgcccacagtgcgttcacagcagcgggccctgccaccacatcaccggcctgtgtgactgcttgcctggcttcacaggcgccctctgcaatgaagcttattcacagtgtgtcccagtggcagatttgggaaaaactgtgcaggaatttgtacctgcaccaacaacggaacctgtaaccccattgacagatcttgtcagtgttaccccggttggattggcagtgactgctctcaaccccactgtgctgataaatgtgtccatggtcgctgtattgctccaaacacctgtcagtgtgagcctggctggggagggaccaactgctccagtgtcaaaaaacaatcaactgtttgtgaatcttaaaaatgtgaaccctgggaagagaggccctgtgggggactgcactgggacattgccggctgactggaaacatggcggctacctcaacgagctcggtgcttttggacttgacagaagctatatgggaaaatccttaaaagacctgggaaagaattctgaatataattcaagtaactgctccctaagcagttctgagaacccatatgccactattaaagacccacctgtacttatcccgaaaagctcagagtgtggttatgtggagatgaaatcgccggcacgaagagattccccatatgcagagatcaataactcaacttcagccaacaggaatgtctatgaagttgaacctacagtgagtgttgtccaaggagtattcagcaataatgggcgtctttcccaggatccatatgacctcccaagaacagtcacatcccttgtcattatgacctgctgccagtccgagacagttcatcctcccttaagcaagaggacagtggtggtagcagcagcaacagcagcagcagcagtgaatgacaccaaaggaccgcttggggctcttagtttgatagaggagctgaagtatgtaaacaaacagattggcaaagcatccgaagcagccagggaggaagggaccaaagatttagtgacatgggacttggaaaagctcacaggaaaagcagcagaagagcagagtgggaagttggcagctaccctctgtgggaaggattggttaatccagagagaaggctggccatacattctcagtcggatgttcttggcttcatctccactgatggcagagaaagcgaatcattatggagaaagtcaaatggtaactcaaagttcaagttctaatgggggcgtccaggcaagtgtggcttgtaagaaggacagagggaagaggtttggggactgggtaactcactttattgcctggcaggccagctctgatgtctggactgtgagtgccaccatgattccaggaatgctgtccagttctgggacactcttgggggtacaagtcagcctcaataggaatcccctgaaaggactcagctctagatgtgcagggcttgcagtcagagacagccttgctccaaattcccaaggttggaaagctacatttgactttccttctctagagtgcccttcaggaacatatggctatggctgtcgccagatatgtgattgtctgaacaactccacctgcgaccacatcactgggacctgttactgcagccccggatggaagggagcgagatgtgatcaagctggtgttatcatagttggaaatctgaacagcttaagccgaaccagtactgctctccctgctgattcctaccagatcggggccattgcaggcatcatcattcttgtcctagttgttctcttcctactggcattgttcattatttatagacacaagcagaagggaaaggaatcaagcatgccagcagttacctacacccctgctatgagggtcgtcaatgcagattataccatttcagatctcttcaccagtgtgtgcaaaatggctgttgaacgcaaccagcagaaacagggcgatatcttggagaacaacaacaacaaaaatgtcaggcaagaagatgtggggcctcccaagagtggaggtttcatttgtgtccttaactgtgtgtcagcttag

SEQ ID NO: 122133 - DNA, 2909 bp, Homo sapiens
atgccacagagggccctattgtgtcaactcacttacgcgtgcatctcagcgcagctgatatgtccatttgctatggagcaacagctggttgcctgctgtcaccccatgtctggagagtgtgcctgcaagccgggctggtcaggactctactgtaatgagacatgttctcctggattctacggggaagcttgccagcagatctgcagctgccaaaatggggcagactgtgacagtgtgactggaaagtgcacctgtgccccaggattcaaaggaattgactgctctaccccatgccctctgggaacctatgggataaactgttcctctcgctgtggctgtaaaaatgatgcagtctgctctcctgtggacgggtcttgtacttgcaaggcaggctggcacggggtggactgctccatcagatgtcccagtggcacatggggctttggctgtaacttaacatgccagtgcctcaacgggggagcctgcaacaccctggacgggacctgcacgtgtgcacctggatggcgcggggagaaatgcgaacttccctgccaggatggcacgtacgggctgaactgtgctgagcgctgcgactgcagccacgcagatggctgccaccctaccacgggccattgccgctgcctccccggatggtcaggtgtccactgtgacagcgtgtgtgctgagggacgctggggccccaactgctccctgccctgctactgtaaaaatggggcttcatgctcccctgatgatggcatctgcgagtgtgcaccaggcttccgaggcaccacttgtcagaggatctgctcccctggtttttatgggcatcgctgcagccagacatgcccacagtgcgttcacagcagcgggccctgccaccacatcaccggcctgtgtgactgcttgcctggcttcacaggcgccctctgcaatgaagcttattcacagtgtgtcccagtggcagatttgggaaaaactgtgcaggaatttgtacctgcaccaacaacggaacctgtaaccccattgacagatcttgtcagtgttaccccggttggattggcagtgactgctctcaaccatgtccacctgcccactggggcccaaactgcatccacacgtgcaactgccataatggagctttctgcagcgcctacgatggggaatgtaaatgcactcctggctggacagggctctactgcactcagaagatccccaagacactcttgcagggcagctgccagcccatggttttatggaaaagattgtgcactgatatgccaatgtcaaaacggagctgactgcgaccacatttctgggcagtgtacttgccgcactggattcatgggacggcactgtgagcagaaggtcaggcctccctgggatcatcgctggttactcactgctctgggcggaggaggtgtgactacaagaatgaagacagaattcaagttttccattctgttcttttgggctctcccttcctctccttcttatttttggaatgtggctgctcagagccttaaaagatccagtcgagctttcttcatggcagaggcagaacccgggtctcacattggaggacagtacattcggtggggaggagggctggtggcccagggccaatccctgttgctgccctgtgcagtctggactgtgagtgccaccatgattccaggaatgctgtccagttctgggacactcttgggggtacaagtcagcctcaataggaatcccctgaaaggactcagctctagatgtgcagggcttgcagtcagagacagccttgctccaaattcccaaggttggaaagctacatttgactttccttctctagagtgcccttcaggaacatatggctatggctgtcgccagatatgtgattgtctgaacaactccacctgcgaccacatcactgggacctgttactgcagccccggatggaagggagcgagatgtgatcaagctggtgttatcatagttggaaatctgaacagcttaagccgaaccagtactgctctccctgctgattcctaccagatcggggccattgcaggcatcatcattcttgtcctagttgttctcttcctactggcattgttcattatttatagacacaagcagaagggaaaggaatcaagcatgccagcagttacctacacccctgctatgagggtcgtcaatgcagattataccatttcaggaacccttcctcacagcaatggtggaaacgctaatagccactacttcaccaatcccagttaccacacgctcacccagtgtgccacatccccttcacgttcaacaacaggggacaggatgactgttcacgagttcaaaaaacaatcaactgtttgtgaatcttaaaaatgtgaaccctgggaagagaggccctgtggggggactgcactgggacattgccggctgactggaaacatggcggctacctcaacgagcttcggtgcttttgggacttgacagaagctatttggggaaaatccttaaaaggacctggggaaaggatttttgaatataattcaagtaactgctccctaagcagttctgagaacccatatgccactattaaagacccacctgtacttatcccgaaaagctcagagtgtggttatgtggagatgaaatcgccggcacgaagagattccccatatgcagagatcaataactcaacttcagccaacaggaatgtctatgaagttgaacctacagtgagtgttgtccaaggagtattcagcaataatgggcgtctctcccaggatccatatgacctcccaaagaacagtcacatcccttgtcattatgacctgctgccagtccgagacagttcatcctcccctaagcaagaggacagtggtggtagcagcagcaacagcagcagcagcagtgaatga

SEQ ID NO: 122134 - DNA, 639 bp, Homo sapiens
atgaaggttgcagttgtaaatcggagcatgagagaaggcctgagaaaagtggaaggaggcagggaattgagtaatatcaaagcctcatctgagcttttagctcagctctcttttactggctccttgtttctgatctttccctcctatagttctgaaatgagaaaagaacagagccatgaggaccaaggacacataatggatacacggatgaggaagaacaagcaagcaggcagaaaagtcactctaatagagagccccacaccttctggcttccagctggtagaaggtgcaaacaaaagcaagacaaacacacactgcatctgtaccttgaaacagcctcaattccaggtggttgaagggactccctggggcacctggaattcaggaaataaaggaaatgtggagatgcatgtcaagcatttgccaaaaggagggctggagaatgacagctgggagcctgggtcaccatcgcagcctgctgcacgtagggcaggtggcaacgacgtggataggacaggctctctgcctgcgagtgtgagacacacgcttactatacagcatcctctgtggaagggagggtgtcatacaagttatatacatgaccagatgactttccatgacacaacggatgaccattaa

SEQ ID NO: 122135 - DNA, 1148 bp, Homo sapiens
ttttaatataagtttgggctttgcctgcccccttagaattgatttttttggttggtttttttttgtcttttttttgagttggagtttcactcttttcgcccaggctggagtgctatggtgtgatctcggctcactgcaacctccgcctcttgggttcaagcaaattctcttgcctcagcctcccaagtagcttggactataggtgcctaccaccacgcctgactaatttttgtatttttggtagagatggggttccaccacgttggccaggctggtctagaactcctgacctcaggtgatccacctgcctcagcctcccaaagtgctgggattacaggcatgagccaccgtgcccagtcagctgccttatcttttaaataaagtggaatttccaaaaacagatacttcatattctgggcatagcatcacacatacaaccattaccaatataataatattaaatgattacttaacagacatcctaataacgcaaacaccttttattcacatttgctgagtagcaattacagtgttttcttcattagttttccaacactggtaatgtaatttatgatgcaattactaacaatatacgtaccaatactttgaccaacaatagtcacaatggtttataacaactgaactcaaaggccacgttgatttttccacccacaacttgattctgatttttctagagtcattcataagaacaagaagtagtggatcctttcttcctccttagtatctgaaaattctgaactctgaagagaaattccatttggtttgtcattttcacctctgtgcatttcggcagctcttaacttttcttcaattctttactctattagagtgacttttctgcctgcttgcttgttcttcctcatccgtgtatccattatgtgtccttggtcctcatggctctgttcttttctcatttcagaatgtgtcatagattctgagcctagtctgaagtcctgggacttgttcttattgattgattgcttctctttcagtcttgtttgagtaactgctttcctggtgttatctctactgaagcttgtttggcctttttagatttccttcttcacaatcagatttctgcaagatcattcttcagcaagatttggcactatctttaaacaagcatt

SEQ ID NO: 122136 - DNA, 954 bp, Homo sapiens
atggattgggaatgccagcggccagcccattgtggctccccactagacccggaagaagccaagctgcaggaagaagccacggctgcaggtggagctgcctgccagtccagcaccgtgcacccgcactcctcagcccttgggcggtcgatgggactgggtactgtggagcagggggtggtgctcataggggaggctcccgcggcgccagagaccacggactcaccactgagcacaaaggcaatgttgggcatgctggtaaaggaccactggagtccagcagcccagacccctttctttgtgatcaaggaaggtgggaaaaggggtgcaggactgctacatggccaactaattttaaaggataagtttatcactcagtcagctgcagacattaaagaaaaacttcaaaagtccaccttaggcccagagcgaaacttaaaaaccctattgaacttggcaacctctgttttttataatagagatcaggaggagcaggcggaacgggacaaacgaggtaagaaaaaggccaccactttagtcatggccctcgggcaagcggactttggaggctctggaacgcggaaagcctgggcaaatcgaatgcctaatagggcttgcttccagcagtacccccttagacctgaggcccaacaaggactccaaaagattgttaaggacctaaaagcccaaggcctagtaaaaccatgcagtagcccctctgatactccaattttaggagtacagaaacctaatggacagtggagaattgaagctgtaaaactacaaatggctcttcaaatggagccccagatgcagtccatgactaagctctactgcggacccctggactggcctgctagcccatgctctgatattaatgacatggaaggcaccccccctgaggaaatctcaactgcacgacccctactatgccccaattcagcaggaagctgttaa

SEQ ID NO: 122137 - DNA, 924 bp, Homo sapiens
gaaactagcccagatctaggactcacccctgagagcaaaggcaatgttgggcatgctggtaaaggaccgctagaatccagcagccaggaccactttctttgtggtcaagaaaggcagtacccccttagacccaaggcccaacaaggactccaaaaaactgttaaggacctaaaagcccaaggcctagtaaaaccatgcagtagcccctgcaatactccaactgtaggagtacagaaacccaacggacagtggaggttagtgcaaaatctcaggattatcaatgagactgttgttcctctatacccagctgaacctaacccttatactctgctttcccaaataccagaggaagcagagtggtatatagtcctggaccttaaggatgccttcttctgcatccctgtacatcctgattcccaattcctgtttgcctttgaagatccttcaaactcaacgtctcaactcacctggactgttttacgccaagggttcagggatagcccccatctatttggccaggcattagcccaagatttgagccaattctcatacctggacactcttgtcctttggtatgtggatgatttacttttagccacctgttcagaaaccttgtgccatcaagccacccaagtgctcttaaatttcctcaccacctgtggctacaaggtttccaaaccaaaggctcagctctgctcacagcaggttaaatacttagggctaaaattatccaaaggcttgagggccctcagtgaggaacacatccagcctatactggcttatcctcttcccaaaaccctaaagcaactaagagggttccttggcataacaggtttctaccgaatgtggattcccaggtacagcaaaataggcagatcattatatacactaattaaagaaactcagaaagccaatacccattta

SEQ ID NO: 122138 - DNA, 914 bp, Homo sapiens
ctagtaaaaccatgcaatagcccctgcaatactccagttttaggagtacagaaacctaatggacagtggaggttagtgcaagatctcaggattatcaatgaggctgttcttcctctataccctgctatacctaacccttgtactctgctttcccaaaaaccacagaaagcagagtggtttacagtcctggaccttaaggatgcctttttctgcatccctgtacaccctgactctcaattcttgtttgcctttgaagatcctttgaacccaatgtctcaactcacctggactgttttaccccaagggttcaagcatagcgcccatctatttggccaggcattagcccaagacttgagccaattctcatacctggacactcttgtccttcagtacggggatgatttaattttagccacccgatcagaaacctggtgccatcaagccacccaagcactcttaaatttccttgctacctgtggctacaaggtttccaaacaaaatgctcagctctgctcacagcaggttaaaaacttagggctaaaattatccaaaggcacaagggccctcagtgaggaacgtatccagcctatactggcttatcctcatcccaaaaccctaaagcaactaagagggttccttggcataacaagcttctgccgaatatggattcccaggtacagcgaaatagtcaggccattatacacactaaggaaactcagaaagccaatacccatttagtaaggattactattggctgtacagaaacctaaagaggtggcagtcttacactgccagagtcaccagaaaggaaagggaaacagaaaggaactgccaagcggatattgaagccaaaagagcggcaaggcaggaccctctattagaaatgcttatagaaggacccccagtccttctat

SEQ ID NO: 122139 - DNA, 575 bp, Homo sapiens
gaacccagcccagctctaggactcacccctgagcgcaaaggcaatgttgggcatgctggtaaaggaccactagaatccagcagcccagacccctttctttgtggtcaagaaaggcgggaaaaggggtgcaggactgctacatcggtaagcataactaatccgataaacagaggtccatgggtggttacgcaccctggaaaggaactcacccctgagcacaaaggcaatgttgggcacgctgggagagacattctagcaaaagcaggggccattatacacctgaacataggagaaggaacacccgtttgttgtcccctgcttgaggaaggaattaatcctgaagtctgggcaacagaaggacaatatggacgagcaaagaatgcccgtcctgttcaagttaaactaaaggattccacctcctttccctaccaaaggcagtaccccctcagacccaaggcccaacaaggactccaaaagattgttaaggacctaaaagcccaaggcctagtaaaaccatgcagtaacccctgcagtactccaattttaggagtacagaaacccaacagacagtggag

SEQ ID NO: 122140 - DNA, 334 bp, Homo sapiens
gcagtacccccttagacctgaggcccaacaaggactccaaaagattgttaaggacctaaaagcccaaggcctagtaaaaccatgcagtagcccctctgatactccaattttaggagtacagaaacctaatggacagtggagaattgaagctgtaaaactacaaatggctcttcaaatggagccccagatgcagtccatgactaagctctactgcggacccctggactggcctgctagcccatgctctgatattaatgacatggaaggcaccccccctgaggaaatctcaactgcacgacccctactatgccccaattcagcaggaagctgttaa

SEQ ID NO: 122141 - DNA, 900 bp, Homo sapiens; identical to SEQ ID NO: 117494

SEQ ID NO: 122142 - DNA, 804 bp, Homo sapiens
gaacccagcccagctctaggactcacccctgagcacaaaggcaatgttgggcacactggtaaaggaccactagaatccagcagcccggacccttttctttgtggtcaagaaaggggaaaacaggtgcaggactgctacatcgatgggaaatgttccccccaaggcaaaaacgcccttaagatgtattctggagaattcgacccagtcagagtgtgtgtacctttttccctctcagatttgaagcaacttaaaatagacctaggtagattctcagataaccctgatggctatattgatgttttacaagggttaggacaatcctttgatctgacatggagagatataatgttactgctagatcagacactaaccccaaatgagagaaatgccaccataactgcagcccgagagtttggtgatctctggtgtctcagtcaggtcaatgataggatgacaacagagcaaagagaacgattccccacaggccagcaggcagttcccagtgtagaccctcgctgggacacagagtcagaacatggagatgggtgccacagacatttgctaacttgcatgttagaaggactaaggaaaactaagaagaagccgatgaattactcaatgatgtccactataacacagggaaaggaaaaaaatcctaatgcctttctggagagactaaggcaggcattgaggaagcatacctctctgtcacctgactctattgaaggccaactaatcttaaaggataagtgtatcactctgtcagctgcagacattagaaaaaacttcagaagtccaccttag

SEQ ID NO: 122143 - DNA, 1926 bp, Homo sapiens
atgggagaagaaagatacggaatggaggaagaaggtcatcttgtcatcagtgtaactcaggctagtcattttttaacccttcagtttgatgcctgttcagtcatcccgtatggagatgagcaaggtcccatgaaagccatcttgctattactcacctttgggccctgtatttttaacctccttgtcaaatttgtttcctctaggatcgaggccatcaagctacagatggtcttacaaatggaaccccaagtgaactcaactaacaacttccaccaaggacccctggaccaacccgttggccctttgactggcctaaagagttcccttctgaaggacactacaagtgcagggccccttcttcgcccctatccagcatctcttctcggcaaagtgaaagaagcggtgaaggtggccattgatgcagaatatcgccacattgactgtgcctatttctatgagaatcaacatgaggtgggagaagccatccaagagaagatccaagagaaggctgtgatgcgggaggacctgttcatcgtcagcaaggtgcacatggcgcatttggtgtggcccactttctttgagagaccccttgtgaggaaagcctttgagaagaccctcaaggacctgaagctgagctatctggacgtctatcttattcactggccacagggattcaagagcttgaaaaagtggtatgcagatgtggtatttagcaagcatcaggatcctgaaaccttgttgaacagaaccaagtgtcctgatgcagattccagtaaacttttcattctgtatttacagactggggatgactttttccccaaagatgataaaggtaatatgatcagtggaaaaggaacgttcttggatgcctgggaggccatggaggagctggtggacgaggggctggtgaaagcccttggggtctcaaatttcaaccacttccagatcgagaggctcttgaacaaacctggactgaaatataaaccagtgactaaccagaactccctaggaacaatgcaaaacagagccggctttccccgtgatgaggattgtttgctgttgcaggttgagtgtcacccatacctcacgcaggagaaactgatccagtactgccactccaagggcatcaccgttacggcctacagccccctgggctctccggatagaccttgggccaaacctgaggacccttccctgctggaggatcccaagattaaggagattgctgcaaagcacaaaaaaaccacagcccaggttctgatccgtttccatatccagaggaatgtgacagtgatccccaagtctatgacaccagcacacattgttgagaacattcaggtctttgactttaaattgagtgatgaggagatggcaaccatactcagcttcaacagaaactggagggcctttgacttcaaggaggagagacatcctagcaaaagtaggggccattatacactagaattaggagaagaaaaaagggtgaacatatatacagactctgagtatgcttacctagtcctccatgcccacgcagtaatatggagagaaagggaattcctaacttccaagggaacacctatcaaacatcaggaagccattaggagattattattggctgtacagaaacctaaagaggtggcagtctttcactgctggggtcatcagaaaggaaaggaaagggaaatagaagggaactgccaagtggatattgaagccaaaagagctgcaagaatcaaagctgtaaaactacaaatggttcttcaaatggagcaccagatgcagtgcatgactaagatctaccgtggacccctggactggccagctagcccatgctccgatgttaatgacattgaaggcacccctcccgaggaaatctcaactgcacaacccctgctacaccccaattcagcaggaagcagttag

SEQ ID NO: 122144 - DNA, 2343 bp, Homo sapiens; identical to SEQ ID NO: 116181

SEQ ID NO: 122145 - DNA, 865 bp, Homo sapiens
atgaaattgtcagcagactcaataatcaccctaaggggcatcattctggatgccgacattctctatgatggaaagggactgaaagaactcagcctagctctaggactcacccctgagcacaaaggcaatgttgggcacgctggtaaaggaccactagaatccagcagcccggacccctttctttgtgatcaagaaaggcgggaaaaggggtgagggctgcctagcaaaagcaggggccattatacacctgaacataggagaacacccgtttgttgtcccctgcttgaggaaggaattaatcttgaagactgggcaacagaaggacaatatggacgagcaaagaatgcccgtcctgttcaagttaaactaaaggattctgcctcctttccccaccaaaggcagtacccccttagacccgaggctcaacaaggactccaaaagattaaggacctaaaagcccaaggcctagtaaaagcatgcaatagcccctacaataatccaactttaggagtacagaaacccagtggacagtggaggttagtgcaagatctcaggattatcaatgaggtcactgtccctctatacctagctgtacctaacccttatattctgctttcccaaataccagaggaagcagagtggtttacagacctggaccttaaggatgcctttttctgcatccctgtacatcctgactctcaattcttatttgcctttgaagatccttcaaacccaatgtctcaactcacctggactgtttcaccccaagggttcagggatagcccccatctatttggccaggcattagcccaagacttgagccggttctcatacctgggcactcttgtcctttggtatgtggatg

SEQ ID NO: 122146 - DNA, 1721 bp, Homo sapiens
atgaatcaaagtgaccaggaaatgactggagcgtttgtccacatgaaaagttatacgggcctgatctcaggggtggcagtaaagatggaaagacacatttatcaagacagacgaattgcaatagagaaagagtttaattcatgtagaactggctgtatgggagactggagttttactattactcaaatcagactcctggaaaacacagggatcagggtttttaaggataatttggtagaggaagcagagtggtttacagtcctggaccttatggatgcctttttctgcatccctgtacatcctgactctcaattcttgtttgcctttgaagatccttcgaacccagcatctcaacttacctggactgttttaccccagaggttcaagaatagtccccatctatttggccaggcattagcccaagacttgagccagttctcatacctggacactcttgtccttcggtacatggatgatttacttttagctgcctattcagaaaccttgtgccatcaagccaccgaagctctcttaaatttcctcgccacctgtggctacaaggtttccaaaccaaaggctcagctctgctcacagcaggttaaatacttagggctaaagttatccaaaggcaccagggacctcaccacatttcttccagtcaatgaagaaaagatagaacataactgtcaacaagtaattgctcaaagctacgctgctcgaggggaacttctagaggttcccttggctgatcctgacctcaacttgtatactaatggaagttcctttgtagaaaaagcacttgaaaagtggatctatgtggttcctctcattcttagcgcccccatgatcatctacactgaacaagatttatacaattatgtcatacctaagtcccataacaaaagagtacccattctttcttttgttattggagcaggagtgctagacggactaggtgctggcattggtggtatcaaaacctctactcagttctactataaactatctcaagaactaaatggtgacatggattgggtcaccaactcactggtcaccttgcaagatcaacttaactccctagcagcagtagtccctcaaaatcgaagagctttagacttgctaactgctgaaagagggggaacctatttatttttaggggaagaatgttattatgctaatcaatccagaatcatcactgagaaagttaaagaaattcaagatcgaatacaacatagaccagaggagcttcaaaacaccagacgctggggcctcctctgccaatggatgcactggattctccccttcttaggacctctagcagctataatattgttactcctctttggaccctgtatctttaatctctttgttaagtttgtctcttccagaatcaaagctgtaaagctacaaatgttcttcaaatggagtcccagatgcagtccatgaataagatctaccgtggacccctggaccggcctgctagcccatgctccaatgttaatgagggggggcaaatatatacgcaaggcgacaaggtgctgatgccgctggcgatcagggttcatcatgccgtttgtgatggcttccatgtcggcagaatgcttaatgaattacaacagtactgcgatgagtggcagggcggggcactggccaaaggaactcgattgttcgtgctgtcttatcaggcaaaaagtgagcgacagtatcaggtggttggttga

SEQ ID NO: 122147 - DNA, 1687 bp, Homo sapiens
atgcctcttctccaaatgattgcaacacctctccagcaatctctgatttctacggaggatgagatggatgaattgacagaagtaggctttgaaaggtgggtaataacaaacttcactgaggaacccagcccagctctaggattcacccctgagcacaaaggcaatgttgggcatgctggtaaaggaccactagaatccagcagcccagacccctttctttgtggtcaagaaaggcgggaaaaggggtgcaggactgctacatcggcagtacccccttagacttgaggccaaacagggactcaaaaaaattgttaaggacctaaaagcccaaggcctagtaacaccatgcagtagcccctgcaatactccaactttagcagtacagaaacccaacggacagtggaggttagtgcaagatctcaggattatcaatgaggctgttgtccctctatacccagctgtacctaacccttacattctgctttcccaaataccagaggaagcagagtggtttacagtcctggaccttaaggatgcctttttctgcatccctgtacatcctgactctcaattcttgtttgcctttgaagatccttcaaacccaatgtctcaactcacctggactgttttaccccaagggttcagggatagcctccatctatttggccaggcattagcccaagacttgagccagttctcatacctggacactcttgtccttcagtatatggatgatttacttttagtgacccattcagaaaccttgtgccatcaagccacccaagtactcttaaatttcctcgccacctgtggctacaaggtttccaaactaaaggctcagatctgctcacagcaggttaaatacttagggctaaaactatccaaaggcaccagggccctcagtgaggaacgtatccagcctatattggcttatcctcatcctaaaacccgaaaacaactaagagggctccttggcatcacaggcttctgccaaatatggattcccaggtacagcgaaatagccaggccattacatacactaattaagaaaactcagaaagccaatacccatttagtaagatggacacctgaagcagaagcagcttttcaggtcttaaagaaggccctaacccaagccccagtgttaagcttgccaacggggcaagactttttccttatatgtcacagaaaaaacaggaatagctctaggagtccttacacagcactatggagaggaaaggaattcctgacttccgacggaatacctatcaaacatcaggaagccattaggagattattattggctgtacagaaacctaaagaggtggcagtcttacactgccagggtcatcagaaaggaaaggaaagggaaatagaagggaaccgccaagtggatattgaagccgaaaaagctgcaacgcaggaccctccattagaactgcttatagaaggacccctagtatggggtaatcccctctgggaaaccaaaccccaaatcgaagctgtaagactacaaattgttcttcaaatggagccccagatgcagtccatgactaagatctaccacggacccctggactggcctgctagaccgtgctccaatgttaatgacatggaaggcacccctcctgaggaaatctcaactgcacgacccctactatgcctcaattcagcaggaagcagttaa

SEQ ID NO: 122148 - DNA, 1431 bp, Homo sapiens
atggggaacatcactgcagacaactcctcgatgagctgtaccatcgaccataccatccaccagacgctggccccggtggtctatgttaccgtgctggtggtgggcttcccggccaactgcctgtccctctacttcggctacctgcagatcaaggcccggaacgagctgggcgtgtacctgtgcaacctgacggtggccgacctcttctacatctgctcgctgcccttctggctgcagtacgtgctgcagcacgacaactggtctcacggcgacctgtcctgccaggtgtgcggcatcctcctgtacgagaacatctacatcagcgtgggcttcctctgctgcatctccgtggaccgctacctggctgtggcccatcccttccgcttccaccagttccggaccctgaaggcggccgtcggcgtcagcgtggtcatctgggccaaggagctgctgaccagcatctacttcctgatgcacgaggaggtcatcgaggacgagaaccagcaccgcgtgtgctttgagcactaccccatccaggcatggcagcgcgccatcaactactaccgcttcctggtgggcttcctcttccccatctgcctgctgctggcgtcctaccagggcatcctgcgcgccgtgcgccggagccacggcacccagaagagccgcaaggaccagatccagcggctggtgctcagcaccgtggtcatcttcctggcctgcttcctgccctaccacgtgttgctgctggtgcgcaggtactgggaggccagctgcgacttcgccaagggcgttttcaacgcctaccacttctccctcctgctcaccagcttcaactgcgtcgccgaccccgtgctctactgcttcgtcagcgagaccacccaccgggacctggcccgcctccgcggggcctgcctggccttcctcacctgctccaggaccggccgggccagggaggcctacccgctgggtgcccccgaggcctccgggaaaagcggggcccaggaggaggaagtgaccaagtttgaaggcggcagaaatggccacacagccaagaagagcccatgcaactcagtccaggattttactggaatcaaagctgtaaaactacaaatagttcttcaaatggagccccagatgcagtccatgactaagatctaccatggacccctggaccggcctgctagcccatgctccgatgttgatgacatcgaaggcacccctcccgaggaaatctcaactgcacaacccctactacgccccaattcagcaggaagcagttagagtggtcattggccaacctccccaacagcacttgggttttcctgttgagagtggggactgagagacaggactagctggatttcctaggctgactaagaatccctaagcctagctgggaaaggtgaccacacctacctttaaacacagggc

SEQ ID NO: 122149 - DNA, 3205 bp, Homo sapiens
gactcaccactgagcacaaaggcaatgttgggcatgctggtaaaggaccactggagtccagcagcccagacccctttctttgtgatcaaggaaggtgggaaaaggggtgcaggactgctacatggccaactaattttaaaggataagtttatcactcagtcagctgcagacattaaagaaaaacttcaaaagtccaccttaggcccagagcgaaacttaaaaaccctattgaacttggcaacctctgttttttataatagagatcaggaggagcaggcggaacgggacaaacgaggtaagaaaaaggccaccactttagtcatggccctcgggcaagcggactttggaggctctggaacgcggaaagcctgggcaaatcgaatgcctaatagggcttacttccagtgcggtctacaaggacactttaaaaaagattgtccaagtagaaagccccaggtatgcttgaccattgagagccaagaggttaactgtctcctggacgccggtgcggccttctcagtcttactctcctgtcccggacaactgtcctccagatctgtcactatccgaggggtcctaggacagccagtcactagatacttcttccagccactaagttgtgactggggagctttacccttttcacatgctttcctaattatgcctgaaagcctcactcccttgttagagagagagattctagtaaaagcaggggccattatacacctgaacataggagaaggaacacccatttgtcgtctcctgtttgaggaaggaattagtcctgaagtctgggcaacagaaggacaatatggacaagcaaagaatgcccattttgtccaagttaaactaaaggattccacctcctttccctatcaaaggcagtaccccctcagacccgaggcccaacaaagactccaaaagattgttaaggacctaaaagcccaaggcctagtaaaaccatacagtagcccctgcaatactccaattttaggagtacagaaacccaaaagacagtggaggttagtgcaagatctcaggattatcaatgaggctgtttttcctctatacccagctatacctagcccttatactctgctttcccaaataccagaggaagcagagtggtttacagtcctggatcttaaggatgcctttttctgcatccctgtacatcctgactctcaattcttgtttgcatttgaagatccttcaaacccaacatctcaactcacctggactgttttaccccaagggttcagggatagtccccatctatttggccaggcattagcccaagacttgagccagttctcatacctggacactcctgtcctttggtacgtgaatgaaatcacttttagctgtccgttcagaaaccttatgccatcaagccacccaaatgctcttaaatttccttgctacctgtggctacaaggttttcaaaccaaaggctcagctctgctcacagcaggttaaatacttaggactaaaattatccaaaggcaccaaggccctcagtgaggaatgtattcagcctatactggcttatcctcatctcaaaaccctaaagcaactaagagagttccttggcataacaggcttctgccgaatatggattcccaggtacagcaaaatagccagaccattaaatacacgaattaaggaaactcaaaaagccaatacccatttagtaagatggacacctgaagcagaagtggctttccaggccctaaagaaggcgctaacacatgccccagtgttaagcttgccagtggggcaaaacttttctttatatgtcacaaaaaacaaacaaacaaagaaaaaaaaaaacatgaatagctctaagagtccttgcgctggtctgagggacgagtttgcaacccgtggcatacctgataaggaaattgatgtagtggcaaagggtcagcctcattgtttacgggtagtggtggcagtagcagtcttagtatctgaagcagttaaaataatacagggaagaaatcttactgtgtggacatctcatgatgtgaatggcatactcactgctaaaggagacttgtggctgtcagacaaccatttacttaaatatcaggctctattacttgaagggccaatgctgcgactgtgcacttgtgcagctcttaacctggacacatttcttccacacaatgaagaaaagatagaacataactgtcaacaagtaattgctcaaacctatgccactcgaggggaccatttagaggttcccttgactgatcccaaccctaacttgtatactgatggaagatcctttgtagaaaaaggacttcaaaaagtggggtatgcagtagtcagtgataatggaatacttgaaagtaatcccctcactccaggaactagtgctcagctggcaaaactcactcgggcactagaattaggagaaggaaaaagggtaaatatatatacagactctaagtatgcttacctagtcctccatgcccatgcagtaatatggagagaaagggaattcctaacttctgagggaacacctatcaaacatcaggaagccattagggaattattattggccgtacagaaacctaaagaggtggcagtcttacactgccggggtcatcagaaaggaaaggaaagggaaatagaaaggaaccgccaagcagatattgaagccaaaagagctgcaaggcaggaccctccattagaaatgcttatagaaggacccctagtatggggtaatcccctctgggaaaccaagccccagtattcagaagaagaaatagaatggggaatctcacgaggacatagttttctcccctcaggatggcaagccaccgaacaaggaaaaatacctttgcctgcagctaaccaatggaaattacttaaaaccactcaccaaaactttcacttatgcattgatagcacccatcagatggccaaattgttatttactggaccaggacttttcaaaactctcaagcagatagttggggcctgtaaatttgtctcttccagaattaaagctgtaaaactacaaatcattcttcaaatggagccccagatgcagtccatgactaagatctaccgcggacccctggaccaccctgacagcccatgctccaatgttaacgacatcgaaggcacccctcctgaggaaatctcaactgcacaacccctactacaccccaggccagcaggaagcagttag

SEQ ID NO: 122150 - DNA, 369 bp, Homo sapiens
ttcggcacgtaggtacatctacaccctcaagggcatgtgcccgttaaacacaccccaacaggccttggatactccagctgtcgtcacctgcttcttggccgtgcctgttattaaaaaggtgaggtcggggcaaaggcaggtatgcaggtctctgatgcacttccacgcctaggaggcgtctcctagctatgtcagggtggcgcctgcagagccacacctaggaccacctggcctaggacgtagacttagagaccggctcgcgaggaaagatatcagacctggtccgtcattagtgccttccggtttgcaaaaacctaagtcaagtccccagccagactgccaggccgaatgaaaaaacccccctttcac

SEQ ID NO: 122151 - DNA, 2652 bp, Homo sapiens
atgagcaagttttcatgtgcatccctgacagccacagagagcgacgggacgccactcatggagcagtacgtgccctgcccggtctgcgagacagcctgggcccagcacacggaccccagtgagaaatcagaggatgtgcagtacttcgacatggaagactgtgtcctgacggccatcgagcgggacttcatctcctgccccagacacccggacctccccgtgccgctgcaggagctggtccctgaactgttcatgaccgacttcccggccaggctcttcctggagaacagcaagctggagcacagcgaggacgagggcagcgtcctgggccagggcggcagtggcaccgtcatctaccgggcccggtaccagggccagcctgtggccgtcaagcgcttccacatcaaaaaattcaagaactttgctaacgtaccggcagacaccatgctgaggcacctgcgggccaccgatgccatgaagaacttctccgagttccggcaggaggccagcatgctgcacgcgctgcagcacccctgcatcgtggcgctcatcggcatcagcatccacccgctctgcttcgccctggagctcgcgccgctcagcagcctcaacaccgtgctgtccgagaacgccagagattcttcctttatacccctgggacacatgctcacccaaaaaatagcctaccagatcgcctcgggcctggcctacctgcacaagaaaaacatcatcttctgtgacctgaagtcggacaacattctggtgtggtcccttgacgtcaaggagcacatcaacatcaagctatctgactacgggatttcgaggcagtcattccatgagggcgccctaggcgtggagggcactcctggctaccaggccccagagatcaggcctcgcattgtatatgatgagaaggtagatatgttctcctatggaatggtgctctacgagttgctgtcaggacagcgccctgcactgggccaccaccagctccagattgccaagaagctgtccaagggcatccgcccggttctggggcagccggaggaagtgcagttccggcgactgcaggcgctcatgatggagtgctgggacactaagccagagaagcgaccgctggccctgtcggtggtgagccagatgaaggacccgacttttgccaccttcatgtatgaactgtgctgtgggaagcagacagccttcttctcatcccagggccaggagtacaccgtggtgttttgggatggaaaagaggagtccaggaactacacggtggtgaacacagagaagggcctcatggaggtgcagaggatgtgctgccctgggatgaaggtgagctgccagctccaggtccagagatccctgtggacagccaccgaggaccagaaaatctacatctacaccctcaagggcatgtgccccttaaacacaccccaacaggccttggatactccagctgtcgtcacctgcttcttggccgtgcctgttattaaaaagaattcctacctggtcttagcgggcctcgccgatgggcttgtggctgtgtttcccgtggtgcggggcaccccaaaggacagctgctcctacctgtgctcacacacagccaacaggtccaagttcagcatcgcggatgaagacgcacggcagaacccctacccagtgaaggccatggaggtggtcaacagcggctctgaggtctggtacagcaatgggccgggcctccttgtcatcgactgtgcctccctggagatctgcaggcggctggagccctacatggccccctccatggttacgtcagtcgtgtgcagctctgagggcagaggggaggaggtcgtctggtgcctggatgacaaggccaactccttggtgatgtaccactccaccacctaccagctgtgtgcccggtacttctgcggggtccccagccccctcagggacatgtttcccgtgcggcccttggacacggaacccccggcagccagccacacggccaacccaaaggtgcctgagggggactccatcgcggacgtgagcatcatgtacagtgaggagctgggcacgcagatcctgatccaccaggaatcactcactgactactgctccatgtcctcctactcctcatccccaccccgccaggctgccaggtccccctcaagcctccccagctccccagcaagttcttccagtgtgcctttctccaccgactgcgaggactcagacatgctacatacgcccggtgctgcctccgacaggtctgagcatgacctgacccccatggacggggagaccttcagccagcaactggcaggccgggaagaatcctcgccgtcagagacctcatttgggtccccaggcgcggtggagatgttatcgtcattggcctggagaaggattctggcgcccagcggggccgagtcattgccgccttaaaagcccgagagctgactccgcatggggtgctggtggatgctgcccgggaggcaaaggacacttgtgtgtgcaacctttgaaaaagaaaacacagagtggtgcctggccgtctggaggggctggggcgccagggagttcgacattttctaccagtcctacgaggagctgggccggctggaggcttgcactcgcaagagaagtgccccacaactgcccagttaa

SEQ ID NO: 122152 - DNA, 1644 bp, Homo sapiens
atgccgcaggggaacccgctgctgctgtcccacaccctgcaggagctgctggccagggacaccgtgcaggtggagctcattccggagaagaagggcctcttcctgaagcatgtggagtatgaggtttccagccagcgcttcaagtcctcggtatacagacggtacaatgacttcgtggtcttccaggagatgctcctgcacaagttcccctaccgtatggtgcctgccctgccacccaagagaatgctgggagctgacagggagttcatcgaggccaggaggagagccctgaagcgcttcgtcaacctggtggcgcgacaccccctgttctccgaggatgtggtcctcaagctcttcctgtccttcagcggctcggatgtgcagaacaagttaaaggagtcagcacagtgcgtcggggacgaattcctgaactctgacatccaggctcagtttgccatcagccgggagctgatccggaacatctacaatagctttcacaagcttcgcgacagggccgagcggatcgcatcgcgggccatcgacaatgcggcagatcttctcatattcgggaaggagctaagtgcaatagggtctgacacgaccccgctgccctcctgggccgctctgaatagcagcacgtgggggtccctgaagcaggctctgaaaggcctgtctgtggaattcgcgctgctcgccgacaaggctgcacaacagacccctgctgtctccagagcttggatgctcccctcagtggcagctggagcccagggctttggaccgactcttcataccgcagatgcctctgagcaccgtgtgttcgggccgtgtgcactgtgcctggcctgcgcccccaccgagggctgctactggtggctgcccgccgtttgctgtgcactcactgccctgttgggctctctctgtggctgtgctgcccgcacagagccttgtgtgagggccgaagaggagcctgtgtccaccgctgcccccaccgccgagtgtggtgcttctgcgtgcagcctggggcggccgcctctcttcctggatcagcagcacggtaagcaggaagagaacgacgtggtggagaagctgaacctcttcttggatctgctgcagtcctataaggacctgtgcgagcggcatgagaagggcgtgttgcacaagcaccagcgggccctgcacaagtacagcctgatgaagaggcagatgatgagcgccaccgcgcagaaccgcgagccggagtccgtggagcagctggagtcccgcattgtggaggctgaaggagaaggggccgccctggctcagggagcacgctggtgttcgggccttggtgctcccgtcgccggctgggccgggtgcgaaaggcggctgtttgctccgcagcaggagaacgcgattcagacgatggagctgcggaactacttctccctgtactgcctgcaccaggagacgcagctcatccacgtctacctgcccctcacctcccacatcctccgcgccttcgtcaactctcagatccaagggcacaaggagatgagcaaggtgtggaacgacctgaggcccaagctcagctgcctctttgcgggaccacacagcaccctgaccccaccgtgctccccgccggaggacggcctgtgtcctcactag

SEQ ID NO: 122153 - DNA, 1145 bp, Homo sapiens
gtcctgcacaagttcccctaccgtatggtgcctgccctgccacccaagagaatgctgggagctgacagggagttcatcgaggccaggaggagagccctgaagcgcttcgtcaacctggtggcgcgacaccccctgttctccgaggatgtggtcctcaagctcttcctgtccttcagcggctcggatgtgcagaacaagttaaaggagtcagcacagtgcgtcggggacgaattcctgaactgtaagctggctaccagggccaaggacttcctcccagctgacatccaggctcagtttgccatcaagccgggaagctgatccggaacatctacaatagctttcacaagcttcgcaacagggccgagcggatcgcttcgcggccatcgacaatgcggcagatcttctcatattcgggaaggagctaagtgcaatagggtctgacacgaccccgctgccctcctgggccgctctgaatagcaagcacgtggggggtccctgaagcaggctctgaaaggcctgtctgtggaaatttgcgctgcttcgccgacaaggctgcacaacagggtaagcagggaggagaacgacgttggtggagaagctgaacctcttcttggatctgctgccagtcctattaaggacctgtgcgaagcggccatgagaagggcgtgtttcaacaaagcaccagcgggcccttgcacaaagtacagcctgattgaagaggccagattgattgagcgccaccggcgcagaaccgcggagcccggaggtccgtggaagcaagctgaagtcccgcattcgtggagccagggagaacgcgatttcagacgatggagctgcggaactaccttctccctgtactgcctgcacccaggagacgcagctcatccacgtctacctgcccctcacctccccacatcctccggcgccttcgtcaactctcagatccaagggcacaaggagatgagcaaggtgtggaacgacctgaggcccaagctcagctgcctctttgcgggaccacacaggacccctgaccccaccgtgctccccgccggaggacgggcctgtgtcctcactagcgcctgaggctgaggtggtgctccctgcggccgcactaaaacctctttccaaaaaaaaaaaaagtcgac

SEQ ID NO: 122154 - DNA, 1232 bp, Homo sapiens
atgccccaggtccctgcccctccctgcccagtatcacttcagggcaccctggggagccgcggccagaccttcctgctcctgcctcttctcaccccagccctgcaactcaattactcccagctcacttctgctgcggcagctggcggtggctgcggccggagggtgtgggggccacggagccccagctctttccagtacaggctggcagcaggtctgcaaatctccccaggtcaggtctgtccccgacaacccaaccacagcagattctacggcaagtttagcatggaagtttggggaggtgctcagaagccacatcaactgtggctacaaatgaaaacaacagccactgcttccggtgcatgctcagaggcgggcacaggtttccgcacccgccctcctgctgggctgagctgcggccagcactccctgccacagcctccccgctgctcagacttgtctctggggctccatccggggcgcctgccctgtgataggggccactgcccacccctgccccctgtcacccctaccccagataaggcaggcccaatccttgacccggcccaaagctgtcccttctgtagccccatcccagccccaccaaagcaaccctcacctccagccaggttcccagagatgaagcggaagaagacgctgatgatgcctcccagtgagggcagcttatctctggccagtggaatggaagcatctgtcttccagagacttctgagccgatgcacctgtcttgatcaagccactgttatttggggtttctgttatatgcaagttcaggcaagccaagggatcccttgcagagggaaagacgagctgctgcgcctcgcacccctgccagtaaaggaagccagaagaacaaagccccgaagcccgggaaaacacgcaaaggcccctccctcatccagtgcctgctcaccgcacctctgctgctcctcaccaatactccaggctctggattagaggctttaaattcccatgggagaatgggtccccagcaggaggcagcaggggttctgctaaactggaagctgggacggccgcctggccatgctgggcccctcacaccactcagaccaactggcatcaagggccatcggccagtgaatgaccctattatcgaggggagcagggaggactctgcttcaaatccagtgaattctccagggagcctagcaacactgccagttacagtgatgaaagtcagtgggggcttctag

SEQ ID NO: 122155 - DNA, 1036 bp, Homo sapiens
  misc_feature (1)...(1036): n = a,t,c or g
tccctgcaggcaccgcgccggaattcccgggctgaacacacacgcacgctgaactccgagtgcccgcgacgccgtcgctgttgtatcaagggatgcacctacacctgactggacgctgtgccagcccccgccagtcttagactggctggtgcagccgaaacctcgatggcttggtggcaatggctggctcctggatggccctgaggaggtgttacaagcagaggcgtgcagcaccacggaggatggggccgaacccctgctctgtccctcgggctatgagtgccacatcctgagcccagggtgacgtggccgaaggtatccccaaccgtgggcagtgcgtcaagcagcgccggcaagcagatgggcgaatcctacgacacaaactttacaaagaatatccagaaggtgactcaaagaatgtggcagaacctgggaaggggacaacagaggcactttcagtaaagcaacggcnaggcagctaggtttgcaagaacattcctctactttctgctaagccttgggaaacagttggggaaaagtagtttgacccttcacagtttcacatttcagcttcagcagagccaagaccccagagatgctttagagacaggacacctggcccatccaaaccccagtttggccccagccttggttgggtgactttgtgggagccacttaacagctctggggtccctgtttttaccatcctgggaagcaaggccctgcagctccacgagacctttaccccgggaagaagcggcccaccccatgaaagcatttctgaagcccctttcctaagacaaggctcagcatccttgatatttttgacagattcctcccaagtctggctctgggaggtatgtacccatctcaaatgttcccaagataaattcatccttcaggaaatggaaatgaacttgcttactaatgtgtgattcctagttgtagccaccggatgtgctgaggcctaaatgtttagcaggtgggaggaggccacagaacaataaaaacaaccgaaataagatgccgagaaaaa

SEQ ID NO: 122156 - DNA, 424 bp, Homo sapiens
caaataatcacaggctggacaggacactgcccagggactattgtcatgctgccacagcttacaccacccatgagctggcgtttggtgacttcagactccctactgaaggccaccaggagctatgccacaacagccacctcatttattttagaagagacaagtgaacacactgcacttggagaagcgtggattcacttacaggggtgacacacaggtgatgcctgccccagggagcctgcagtgctcatgatggtcttacattttaggatgtaaagtgttgagtctagcatttgccattcattgctaactgcttctgtgattcctaggacccagactctgagctgatactgaatgagaaaaagcccggggtaaggtctgggagtcctggagagataatgaagagaggtcgctcgctgccttttgt

SEQ ID NO: 122157 - DNA, 558 bp, Homo sapiens
atgtgcttggtcacaagacagatgaggacagagggtaggcccttcttggcccaagttggaggtgagtggataaaaagaattctggcctctgacaaagcagacagtttggcatcacagctgagcagctgtggcccctttaacaggtatcagctcagagtctgggtcctaggaatcacagaagcagttagcaatgaatggcaaatgctagactcaacactttacatcctaaaatgtaagaccatcatgagcactgcaggctccctggggcaggcatcacctgtgtgtcacccctatgcagctgaggatgacgctggtagtgagttctctagggaagggcacctgtgggctctcactggctcagtggcacctgtgcaagagggaacacatgggggcagcccacctgtggaagggtggctggctgctaccagaacttgtgagggttgtcgaagagaaaatacaatgaagaatgttggaagtcgcaaatatgcatttaattccctgcagctgaaggctttccccaagcattacaggcctcccgaagacttacggaaaagttga

SEQ ID NO: 122158 - DNA, 310 bp, Homo sapiens
ttttttttttaaagatacatgaaaagggttttatttatttaacaaacagacaattgaacaaacaaacaatggaagcaagtcatttgccaaaaggaacacagagggtcatgatgatctactcctccaaggatttcagggttcccagacgcctagttttctgtctagttctggaagatgttattcttggggagcaataggtcctcgagtttggggctctttcaggttctctctccatttccccattctgctgcaaacaggcagtcctcagctctggacttctggatcacgacgtcgatatccttctgaattc

SEQ ID NO: 122159 - DNA, 375 bp, Homo sapiens
  misc_feature (1)...(375): n = a,t,c or g
ggtcatgatgatgctactcctccaaggatttcagagttcccagacgcttagttttctgtctagttcttctgcaagatgttattcttggggagcaataggtcctcgagtttggggctctttcaggttctctctccatttccccattgtgcaccatccctgccctggtggagcccccgtgcggaccacagtnnnnnnnnnnnnnnnnnnnnnnnnnnnnnnnnnnnnnnnnnnnnnnnnnnnnnnnnnnnnnnnnnnnnnnnnnnnnnnnnnnnnnnnnnnnnnnnnnnnnnnnnnnnnnnnnnnnnnntcagggcgttcagcttcccttggggccccggccggctaaaaatgaataccgagccgcccacgcgtccg

SEQ ID NO: 122160 - DNA, 376 bp, Homo sapiens
  misc_feature (1)...(376): n = a,t,c or g
ngtcatgatgatgctactcctccaaggatttcagagttcccagacgcctagttttctgtctagttcttctggaagatgttattcttggggagcaataggtcctcgagtttggggctctttcaggttctctctccatttccccattctgcaccatccctgccctggtggagcccccgtgcggaacacannnnnnnnnnnnnnnnnnnnnnnnnnnnnnnnnnnnnnnnnnnnnnnnnnnnnnnnnnnnnnnnnnnnnnnnnnnnnnnnnnnnnnnnnnnnnnnnnnnnnnnnnnnnnnnnnnnnnnnnnnnnnnnnnnnnnnnnnnnnnnnnnnnnnnnnnnnnnnnnaaagggacgccgacccgcccacgcgtccg

SEQ ID NO: 122161 - DNA, 1098 bp, Homo sapiens
tcaacgagacaccgcacgaagacggcgattgttcctgaaggcagattcaaatcgccttcgaggccgcaagcaggcatcaggacagaacactacttcctcccaccgccacacaggctcaagagacactatctttttgaccagcagcttgccctccacaatctgctgtcttagggcactgtagtcatcaatgtggccaatgacatggcggccatgcttattggcaaaggagccatcagtagcatcaccctccagcttgggaggggccttcattactggagaagtatccaaacccaagccatcatccctgccctggtggagcccccgtgcgggacacaggatccgaagatggcagcggaagctccgcagcggccccgaaagcgactgggcagggtgggcacaggctccctcaggggatcctctacagtcaacctggttcttgccccccagcctttcctgctgttttaaggacttccggtggctgcgcttcttgcatggttcctggaaggcaagggtcacaaggctggagtacatggcagagcccttagggatttcaccatccatgtcaacagccaagccaatacgctgttgctccaatacgtaaaaggcacttctgtagggctggcatgagtcagtcagtccaagataaactgaaggagttgaataacatctatccagtgagtcttgcaagacttcaggctctttctcatccagcagctccctgctgagccctagtctctgctcttcttgactttgacccaactctttcaagtccacccgtgttttcatgcttttctcataggaatccccatccagaactagtaaagtcactgaattcccactctttctgaccagatccacaacaagagacactatctttttgaccagcagcttgccctccacaatctgctgtcttagggcactgtagtcatcaatgtggccaatgacatggcggccatgcttattggcaaaggagccatcagtagcatcaccctccagcttgggaggggccttcattactggagaagtatccaaacccaagcctttctgttctgagcctgccctcagatagaaaccatagccattgcttcctttcttcat

SEQ ID NO: 122162 - DNA, 916 bp, Homo sapiens
ttaaagatacatgaaaagggttttatttatttaacaaacagacaattgaacaaacaaacaatggaagcaagtcatttgccaaaaggaacacagagggtcatgatgatctactcctccaaggatttcagggttcccaaacccctagttttctgtctagttctggaagatgttattcttggggagcaataggtcctcaaatttggggcctcttcaggttctctctccatttccccattctgctctcttcaaaggactaaaagctaaaggcgacaaaggattcattcgacaagtcctagtcgtgcgcccttgtgagtgccagaccctgctccctgccaggggacccacgagcgaccctcaccaccatccctgccctggtggagccccgggcggaacacaggatccgaagatggcagcggaagctccgcagcatcccaacagcgactgggcagggtggatacaggctccttcactgggtgaaggcggcacaaagaaccggaagaaccatcccgggagcccaccgggcgttcagcttcccttgggaccccaggcgtctcgggctgggtcgccgaccggggagtttctggggtctctccctctggctccagaatctcctaacgcgcaggtgtccaacgtgaccagcgcgattcaccgctctaatatctctggttttccaaggacttgctcagtcgtcctgccaggcgggccctgcaaacaggcagtcctcagctctggacttctggatcacgacgtcgatatccttctgaattcggtcttgccttgaacacatccccattaaataaatccttggaaaagaagcagccgctatttccaccccacccccctcgcacgctttcagctttcgtaaatattcagttaaaaatgaaacctctggccgaggcaggggctgaaggccaag

SEQ ID NO: 122163 - DNA, 1401 bp, Homo sapiens
ctataggaagggcgcacgcacgaaacttcctccgtcccttgcatcctcagggcccgcccggcaggacgactgagcaaggccttggaagaccggagagattggagcggtaagtcgcgctggtcacgttggacacctgcgcgttgggagattctggagccagaaggatagccgaatggccttcgcccgccctgcccctcgcctgcttcagaaacccccggaaacgccccggtctgcgacccgggttcgagcagccagggggctcaagggaagctgaacgcctggtgggctcccgggatggctcttcccgttctttgcacagccttcacccagtgagggagcctgtgccctccctgcccagtcgcttttggggccgctgcggagcttccgctgccatcttcggatcctgtgttccgcacgggggctccaccagggcagggatcgtggcaatataaagtcctggttcacgctcaggaacgagagctgacccagttaagggagaagttgcgggaagggagagatgcctcccgctcattgaatgagcatctccaggccctcctcactccggatgagccggacaagtcccaggggcaggacctccaagaacagctggctgaggggtgtagactggcacagcaccttgtccaaaagctcagcccagaaaatgacaacgatgacgatgaagatgttcaagttgagttggctgagaaagtgcagaaatcgtctgcccccagggagatgcagaaggctgaagaaaaggaagtccctgaggactcacaggaggaatgtgccatcacttattcaaatagccatggcccttatgactccaaccagccacataggaaaaccaaaatcacatttgaggaagacaaagtcgactcaactctgattggctcatcctctcatgttgaatgggaggatgctgtacacattattccagaaaatgaaagtgatgatgaggaagaggaagaaaaagggccagtgtctcccagaagcccgaggaaacgccctcgtccgcgacccgagccgccgcctcgaggctcaggggaagctgaacgctcggtgggctcctgggatgcatcttcgcgttctttgcgccgccttcacccactgagggagcctgtgcccaccctgcccagtcgctttcggggccgctgcggagcttccgctgccatcttcggatcctgtgtcccgcacgggggctccaccagggcagggatgatgggtagcaaggaagtcggcaaaggcggcgaccctggcgaggaaacttccccagtagctttgttcagcgaatatcccaacgcgcaggtgtccaacactacaattcaccgctctaatctctccggttttccaaggacctggaacttgcacagtcgtcctgccaggagggcccctgaagattga

SEQ ID NO: 122164 - DNA, 504 bp, Homo sapiens; identical to SEQ ID NO: 112318

SEQ ID NO: 122165 - DNA, 1874 bp, Homo sapiens
acatcgatacgacttttttttttttttttttttttttttacatgaaaagggttttatttatttaacaaacagaccaattgaacaaacaaacaatggaagcaagtcatttgccaaaaggaacacagagggtcatgatgatctacttcctccaaggatttcagggttcccagacgcctagttttctgtctagttcttctggaagatgttattcttggggagcaataggtcctcgagtttggggctctttcaggttctctctccatttccccattctgctacaatagataaacaaacaaaaacaattctcacttccagaagatcccgcctgtacgtctgcacgagcccttcaggaggtctggatgtctggttcacaactcccctgcttcttttccagcttttgcttttcccttcccccgctcccgccctaccgccccacgacccgaccaccgcccagctgagccccagaggctccacagcgcagaaggtgcaccagaggccgtgtcagttgccctccctgccggggctcttcaaaggactaaaagctaaaggcgacgatgaattcattccacaagtcctagtcgtgcgccctggtgagtaccagaccctgctccccgcgaggggacccacgagcgaccctcaccaccatccctgccctggtggagcccccgtgcggaacacaggatccgaagatggcagcggaagctcctcagcggcccggaaagcgactgggcaggaatctcctaacacgcaggcgtccaacgtgaccggcgcgactcaccgctctaatctctctgggtttccaaggccttgctcagtggtcctgcccgggcaccggcagcagttttccgtctgtgcctactccacctgctgtccttgttgggtcagcgaacatcgcctccgtctaccactcaatcagcaaacgggaccgccctcgaggacctcacccgccgcttacccccctaacaaattcgcgggcatcgcctccggtcgcctcttcccaaggcctaacgagcgccttcgctggcaacggagttattcgcagctcagcccgatgggcgtctccggggtggcgacgggaaagaagagcctgcaagcgacacaccgagggctccgcgagggacaccgaggccacgagtccgaaggcctggagcgagttgcagcgacccggccgcagctcaccactggactagagatgcgcctttgcgaggtggcagcaagtgaccagtcggtcgtgcgtcgccagagaagctttatgggccacttccttcggcatccccgggggcaggtgcgcggtgcccggggaagaagagggtttgactgcggttctcgacccccggcgaccaacctccaccccgacgacctgaacccaactccctccccaagcactggagatggggcttttccaagggctggggatcttgctgtcctgagaacagctgagcaagggggtcgaggaggagcttgggtggtggaggagaggaaaccggcatgccctgtggcctttatcctgctggtgtggaacagtcagagccctgcagggctgcagagcttctgtactgggcggcatcccagcctgagtgtcagagctcagagagcaggcaccggagcaagtagagaggagggcaccttttggacagaacctgtgggacaagagcgacgtctcatccgttcaggttcctcacaaaatgagagtcaggaagatcagggtgcagacctgatttcccacgaagggctgaaagcagacaaccggagggagagcagcacctgggccaatgaggtagaagacagaagaccacagtgtacttctgccctcaacctcaccccctcccacctacattctccacaccccctgaccaccttcttcagaaacgtaa

SEQ ID NO: 122166 - DNA, 1029 bp, Homo sapiens
atgcaaggattaaatgagttaatgcaggtaaaaactcttggagcagtgcctgcactcagtaagcacctgggaaacaccccagtaccgaagacctccctcgcccagctagaggggaagcagggagcaaccctgctctttttcatctcccagggatacacccggggaaaaccactggctgtcactgccgcagagggactaggctggcccgccagtgagacgagcgctgggggcttcatgaccccacgccacgcggcgtcccaaccgtggaggtgcctcctgacccgacctgcagccaaaccacacgcgaccctttcgcccgtttccttcgaagaacccgtgtttccgctttccagaacctctaagagcacccaccttggtcccggggcccttacccccgacacaccccgggcgggtcccgcacttggagcggaacctgagtgcgctgggcttggggaagtcggaaggattaaagagaaacccatgcgtcgaaccgctgctccaacgcccatcaggttccctaagatcacaggcactcttccactcagactgctgctgatcatgctctgctcggtatgcgggaccagtcattgtctgggcagtcgcctggacctaagtctcctgacgcggacgaccagttgcaaaacagagaccacactgagactgagcaacgtatcagcagcggtcgcagctctgcgcttgcgcctgagagccagctacagcagggctgtgctgggattcactttcgtggaaggttttgcaaagcccctcccctggcctcgggacctgcagcccaccatgcctgagcctcccaccccctccgtgggctcctgtgcggcccaagcctccccgatgagcgccgccccctgctccacggtgcccagtcccatcaaccacccaagggctgaagagtgtgggcgcacggcgcgggactggcaggcagctccacttgcagccctggtgcgggatccactggatgaagccagctgggcccctgagtctggtggggacgtggagaacctttatgtctag

SEQ ID NO: 122167 - DNA, 981 bp, Homo sapiens
ttacagagggaggagccagccacagggcccatcccgtcggtcccgcccctcggggcgaaaaggcattctggagcaaccgaacctgctaacggaacttgggcgcgtaggcggggcccgggtcgagattcgtccaatcaaagctctggcgggggcgaacgcagccagttgcgacatcgtggttggcggcggctgagccggccgctcttgcccccgggagctgccagcccactggctggggaggaccccgaacggaacgccggctgggtggcggggcggggccgcgcccatgcgtccgaagcgtgggccaatgaacggcggcggctgcggcccgggggcggggtccggggcgggaggagaagcgttgggccgcggtcgcggggccgtctcaggctgccgtcccgcccctcccgtccggccgccgccgccgccaccgccgccaccgcctgggggttggttgaggcggacggcggggtccgggccggagtacgtcgttcccgctgcgctaggggaagcgggcaggtgagtgctggcggcggtctctgcgcccgcgcggcccgcggggggaaactcgcgccgcgtctccgagctctgcgaggccgtccctcgccctggccagcgcccctcggccgaagtccggcccgcgcccccgccagggtccccgccggccgctgtggccccggggcttgaaggggcaggtgtgcgctcgggggccagggcgaggagggcccggcggggtcggagggcgccggtcggcctctgcccgggcgcccagggtgcccggggaccagcccccgcctcctcccgcgccgtccagttaggaagacggacgtaggaaataggtcgtctttcttcccacgcgcccctggccgtgctccacacgcgcagtgccctactcaattcctgatcatataataaatgcccaaatgacatgattgtgatggggacgatcatattggagaacttccataggacacaggacat

SEQ ID NO: 122168 - DNA, 454 bp, Homo sapiens
ttgtacgtcttcatctacgatgctgagggcaaaatgctgaacttgacccatacctatcctatccagaagcctgggtcctctgcctacgggtgcctctgccaatacccaggcccaggaggaaatgagtctcaatggataaggacaaggccaaaagacagagacgacattgtaagcatgcccacactccctgggcgtggctggctggtgtcaccttttggagccaacccctggtggtggagtgtggcagctgccctgcctgccctgctgctgtctatcctcatcttcatggaccaacagatcacagcagtcatcctcaaccgcatggaatacagactgcagaagggagctggcttccacctggacctcttctgtgtggctgtgctgatgctactcacatcagcgcttggactgccttggtatgtctcaaccactgtcatctccctggctcacatgg

SEQ ID NO: 122169 - DNA, 390 bp, Homo sapiens
tatgttcatttacacttctgccttcatctagcaatttacgaacagcattaacatccccatctgaacaagcttctgttagactgcgagtgtccacttgtcctgcattgtggctgttttctgctttcatccgtgtcagtgcagcagcagcttcatccagtgcacaactaactgaggatgtcagtctccggagtacctcaggatctgctgcttctagcaatgcttctagtcgtgcctgtgtctctggatccacagtgcgtaagtctgctccttctgcagtacttgataagaatatctctgatgttgttttaagcactgggttatccagatcttcttggtccaaaataaatgattcaacctcggacacttcgtcctcgtcactgccagaggcac

SEQ ID NO: 122170 - DNA, 850 bp, Homo sapiens
ctggcacctgtgttcaagttaattccaatgcctgtgtcaatggcatcttcctgtatatggggtgggcagcgctcagcagcattcagttcactaatagggtgaagctgttgttgatgccagcaaaacaccagccagacttgctactcttgcggcatgtgcctctgaccagggtccacctcttcacagccatccagcttgcctgtctggggctgctttggataatcaagtctacccctgcagccatcatcttccccctcatgttgctgggccttgtgggggtccgaaaggccctggagagggtcttctcaccacaggaactcctcgggctggatgagctgatgccagaggaggagagaagcatccctgagaaggggctggagccagaacactcattcagtggaagtgacagtgaagattcagagctgatgtatcagccaaaggctccagaaatcaacatttctgtgaattagctggagtaggagtctgggagtggagaccccaggaaacagcatgaggtgcttactcaggaagtcaggacatttttggcctttggcttaacttccagatgctcagtcggcttggggaaggactgaagggcagctgccaagacctcagttacctcctgacctgagggtggagagtggcaggaagcaagcatgtttgctgtgcacttaggaaaggctggtgagccagagggactgatcaggccccattcactctctactcattaaaaggtcctgagccacgaagcgcttcccattttgaactttctgtcctcacagattctgtttgacagaatctaagggccatcagggaactcttttcatcttgcaaagagaaaaagccagtt

SEQ ID NO: 122171 - DNA, 3402 bp, Homo sapiens
atgcctgcagattcatttgaatctccattgacgctagctgcctgtggaggacatgttgaattggcagctctacttattgaaaggggagcaaatcttgaagaagttaatgatgaaggatacactcccttgatggaagctgcccgggaaggacatgaagaaatggtggcactactcttagcacaaggagcaaatataaatgcccagacagaagaaactcaagaaactgctcttactttggcttgctgtggaggattttctgaagttgcagactttcttattaaggcaggggctgatatagaacttggctgctccacacctctgatggaggcatctcaggagggacacctggaattggttaaatatttgctggcttctggcgctaatgtgcatgctacaacagcaacaggagacacagccttaacctatgcttgtgaaaatggacatacggatgttgcagatgttttacttcaagcaggggctgatttagacaagcaggaggacatgaagactattttggagggcatagatccggccaagcatcaggaacatgaatctgaaggtggaagaacacctttgatgaaagctgcaagagctggtcatttgtgcactgtgcagtttcttattagcaaaggtgccaatgttaacagggctacagccaataatgatcatacagtagtgtcgctggcatgtgcaggaggccacctggcagttgttgagcttctcttggctcatggggctgaccctactcatcgactcaaggatggttcaacaatgctcattgaagctgcaaagggtggccatactaatgtagtttcttatctgttggattatccaaataatgttctgtcagttcccaccacagatgtgtctcagctccctccaccttctcaagatcagtctcaggtgccacgtgtgccaacgcatacacttgccatggttgtacctccccaggaacctgacagaacttcacaggagaactctcctgcccttttaggagtgcaaaaaggtacatccaagcagaagtccagttccctccaggtagcagatcaggacctactgccatcttttcacccataccagcctttggagtgcatagtagaggagactgaaggcaagctgaatgaactgggacaaagaattagtgctattgaaaaagcacagcttaagtcactggagttaattcaaggtgaacctctgaacaaagataagatagaagaacttaaaaagaacagagaagagcaagtccagaagaagaagaaaatattgaaagaactgcagaaagtggaaaggcagttgcagatgaaaacacagcagcaatttaccaaagaatacttggaaaccaaaggtcagaaagacacagtgtctctacaccaacagtgctctcatagaggagtcttcccagaaggggaaggagatggtagtctcccagaggatcacttttcagagttacctcaggttgacacaatcttatttaaagataatgatgttgatgatgagcaacagtctccaccatcggcagaacagattgattttgtcccagtccagcctttatcatctccacagtgtaacttttccagtgacttaggttctaatgggacaaattctcttgaacttcagaaagtatcaggtaatcagcagattgtaggacagcctcagattgctattactggacatgatcaggggctgttagttcaagaaccagatggactaatggttgcaactccagctcagacgcttaccgacactcttgatgacctgatagcagctgtgagtaccagagtgcccactggttccaacagttcttctcagaccacagagtgtcttacacctgaatcctgttcgcagactacaagcaatgtggcttcccaatcgatgcctcctgtgtatccttcagttgacattgatgcacatactgagagcaatcatgacacagcattaacactagcttgtgcaggtggtcatgaagaacttgtatctgtgctcattgcacgggatgccaaaattgaacacagagacaaaaaaggtttcacaccactaatcctggcagcaacagcagggcatgttggagttgttgaaatccttttggataaaggtggagatatagaagcacagtctgaacgaactaaggatactccgctttcattggcatgttctggtggacgtcaggaggtggtagacttgctgctggctcgaggtgcaaataaagaacataggaacgtatctgattatacaccactgagtctagctgcgtctggaggatatgttaatatcattaagattctgcttaatgctggggcagaaattaattcaaggactgggagtaaactaggtatttctcccctgatgttggctgcaatgaatggacatgttcctgcagtaaaattgctgctcgatatgggttcagacattaatgcccaaatagagaccaatcggaacacggctctcaccctggcctgtttccagggccgagcagaagtagtgagtttgcttctggaccgaaaagccaatgttgaacatagggcaaagacgggtcttacccccttgatggaagcagcttctggagggtatgcagaggttggaagagttcttcttgataaaggagcagatgttaatgctccccctgtgccttcctcaagagatactgctttaacaatagcagcagacaaaggtcactacaaattttgtgaactcctgattcataggggagcccacattgatgttcgtaacaaaaagggaaatacgccactttggctggcatccaatggaggtcattttgatgttgtgcagttgctagtgcaagcaggtgctgatgtggatgcagcagataaccggaaaatcacacctcttatgtcagcatttcgcaagggtcatgtaaaagttgttcaatatttggtaaaggaagtaaatcagttcccttctgatatagaatgcatgagatacatagcaacaattacagataaggaactgttgaaaaaatgtcatcaatgtgtcgaaaccattgtgaaggctaaagaccagcaagctgcagaagcaaataagaatgcgagtattcttttaaaggaacttgatctggaaaaggaacaaagttcctcaccagcaacggaacaaagctggacggagaatgactttgacgagctgagagaagaaggcctcagacgatcaaattactctgagctacgggaggaaattcaaaccaaaggcaaagaagttgaaaactttgaaaaaaatttagaagattgtataactagaataaccaatacagagaagtgcttaaaggagctgatggagctgaaaaccaaggctcgagaactacgtgaagaatgcagaagcctcaggagcccatgcgatcaactggaagaaagggtatcagcgatggaaaatgaaatgaatgaaatgaaatga

SEQ ID NO: 122172 - DNA, 4614 bp, Homo sapiens
atgaagctgccaggccaggaagggtttgaagcctccagtgctcctagaaatattccttcaggggagctggacagcaaccctgaccctggcaccggccccagccctgatggcccctcagacacagagagcaaggaactgggagtacccaaagaccctctgctcttcattcagctgaatgagctgctgggctggccccaggcgctggagtggagagagacaggcacgtgggtactgtttgaggagaagttggaggtggctgcaggccggtggagtgccccccacgtgcccaccctggcactgcccagcctccagaagctccgcagcctgctggccgagggccttgtactgctggactgcccagctcagagcctcctggagctcgtgggctctactcatccaagaaaggcttctgacaatgaggaagcccccctgagggaacagtgtcagaaccccctgagacagaagctacctccaggagctgaggcagggactgtgctggcaggggagctgggcttcctggcacagccactgggagcctttgttcgactgcggaaccctgtggtactggggtcccttactgaggtgtccctcccaagcaggtttttctgccttctcctgggcccctgtatgctgggaaagggctaccatgagatgggacgggcagcagctgtcctcctcagtgacccgcaattccagtggtcagttcgtcgggccagcaaccttcatgaccttctggcagccctggatgcattcctagaggaggtgacagtgcttcccccaggtcggtgggacccaacagcccggattcccccgcccaaatgtctgccatctcagcacaaaaggcttccctcgcaacagcgggagatcagaggtcccgccgtcccgcgcctgacctcggctgaggacaggcaccgccatgggccacacgcacacagcccggagttgcagcggaccggcagcgatttcttggacgccctgcatctccagtgcttctcggccgtactctacatttacctggccactgtcactaatgccatcacttttgggggtctgctgggagatgccactgatggtgcccagggagtgctggaaagtttcctgggcacagcagtggctggagctgccttctgcctgatggcaggccagcccctcaccattctgagcagcacggggccagtgctggtctttgagcgcctgctcttctctttcagcagagattacagcctggactacctgcccttccgcctatgggtgggcatctgggtggctaccttttgcctggtgctggtggccacagaggccagtgtgctggtgcgctacttcacccgcttcactgaggaaggtttctgtgccctcatcagcctcatcttcatctacgatgctgtgggcaaaatgctgaacttgacccatacctatcctatccagaagcctgggtcctctgcctacgggtgcctctgccaatacccaggcccaggaggaaatgagtctcaatggataaggacaaggccaaaagacagagacgacattgtaagcatggacttaggcctgatcaatgcatccttgctgccgccacctgagtgcacccggcagggaggccaccctcgtggccctggctgtcatacagtcccagacattgccttcttctcccttctcctcttccttacttctttcttctttgctatggccctcaagtgtgtaaagaccagccgcttcttcccctctgtggtgcgcaaagggctcagcgacttctcctcagtcctggccatcctgctcggctgtggccttgatgcttttctgggccctaaccacaccaaagctcatggtacccagagagttcaagcccacactccctgggcgtggctggctggtgtcaccttttggagccaacccctggtggtggagtgtggcagctgccctgcctgccctgctgctgtctatcctcatcttcatggaccaacagatcacagcagtcatcctcaaccgcatggaatacagcactgcagaagggagctggcttccacctggacctcttctgtgtggctgtgctgatgctactcacatcagcgcttggactgccttggtatgtctcagccactgtcatctccctggctcacatggacagtcttcggagagagagcagagcctgtgcccccggggagcgccccaacttcctgggtatcagggaacagaggctgacaggcctggtggtgttcatccttacaggagcctccatcttcctggcacctgtgctccaagttcatttccaataggcctgtgctctataggcatcctctcctcgtatatgggggtggccagccgctccagacagcatttcagtttcacttaataggggtgaaagctgttgcttgatggccagccaaaacatccaagcccagacctgcctacttcttggcggcatggtgcctctgaccagggtccacctcctttacagccatcccacttgccctgtctggggctgctttgggataatcaaggcgtacccctgcagccatcatcttccccctcatggcttgggccatgtttctattcctgcagttgctgggccttgtgggggtccgaaaggccctggagagggtcttctcaccacaggaactcctctggctggatgagctgatgccagaggaggagagaagcatccctgagaaggggctggagccagaacactcattcagtggaagtgacagtgaagatgaacgcagctcctcaccagcaacggaacaaagctggatggagaatgactttaacgaattgagagaagaaggcttcagacaatcaaacttctctgagctaaaggaggaagttcgaacccaacacaaagaagctaaaaaccttgaaaaaagattagacaaatggctaactagaataaccagtgtagagaagtccttaaatgacctgatggagctgaagaccatggcacaagaactatgtgatgaatgcacaagcctcagtagccgattcgatcaactggaagaaagggttgaatcatttattttggaccaagaagatctggataacccagtgcttaaaacaacatcagagatattcttatcaagtactgcagaaggagcagacttacgcactgtggatccagagacacaggcacgactagaagcattgctagaagcagcaggaattggcaaattgtcaactgctgatggtaaagcttttgcagatcctgaggtactccggagactgacatcctcagttagttgtgcactggatgaagctgctgctgcactgacacggatgaaagcagaaaacagccacaatgcaggacaagtggacactcgcagtctagcagaagcttgttcagatggggatgttaatgctgttcgtaaattgctagatgaaggcagaagtgtaaatgaacatacagaagaaggagaaagcctgctgtgtttggcttgttcagcagggtattatgaattagcacaagtattgcttgctatgcatgctaatgttgaagatcgagggaataaaggagacataactcccctgatggcagctttcagtggaggttacttagatattgtgaaattattacttcttcatgatgctgatgtcaactcccagtctgcaacaggaaacactgcgctaacttatgcatgtgctggaggatttgttgacattgttaaagtgctccttaatgaaggtgcaaatatagaagatcataatgaaaatggacatactcccttaatggaagcagccagtgcaggtcatgtggaagttgcaagagttcttttagatcatggtgcaggcatcaacactcattctaatgaattcaaagaaagtgctctaacacttgcttgctacaaaggccatttggatatggttcgctttctacttgaagctggtgcagatcaagagcacaaaacagatgagatgcacactgccttaatggaggcctgcatggatggacatgtagaggtggcacgtttgcttttggatagtggtgctcaagtgaacatgcctgcagattcatttgaatctccattgacgctagctgcctgtggaggacatgttgaattggcagctcctactttattgaaagggggagcaaatcttgaagaagacaatgatgaaggatacactcccttgatggaagctgcccgggaaggacatgaagaaatggtggcactactcttagcacaaggagcaaatataaattcccagacagaagaaactcaagaaactgctcttactttggcttgctgtggaggattttctgaagttgcagactttcttattaaggcaggggctgatatagaacttggctgctccacacctctgatggaggcatctcaggagggacacctggaattggttaaatatttgctggcttctggaaacactgcgctaacttatgcatgtgctggaggatttgttgacattgttaaagtgctccttaatgaaggtgcaaatatagaagatcataatgaaaatggacatactcccttaatggaagcagccagtgcaggtcatgtggaagttgcaagagttcttttagatcatggtgcaggcatcaacactcattctaatgaattcaaagaaagtgctctaacacttgcttgctacaaagattcattactctaa

SEQ ID NO: 122173 - DNA, 469 bp, Homo sapiens
ctgatcacgccaagcttggcacgaggacctcgggtatgcgacctcactcgctgagcctctgtttcttctcctcatcttacgacattcttatgaggatcactaaagacagggtgaagaacctcacatgcatcacttataccatccttcccacggacttacagccagggtgtgggttacctaggagcttttatccctccagcaagcctaccagcttctggctctgggcttgtaagctatttccaccgctacccatttccttcaatccttcacctgcccattccaagacagcccatggccactccggtaagcacacggaggcggggatgtgatggagctaaaccggcgaggggataacgggcaggtgttgttttgtcagcataaaggcaccgcccctccccagctcgggtcctgtggggggtcctgtaggaggttgattctacccttgtacagcacagggcccaggccccta

SEQ ID NO: 122174 - DNA, 525 bp, Homo sapiens
atggccctgctccccactgttttgtgtctatgggcacaggcacagttcttagtagacctaggccaaagcaactccaagcaccaggagcaccagttggctccagatgttgcctttgccaaaatgaaaggcgcttgcgtgtgcgccgccggcttccgtggatggcgctgcgaggagctctgcgcgcctggcacccacggcaagggatgccagctgccgtgccagtgccgacacggtgccagctgcgacccccgcgccggcgagtgcctctgcgcacctggctacaccggcgtctactgcgaggagctgtgccctcctgggagccatggagctcactgtgagctgcgctgcccctgtcagaatgggggcacctgccaccacatcactggcgagtgtgcctgccccccaggctggacggtccgtttagggccctccttctccaggaagccttcttggatgtctgcccagggagacaagcatctctttgataatcagcagcatacagctttgtctctacctgttacttga

SEQ ID NO: 122175 - DNA, 1053 bp, Homo sapiens
atgctgataatgacatttcatggcctgttaccctgcatgcagatggcctgcaagtggcagctccgagtgcttgttgccggcatccgctgtgacagcacgtgtccacctggccgctggggccccaactgctctgtctcctgcagctgtgagaatggaggctcctgctccccaaaggatgggagctgcgagtgtgcccctggcttccgaggacccttatgccagagaactgtacatattctctaccctcgtggttgtggaatccgtgatgttggtgaaagtggtaatagaaagcagaaggctgtggaacagtacagggagcactggactgtgagtccagaagtacagtgctcagcctcccacttctcatctgtgagacctaagtcagcttgcccacccgggttctggggccccgcctgcttccacgcatgcagctgccacaacggggcgagctgcagcgccgaggacggggcctgccactgcacccctggctggactggactcttctgcacacagcgatgtgccccaggaacctttggctatgggtgtcagcaaaaatgtgagtgcatgaacaactccacctgtgaccatgtcaccggcacctgttactgcagccctggcttcaaaggaatcaggtgtgaccaaggcatcatgctcctgttattcctcattgtggtgctgctgggcctatttgcctggcatcggcggcggcagaaagagaagggccgagacctggctccccgtgtctcctacacacctgccatgaggatgaccagcaccgactactccctctcagtggagctaacagcatacccacttaccggtagagtggacgcccagattcacccctcaggacagaagcactcattcttccccagctgccagaaatttagtggctcgcagggagaggtctgtgccgtttcctgtgcagcagggacctatggccccaactgctcgtccatctgtagctgtaacaatggtggcacctgctccccagtagatggctcctgtacctgcaaggaaggtaggatcatctgcctgcagcacaaacaatga

SEQ ID NO: 122176 - DNA, 971 bp, Homo sapiens
  misc_feature (1)...(971): n = a,t,c or g
gcatccgctgtgacagcacgtgtccacctggccgctggggccccaactgctctgtctcctgcagctgtgagaatggaggctcctgctccccagaggatgggagctgcgagtgtgcccctggcttccgaggacccttatgccagagaatctgcccccctgggttctatggccactgctgcgcccagccatgccccctctgcgtgcacagcagcaggccctgccaccacatcatcggcatctgtgagtgcctcccaggattctctggagctttctgcaaccaaggtcacagccccaactgggaacccgagccctggatggtacagatcatgagaaatgacagatccccgatgcagctgcagggcctttctggggagagcacacgccacacaggnccggtgctgctcggcacagatgccagtgagacccaggtgattggatttgtgaacttggctcaatttctcatcatctgccctaggaaactgcattataaggcccagaacagcaagaaatcaaatgggtcagatgcttccagtgattggaaggattggggcatttgggacagagagagctgcgaggagctgtgccctcctgggagccatggagctcactgtgagctgcgctgcccctgtcagaatgggggcacctgccaccacatcactggcgagtgtgcctgccccccaggctggacggtgggagctcctgctgagccctatgctgtccagttaagtcatgaagagctgctggagaagcacagcccggcaagcctaccagcttctggctctgggcttgtaagctatttccaccgctacccatttccttcaatccttcacctgcccattccaagacagcccatggccactccgtttgagaaaaattcctctctgagccccaaggcactggaaggggagacagcgacctgcgtgggtatcgtggggaaggcgtgccccttggtggccctgacgctctgctag

SEQ ID NO: 122177 - DNA, 867 bp, Homo sapiens
atggtgcaggccccggagacagccaatatcacagctggacaattccatcctcatgaaccctctagcctggcaatagccagcagtacccgagctctgagtatttcaagccaagccagaaagaaaatccagatattggcagctccatttcccaccacattcgtcatcaccgacatcatggaggaagagcctggagcctatgtacaggtgtacatgtccacctctaaccccgtacgggtgtacgtgcccacctctaagcccatacaggcgtacgtgcccacctctaaccatgtacaggcgtatatgtccacctctaaccccgtacaggtgtacgtgcccacctctaaccccatacaggatgttttcatctccgttgcacaaggaaataacttcagctcagagaagcccagaaccctcctcaaggccacacagctcgaaagcagcagcactgaggtgacagcccagaattatggaaaaacaaagaatatatggtccttctcccacctctgtgcaacctgcatctcctccaccctgcttagacgatcctcggaagaaagcagaaaggccagaccacagggcaacagggaaaaggcatctgccagagacatcgctctagcagagctggtcaggagagctgtggagaaccctgaggactcagaggctccagctccagctccagcagccctgagtcctgcttctgaacacagaacagaccccatacaggaaacaaagaaagcaagaaagagctcagacaatgatgggagcactccactggcacagacaccgactcgaaggagctcccagtggccacgtctgggacagttccagcaacaagaagatgacagcagtggactctactccacaggataa

SEQ ID NO: 122178 - DNA, 1959 bp, Homo sapiens
tcattagttattgctatatcatctcttttgacatttctagatctaaaattttatgactgtaatattcttcagtaaaataatatacaatcctcttttctgctgaatatgtgatccttactgttcatagaagttgctggcttttaaaaataaacaaacagtttgattcaggctaaatggagaaaaagtcacagatttagtgattcaaactacagaagtaaatgacatgattgaggttggagatgaggtatttactggaacatgctttgaggagacctttaattctctattgtaagtttgcacatggagtttataaaagcattttctaaatttctgcctcccttatatgatcctgaacaagtatcgaaaccagtattgcacattcaatgatgatattcaaggtaacaaaattttcactgcatatggatcaataacatgtctgaaattagttcataattgtatcaaaaagatatggctggttgattcaaaaggattaatagttaaggtaagaatttgtcatttttaaccagaataaagataactatgccattctggatggccatcgaacctagaagccattgttcaagaaataaaaccaactgccctcataggtaagcattttctcctctcccttctcccctaccccttattttgacctgattgtttttttaatgaacggcctattatttttgctttgagtaatccaactagcaaagcagaatgttctgcagagcagtgctacaaaataaccaaggtaaagtaaaactataacagatattttaataatcaaatttttattcattatagggaggcgaccctatatcctggccaaggcaacaattcctatgtgttccctggagttgctcttggtgttgtggcgtgtggattgaggcagatcacagataatattttcctcactactgctgaggtattgtaaaatcctctaagtttaccaagggtttaaaataccaagtgtgctcagcctaggaataccattagagatgtttctctgaaaattgcagaaaaggtaaaaccactcttgttcaagcttcattatttttccttccttttcttgctaaatatgcaagaagcatttgtccgctcccagatgtatagtactgattatgaccagatttctacctgatttgttattcttggcctgaagaggtgcagaaaatacagccccaaagttgacccagtaggataatagcaaacatttcctaaccctattaatgaggtctttaaacctttcataatttttaaaggttggaatccttttataatgattcataagacacttagattaagattttactttaacagtctaaaaattgatagaagaatatcgatataaattgggataaacatcacatgagacaattttgcttcactttgccttctggttatttatggtttctgtctgaattattctgcctacgttctctttaaaagctgttgtacgtactacggagaaactcatcatttttatacaggacacttaatgggaagacccaaaattactaataaattggacattaccaacattaaaactcataattattttgttgaccattttgttaaaatctacttttcaaaaaaaaaaaagctagaaatgaatctaggcgtaggtgaacttttgctaagcagaaataacactactttgttgcctagagaaagataacttctcaagtatttttattccagtcctagatcatatatgtccttttgtgcaacggaattctaacagttctaaggggaaagatcactggctgtttacagcggccttttgcaggccttaggatttttaatattcttttgtccattggttacatctcataggggtaaagctcttattaccttgatcctgagtcaggaaatcccacctggaaattcacctttttttcccccttggatcaaacatcccatcctgtagttaccatactgtggttacggggatttggg

SEQ ID NO: 122179 - DNA, 2121 bp, Homo sapiens
agcccggcccaggtcatgttccagtgtctgtggaagagctgcgggaaggtgctgagcacggcgtcggcgatgcagagacacatccgcctggtgcacctggggaggcaggcagagcctgagcagagtgatggtgaggaggacttctactacacagagctggatgttggtgtggacacgctgaccgacgggctgtccagcctgactccagtgtcccccacggcctccatgccgcctgccttcccccgcctggagctgccagagctgctggagcccccagccctgcctagtcccctgcggccgcctgccccgcccctgcccccgccccctgtcctgagcaccgttgctaacccccagtcctgtcacagtgaccgtgtctaccacgggctgcctgacgcccgcccgcctggagccgcatgccacggaggttggagcctgcccacccgccttgtcctccaggatcggagtcatcctgaggaagccccgcggcgactcgaataagtgccggaatgtgatatggcatggaagcgccgggacctcctggtgcacagcctgccgctggaagaaagcctgccagcggttcctggactaaagtccggctcgttcaagaacataaagctaccaccttctccctccccaccccctccaggcccgggggctgaaacagcccgaaggaacaagccccagggggctggcccttcaccagctgcagggtctgcttttaactgggttggggtgccggacttaacccttgaacctttccccccgccaggtccaggggaggggtccccacccactcaaagtgccctctaaagaaacccagctttttgcactaaagcccaaacccacacccgctgtccccctttacgcccaagggccctgggggcagccacccttcccgcctgtcggcccgtagatttatcaagggtgttatgggcccagctttggggggccagtcccgatgcactttgaggggtgttggagaggggactcccccactcgcacttaactcaacggctctcgggccctggggctgtttttacccatgtttgtttttgaaactccaggtgtctcacgtctgggctgccaccaggcgaagagagaaattaaagatttgaggtttttccagaagctttgtctgcctctcgggaggaaggccgtggggctgggaccctgtggtgggcaagtgggtggagtctggcagctgcccacagagggccgagggtcacccgtcggccgccgccaccccaggcgaggccggaggaaggatcatctgagacgcaggaggcatctgctggagcagcaatttcccaatttattgaaagtgatcgctttgcaaggatgtctaagctaatcccgtcacagaaagggaaacgcacaggcgcctaggcagaaacttggagactcaccgcagaggccacgtgaaacccacggccacagagaggcaggaacggcagagccatgattttcccaccgagcgattacgagaacctcttcccccaatagtagacacatctccaatacaaacacaggtttataataagtaataggaagtcaatataatatagattatccccagaaaaaaatcaacaatcttcaaacactgccctttttttgtgtgttttgtttttgttgacaggttgaaagcatgttgaaaaaaataaatatttaagaaaagcacacacagcaccctcactacaagtagttttaaaagggctgcatacaaaacacaatataagatctaaaaaaaacccccaccattaagtatggctttcttaagagtcgcacatgtcacagaatgagctaaaataagattacttcttttataatattgcaaaaagttccagtttttgcattttctcagttttttaaagaggaagatgtgcaaagttggaagcagtaagctgcgtcttatgagtcagttccctacgtagccctggcagtgtcctgtgtcccaaagctcagagagccccagtgtacaacctggtcaggatccagagcttgacagaaaaatcgtggtgtccctgccccctccccgcccccaaataacaccatccccaatggactgtatttcccactttggtgttgtaaacaccaaaatacaaacagacacaaacaaaaata

SEQ ID NO: 122180 - DNA, 456 bp, Homo sapiens
agatgggagttttatctataagccctgactggggctgctgcctttctttcagagatgccctgcccagagagcagttttacaggctttttacagacagatcagaccgagtccctgaaaactccgtgacagatgtttgtcacattgaaagtaaaatggagcctctccgcctcggcccacaaacgtctccattatgagaccaagcctggtctgctcgttcaccactctggtctttaatttcctcaaatgctcagagctctctcgtagcttagggtctttggagttgctgtttcctctccctaaatggttcctctcaatccttgcataattagtcattgagatatcagcttaaatagcacctgttcagtgaggcatgttgttcaccaggcgttctgagggagttatgtcgtcccttttgatctccgggtacggaccggaatctcgtaatgcatggtcatg

SEQ ID NO: 122181 - DNA, 1413 bp, Homo sapiens
atgaaagcccagtccacagcctccatgcccccggcccggcccgccccgcgcgcgtttcctgcgccgcagcccggacgtcgagaagatacccttcgcttaaaggccctgcgatgtccgcggccgccctcctgcaggaggtgctcggaggcgcgccgcgtccctcgggcctgggtgaggcggcggctccaggcaagacccggtcgtttcgcccccgggacttttacttgcggagtccgcgttcctacggcaccaggccctgaaaaagcccccagtcatcgcctcggggttcggcacggccagacccgtggtcctgctgcctccgcccgagccacccgtgaagcgcagagcgcgcggggtcttggagagctcgcggcacgcggctcccaggcgggtcttccacttgggaagggagcgcgaacagagccaggagggccctgcatggccaaagagaggaaggccagctccgtctccgcagaggacggctacatggaggccagcagcgggcggaggaaagtgaggatccgcagcaacttcgtgagcgagagcggggcccgcgaggcgcgggaagcggcggggttaggagcccagggagaacaggagagctggccgcccagcgacgcgcgggaggccgcctggcaggcgctgctgccctcccgcgtgatccccacgtccatcgaagagatcatcgcctctctgcagtccgaggcccagctggcctccgaccagaccatcaaagagctcatacggagcgtccttggccagaactacgacattacaatggaaattttctgtgaatctaataagaaaacaaatcagggatgcccaatgaagagccttagcaaagagaagaaaggcctcggtgcccctacttctgacataggctccatgctctacgacatagttaaggttggggaatttctcctggataatatcgtgaagagtgttttccaacttggttccattctctccgtcactttcagtcccattgtgatgagctgtgtacctcagttggaaatgcagaaatcacctgcctactgcattgatctcgctgggagctgcagaccggagctgttcctattcagccatcttgccagcaggtatttctttatagcaacacaagaacagcctaatacaatttccagtatcaacgggctgttacaagttccccctaccccttcccagtgggatggagacagtggagtgtctaaactttcaacatcgtccagaagtaaagaggccactcgctccctcttccctctggtgtcaatggaggccatgtggagaacagtaatgagacactcctattctttccaactaggatgggatcagcagaggcctagtggggagccaaaactcctagtcccaccatgcagtaacaaggaggcccccatccctggtgccagtaaaggctga

SEQ ID NO: 122182 - DNA, 1756 bp, Homo sapiens
atgaaagcccagtccacagcctccatgcccccggcccggcccgccccgcgcgcgtttcctgcgccgcagcccggacgtcgagaagatacccttcgcttaaaggccctgcgatgtccgcggccgccctcctgcaggaggtgctcggaggcgcgccgcgtccctcgggcctgggtgaggcggcggctccaggcaagacccggtcgtttcgcccccgggacttttacttgcggagctccgcgttcctacggcaccaggccctgaaaaagcccccagtcatcgcctcggggttcggcacggccagacccgtggtcctgctgcctccgcccgagccacccgtgaagcgcagagcgcgcggggtcttggagagctcgcggcacgcggctcccaggcgggtcttccacttgggaagggagcgcgaacagagccaggaggtagctcctctcgcagggccctgcatggccaaagagaggaaggccagctccgtctccgcagaggacggctacatggaggccagcagcgggcggaggaaagtgaggatccgcagcaacttcgtgagcgagagcggggcccgcgaggcgcgggaagcggcggggttaggagcccagggagaacaggagagctggccgcccagcgacgcgcgggaggccgcctggcaggcgctgctgccctcccgcgtgatccccacgtccatcgaagagatcatcgcctctctgcagtccgaggcccagctggcctccgaccagaccatcaaagagctcatacggagcgtccttggccagaactacgacattacaatggaaattttctatgaatctaataagaaaacaaatcagggatgcccaatgaagagccttagcaaagagaagaaaggcctcggtgcccctacttctgacataggctccatgctctacgacatagttaaggtctgctggagtttgctggagatccgctgcagactcagtttgcctgggtatcaccagtggaggctgcagaacggcaaagattgctgcctgttccttcctctggcagctttgtctcagaggtgcacctgccaaatgccagctggagctctgctgtatgaagtgtctgtttacccctgctgggaggtgctctgtgcccagagagatgggagttttatctataagcccctgactggggctgctgcctttctttcagagatgccctgcccagagaggaggaatctagagaggcagtccggctgcagtggccttgctgagctgcaatgggctccacccagtttgaacttcctggaggctttgtttacacagtgaagggaaaaactcctactcaatcagtgcctcatcccattgtgatgagctgtgtacctcagttggaaatgcagaaatcacctgcctactgcattgatctcgctgggagctgcagaccggagctgttcctattcagccatcttgccagcaggtatttctttatagcaacacaagaacagcctaatacaatttccagtatcaacgggctgttacaagttccccctaccccttcccagtgggatggagacagtggagtgtctaaactttcaacatcgtccagaagtaaagaggccactcgctccctcttccctctggtgtcaatggaggccatgtggagaacagtaatgagacactcctattctttccaactaggatgggatcagcagaggcctagtggggagccaaaactcctagtcccaccatgcagtaacaaggaggcccccatccctggtgccagtaaaggctga

SEQ ID NO: 122183 - DNA, 1275 bp, Homo sapiens
atggcgcgatctcggctcactgtaacctccgcctcccgggttcaagcgattctcctgactcagcctcaaatctcatccaaatgtcacttcttagagttttgcttctggaaatggttctcacactcagaacaactagaaagcctagtgaaatataactatatccatttagaggcatcagagagatacccaatcagtgaggaaaacagggctgccaatatgctgtcttcacgggacgtgataatggatcattcttggcatttcccactcattagatggattaatttaggggcattttctgtccttggtataatcattgagaagggaatgagaatagctgctgcattggatgaattacagcacagggtccagaacttagatgtgaaaaaagaaaaggagaaattgaggatggaaagagaggtgaaaagggggttgagattgaatggtaaatttaattctctcgtgttaaacgacggtgtaaccgaggttgaccctagtgaagaaccacaagagaacactggcataacaccatatcacgatggtcccgtgaagacatggaccagagaaggtggagccgcggatatgttagacatagcggagtttcgtcgtggcgccaataacaagagacgctcagacccaggactcagtcctgccacccctgtgacttgggcaagcaccatctgtcaagtccaggttgggccaggctgtctaagagaaggagaagctaaccgaccagcagagacggtgaaagggctggcccgatttgcgcaaccgccagacgagatacgcattgctgacggggaattcgtttggcgtccgaaatgtatccgctcacttgcttttggagaagctgattatatcgtcggggttcactggcgaggattgcgctggttaactgcagaaggaatgcgctttgacatgatgggttttctgcgcgggctggattgcggtaagaacggtgaaaccactgtaatgataggcaattcaggtaataaaaaagccggagctccctttccggcacgtctcattgccgtatcacttcctcccgaaaaagcattaatcagtaaaacccgactgctcagcgagaatcgtcgaaaaggacgagtagttcaggcggaaacgctggaagcagcgggccatgtgctattgctaacatcattaccggaagatgaatattcagcagagcaagtggctgattgttaccgtctgcgatggcaatttgaactggcttttaagcggctcaaaagtttgctgcacctggatgctttgcgactatag

SEQ ID NO: 122184 - DNA, 6294 bp, Homo sapiens
tcaaacccttgatccagttgcagtcacagacaactgggcaccagggttcttggctccagctgtgcctgtgaagcctccacctctgacaggtggtggctcaagtctccactccaaggcccgtgaggacaggccacctgggtgggagcaaggtttctctaagttttccttaaaatgccttccgtgtatctgttcttcatcttcctgagagcacagtgtatcagacttgaaggggtggcctgcccctccacacctgtgggcgtttctcatcaggtgggacaagagaaggaggggtttgctggagatcatggggatgagaaccactgtgctttcttcatcagttaggccagcacaggctacatcgagagcaaagcaggtgagctgatcctccaatgagtacaacgtgctgttgtaaggttgctggcagtcagacaggtcatgggggagtgaaggagtcaagtaaacttcatccagggagtcctgtgggacgtcctgttcctccacctctggcagatccgggctcagcctggggcattgtgggtcttggtcttcttcttcttcttgatttttttcaatgtctgcaacaaagtcagacagggacagacacattaagtctattcccctattcatgcaacaatccactgtccaatctgtccccatcaagagccaagccaacatgctgttcctccaatgagtaaaagtacttctgtagggctggcatgagtcaggcagttcaagataactggtaggagtcgaataatatctatccagtgagtcctgcaagacttcaggctcttccacttccaacagctccctgctgagcttgaagaagtaggaaaaactgggacatgttgcctctcgatcgtcctttttcacttgatcacactgaggtccagcaagatgatggacagatgagctaaaacaagccaacttagaagacacagaaaatggagataaattcagtgaaacctgggtcacatcttccactgagaggtagacaagggtgacactggcctgggatgctaactggagctttatcaccttcacaatggagtactcactacctatgtcaagagccaagccaacttgctgttcctctaatgagtgaaaggtgctcctgtaagacctcctttcctctggtctcggttgagacactgcaaagggcatcgtcctggagcatttctcctctccccaaggcccctcgaaggaaggatgggcggacggaagcttcaccccgaagtggtcaagcgcgcagagctccagcttccgcaggagcatttcccggtgtctctcatgggtaagagtgggtcctgcaggataatgcctcccgttccctgaggagcagtgctggagatgcccatgtggccagctcctaggccacgcgacccaggccctccaggaggagcgaggagtcctgggccctgaaccagccccctggacccggggctgggggccttgctgtcccaaggacagctggggagaaagaggaagccggctgagatgtgtaaagcagctcttgctaccgcgggaagggagagggcgcgcgggacccaggagccactgtgcgaagccaggcctcaggagcagccgccttgttcctagaaggggtgcctccatccatctggtgtccaaagactgcagggagaccttctcgtccggtgggaaagcgaggtctcccatgctttcccaccacgcaggccttgtgtcctttctcctgctagtgtctgcccgccagcgggcgggagctgcggctgcggcggttccacactctgtggacgctgcccgccagcgagccaagagccgcgcttggaggcgggagtcggggagtcgtgtgcaggtcggaaggagacccaagctctgggtcagggcttttttgccaatagccaaattcagcgtgtaaaagacagagagctcacatctgtctgttcgagagcggccacagttttccatttgtgcctgctccacgtgctgtctttgttgggtcagcaaacatcgcctccctttaccgctcagtcccacttccaacctcgcgggcatcgcctccagtcgcttcttctgaaggcctaagaagcacgttacccgcgaacggaggtgaggaggctccactgaccgtcccctgtcagctgataatttgtggcacgcacaaacgccacgacttgccttggcctctctcttagttattcgcagctcagcccgatcggcgcctccgggacggcagaggcggcaaagacggtgggcttcttgggtgcagttccaggagggctggcatctagcgggcgtaaaggaagattcctgcgggaaggcagtcagtgcaaaacaattccctgactggtaatccaacccgagctgcggcggtgaaagcgctaaattcaaggacacaagtcccggagccagttgcagcgtccgggcagaacctgaccaccgacctagagatgcgcctttgtgaagcggcagcgcatggagagacagtagcgggtcaccgggccagagccgcgcactgccattttcccatcttaggctatactgcaacgccacccttccgtatgctctgggcaaagctccaagggttcccgctgacgtttgagttttttcctcagggccaagatcgaactggtcaccaattcgtgatttcccatcggccaagtgcgtgggcattgatctacacgcgagtttctccacctccgcggaatgggtattacggggtgggggaggggcccttcggtggattgtaaggtgtttagccgcatccctcgcctccgctgacttaggatttgaggcttttaacatctcgacatcatgagtttctacctttaggtctttccttctgttctgtcctccaaatcggcctcttctgagcctgttgaccagggccagccaggtagaaggctgggttcgctcaccgaggatcctctcgcccctccatgaagtcgacctcacctcctctgaaggtcctcccggtcctccagtggctggagaaggtgagtcgagtccctgtctccagtttgcaaagtggacaaagcctacgacaatgggccccgaatcagctactaggcatccctgtctttccagttggtggtactcgagcttccctacccaggatttctgtggattccaagggtacaactgaacaccttttgtcgttccaactgctcttatttgaattaagggctgatcctgacgcgcctggttgcggggagcaaaacggatcagctgactacccagacgagcaactttgccgtgactcggattcgaaccgaggttgctgcggccacaacgcagagtactaaccactatacgatcacggcgggccacaaggcaagcggtgatgcttgaccttgctcgaccgaagccgagttgagctaggggagcccaagcggcgtagaaagtcgggtgaaggcggagccaagaacggaaagagccatcactagagtccacggggcgttctgcttcctttgggaagtcgcggacccgggcgtttcccgggacgctggctctgacgctttttgatggggttgtttttttcttgtaaatttgtttgagttcattgtagattctggatattagccctttgtcagatgagtagtttgcaaaaattttctcccattctgtaggtttcctgttcactctgatggtagtttcttttgctgtgcagaagctctttagcttaattaaatcccatttgtcaattttggcttttgttgccatggcttttggtgttttagacatgaagtccttgcccatgcctatgtcctgaatggtattgcctaggttttcttctaggttttttatggttttaggtctaacatgtaagtctttaatccatcttgagttaacttttgtataaggtgtaaggaagggatccagtttcagctttgtacatatggctagccagttttcccagcaccatttattaaatagggaatcctttccccatttcttgtttttctcaggtttgtcaaagatcagatggttgtagatatgcggcattatttctgagggctctgttctgttccattgatctatatgtctgttttggtaccagtaccattctgttttggttactgtagccttgtagtatagtttgaagtcaggtagcgtgacgcctctggctttgttctttttgcttaagattgacttggcaatgcaggctcttttttggttccatgtgaactttaaagtagtttttcccaattctgtgaagaaagccattggtagcttgatggggatgacattgaatctataaattaccttgggcagtatggccattttcacgatattgattcttcctacccatgagcatggaatgttcttccatttgtttgtatcctcttttatttccttgagcaatggtttgtagttctccttgaagaggtccttcacatcccttgtaagttggattcctaggtattttattctctttgaagcaattgtgaatgggagttcactcatgatttgggtctctgtttgtctgttattggtgtataagaatgcttgtgatttttgtacattgattttgtatcctaagactttgctgaagttgcttatcagcttaaggagattttgggctgagacaatggggttttctagatatacaatcatgtcatgtgcaaacagggacaatttgacttcctcttttcctaattgaataccctttatttccttctcctgcctaattgccctggccagaacttccaacactatgttgaatagcagtggtgagagaggacatccctgtcttgtgccagttttcaaagggaatacttccagtttttgcccattcagtatgatattggctgtgggtttgtcatagatagctcttattattttgagatacgtcccatcaatacctaatttattgagagtttttagcatgaagggttgttgaattttgtcaaaggctttttctgcatctattgagataatcatgtggtttttgtctttggctctgtttatatgcagttcctccttgtacctctggtagaattcggctgtgaatccatctggtcctggactttttttggttggtaagctattgattattgccacaatttcagatcctgttattggtctattcagagattcaacttcttcctggtttagtcttgggagggtgtatgtgttgaggaatttatccatttcttctagattttctagtttatttgcatagaggtgtttgtagtattctctgatggtagtttgtatttctgtgggattggtggtgatatcccctttatcattttttattgcatctatttgattcctctctcttttcttctttactagtcttgctagcagtctatcgattttgttgatcttttcaaaaaaccagctcctggattcattaattttttgaagggttttttgtgtctcaatttccttcagttctgctctgattttagttatttcttgccttctgctagcttttgaatgtgtttgctcttgcttttctagttcttttaattgtgatgttagggtgtcaattttggatctttcctgctttctcttgtgggcatttagtgctataaatttccctctacacactgctttgaatgtgtcccagagattctggtatgttgtgtctttgttctcgttggtttcaaagaacatctttatttctgccttcattttgttaagtacccagtagtcattcaggagcaggttgttcagtttccatgtagttgagcggttttgagtgggtttcttaatcctcttaatcagtggaatcttggtgctccaattgttgaaggacccagagatgaagacctccttgcctccttcagaccagcggataacagtgggccgggcctgctgtgtgggctttacggagtcctccaaatcctgctgccatgatacaaactctttgtccccagggagagagtgaaaacaagttgttctcttcctgaaagtccttggaattgagagcaaggtcttcagggcagctgtgggttgtcgtttttttagccacgcaacattttgaagtactactgaggagtaaacaagtcgtggaatcattggctcttccaccttggagtcagggaggctgaacacgctggggtcgtccgtactccccaccatgatcttgtgctccttccccggggcatggccgcctgcgccctcggagcgtgcagccttggcgccgtggcgctccccggacacccggtcgctggtggtgtttcccatggctgcagctcgtcggggaccacctaccgcggggaacgacaccgggttgggaggatgaggcagaagaatcgcttgaacccgggaggcggaggttgcggtgagccgagatcgcgccat

SEQ ID NO: 122185 - DNA, 2173 bp, Homo sapiens
atggatgggatttctggtggaaagagagccctgagagagaggcacagtaagagcaaagctctgggacgctgctttccatggaccaacattactccaccggcgctcccagggatcaccaatgacaccaccatacagcaggggatcagcggtcttattgacagcctcaatgcccgagacatcagtgttaagatctttgaagattttgcccagtcctggtattggattcttgttgccctgggggtggctctggtcttgagcctactgtttatcttgcttctgcgcctggtggctgggcccctggtgctggtgctgatcctgggagtgctgggcgtgctggcatatggcatctactactgctgggaggagtaccgagtgctgcgggacaagggcgcctccatctcccagctgggtttcaccaccaacctcagtgcctaccagagcgtgcaggagacctggctggccgccctgatcgtgttggcggtgcttgaagccatcctgctgctggtgctcatcttcctgcggcagcggattcgtattgccatcgccctcctgaaggaggccagcaaggctgtgggacagatgatgtctaccatgttctacccactggtcacctttgtcctcctcctcatctgcattgcctactgggccatgactgctctgtacctggctacatcggggcaaccccagtatgtgctctgggcatccaacatcagctcccccggctgtgagaaagtgccaataaatatcttcatgcaaccccacggcccaccttgtgaactcctcgtgcccagggctgatgtgcgtcttccagggctactcatccaaaggcctaatccaacgttctgtcttcaatctgcaaatctatggggtcctggggctcttctggacccttaactgggtactggccctgggccaatgcgtcctcgctggagcctttgcctccttctactgggccttccacaagccccaggacatccctaccttccccttaatctctgccttcatccgcacactccgttaccacactgggtcattggcatttggagccctcatcctgacccttgtgcagatagcccgggtcatcttggagtatattgaccacaagctcagaggagtgcagaaccctgtagcccgctgcatcatgtgctgattcaagtgctgcctctggtgtctggaaaaatttatcaagttcctaaaccgcaatgcatacatcatgatcgccatctacggggaagaatttctgtgtctcagccaaaaatgcgttcatgctactcatgcgaaacattgtcagggtggtcgtcctggacaaagtcacagacctgctgctgttctttgggaagctgctggtggtcggaggcgtgggggtcctgtccttctttttttttctccggtcgcatcccggggctgggtaaagactttaagagcccccacctcaactattactggctgcccatcatgaggaacccaataaccccaacgggtcatgtcttccagacctccatcctgggggcctatgtcatcgccagcggcttcttcagcgttttcgggcatgtgtgtgggacacgctctttcctctgcttcctggggaaggacctggggagcgttaacaacgggttccctggggaccggccctactacatgttccaagagcctttttaaagattctggggcaagaagaacgagggcgcccccggacaacaagaagaggaagaagtgacagctccggccctgatcccaggactgcaccccacccccaccgtccagccatccaacctcacttcgccttacaggtctccattttgtggtaaaaaaaaggttttaggccaggcgccgtggctcacggcccctgaatcaaacactttttagaggctgaggcgggcggatcacccttagtaggagttcgagaccaactctggccaacatggtgaaacctccccgctctattaaaaatacaaaaattagccgagagtggtggcatggcacctgtcatcccagctactcgggaggctgaggcaggagaatcgcttgaacccgggaggcagaggttgcagtgagccgagatcgcgccactgcactccaacctgggtgacagactcttgtctccaaaacaaaacaaacaaacaaaaagattttattaaagatattttgttaactcaggtaaacaaaaaaaaac

SEQ ID NO: 122186 - DNA, 499 bp, Homo sapiens
ggcacgagggcatcctcacctgctccctgcccttcctcctctgcgcccgctcactccttcgaggcttgctgctgcagaatgagtttgtggggttcatgtggcggcagcggggacgggtcatcagcctgtgggagcggctggaatttgtcaatggctggtacatcctgctcgtcaccagcgatgtgctcaccatctcgggcaccatcatgaagatcggcatcgaggccaagaacttggcgagctacgacgtctgcagcatcctcctgggcacctcgacgctgctggtgtgggtgggcgtgatccgctacctgaccttcttccacaactacaatatcctcatcgccacactgcgggtggccctgcccagcgtcatgcgcttctgctgctgcgtggctgtcatctacctgggctactgcttctgtggctggatcgtgctggggccctatcatgtgaagttccgctcactctccatggtgtctgagtgcctgttctcgctcat

SEQ ID NO: 122187 - DNA, 2092 bp, Homo sapiens
gagatcagctgatgccggagggtttgaagccgcgccgcgagggagcgaggtcgcagtgacagcggcgggcgatcggacccaggctgccccgccgtacccgcctgcgtcccgcgctcccgccccagcatgacagccccggcgggtccgcgcggctcagagaccgagcggtttctgacccccaaccccgggtatgggacccaggcggggccttcaccggcccctccgacacccccagaagaggaagaccttcgccgtcgtctcaaatactttttcatgagtccctgcgacaagtttcgagccaagggccgcaagccctgcaagctgatgctgcaagtggtcaagatcctggtggtcacggtgcagctcatcctgtttgggctcagtaatcagctggctgtgacattccgggaagagaacaccatcgccttccgacacctcttcctgctgggctactcggacggagcggatgacaccttcgcagcctacacgcgggagcagctgtaccaggccatcttccatgctgtggaccaggtgctggtgggcgggcaggtgctggtgggcaggcaggtgcagtacctggcgttgcctgacgtgtcactgggccggcttgctctctgccagcggtactaccaccgaggccacgtggacccggccaacgacacatttgacattgatccgatggtggttactgactgcatccaggtggatccccccgagcggccccctccgccccccagcgacgatctcaccctcttggaaagcagctccagttacaagaacctcacgctcaaattccacaagtactgcctgctcactcgaggggggcccaggagtcagcacgtggcaggggacgctggcacttggggccggaagggacccgaagacgcccctgaccctcacccgagcctcctgcctaggctggtcaatgtcaccatccacttccggctgaagaccattaacctccagagcctcatcaataatgagatcccggactgctataccttcagcgtcctgatcacgtttgacaacaaagcacacagtgggcggatccccatcagcctggagacccaggcccacatccaggagtgtaagcaccccagtgtcttccagcacgggaggacaacagcttccgggctcctgtttgacgtggtggtcatactcacctgctccctgtacttcctcctctgagcccgctcactccttcgaggcttcctgctgcagaacagagtttgtggggttcatgtggcggcagcggggacgggtcatcagcctgtgggagcggctggaatttgtcaatggctggtacatcctgcttcgttaccagcgatgtgcttcaccatcttgggcaccattcatgaagatcggcatcgaggccaagaacttggcgaagcttacgacgttttgcagcatcctcctgggcacctcgacgctgctggtgtgggtgggcgtgatccgctacctgaccttcttccacaactacaatttccgctcactctccatggtgtctgagtgcctgttctcgctcatcaatggggacgacatgtttgtgacgttcgccgccatgcaggcgcagcagggccgcagcagcctggtgtggctcttctcccagctctacctttactccttcatcaagcctcttcatcctacatggtgctcagcctcttcatcgcgctcatcaccgggcgcctacgtacaccatcaagcattcccggcggcgcaggcgcaagaggagagcgagctgcaggccttacatcgcacagtgcccaggacagccccacctccggcaagttccgccgcgggagcgggctcggcctatagccattcttttgttgctgcggaagggacccctcggaggagcattcgctgctggtgaattgattcgacctgactgccgttggaccgtaggccctggactgcagagacccccgcccccgaccccgcttatttatttgtagggtttgcttttaaggatcggctccctgtcgcgcccgaggagggcctggacctttcgtgtcggacccttgggggcggggagactgggtggggaggtgtgttgaataaaagggaaaataaatgtgtcgttttcattttt

SEQ ID NO: 122188 - DNA, 4664 bp, Homo sapiens
atgcaaaggccctgcctctgcgtggagcccatgcgtctttgttttgattcattccttcttctggtcaaccagggagaggaggaagagggagttgttccttgcctagaggaaaatggcagagcagcagcagatccaggtccacaagaccaggactgcctgctgcccacgcttactccctcactttccggtgacgaggccccagatagaacgcagagctcaggtgatccacgggagagatgtggctacctctctgtgacatgtgaagagggagataacaggtttgccgccttttgtttatgtggctcctggaggttaaaccatggccatgctgactggtgtgaccagaggaggtcacaaatcagcaacagactcccagcttccctgggcattattgtaggcaccagaggaagcaggcatctgttagctgctctgaggggtgtcaaagaagacaggcagaccaaggggtgtgtgcagacaccagcatcactgagcccttggctcccggggcttagctctgagacccgagctcagaagacatgtagtgttctgctgattgactatgccactttcttgaagcttgctaatgatgatgatgatggttgtttggattgtttgcagcccggggtgcggactgcttgggcttcctctcagcatggcatccgagctccaagaaagagtgttcaaggaagtgcaagcagcccatctcttaggacctgggccttgacatgcacacagaattggttctgctgtgttctgttggtcaaagctgtcacagagcccccgcagattgttagactgctgttggaacgcggctgtgatgtgaacctaagtgacaagcaaggccggacgcccctcatggtggctgcttgtgaagggcacttgagcaccgtggaattcctcctttcaaaaggtgcagccctttcttctctagacaaagagggtctgtcagcattaagctgggcttgtctgaaaggtcacagggcagtggtccagtatctggttgaagaaggagctgcaatagaccagacagacaagaatggccgcacaccccttggacctggctgccttctatggcgatgccgagactgtgctgtacctggtggagaagggagccgtgatcgagcatgtggaccacagcgggatgcggcccttggacagagccatcggctgccggaacacatctgtagtggtggcgctactcagaaagggagccaagttaggaaatgctgcttgggcgatggccacttccaaacctgatatcttgattatacttttacagaaattaatggaggaaggaaatgtgatgtacaaaaaagggaaaatgaaagaggcagcccagaggtaccagtatgccttaagaaagtttcctcgagaaggattcggagaggacatgagacccttcaatgaattaagggtttccctctatctcaatttgtcgcgatgccgaagaaaaacaaatgactttggcatggcagaggaatttgcttccaaggctctcgaattgaagcccaagtcctatgaagccttttatgccagagcaagagcgaagagaaatagcaggcaattcgtggcagctctggctgacctgcaagaggctgtgaaactctgtcccaccaatcaggaagtcaagaggcttctggcccgcgtagaagaggagtgcaaacaactccagaggagtcaacagcaaaaacagcagggcccgctaccagctccactcaacgactccgagaacgaagaggacaccccaacccctggcttaagtgaccactttcactctgaggagactgaagaggaagaaacttctccccaggaagaatctgtttccccaactcccaggtcccagccatcctcatctgtcccttcctcatacatccgaaaccttcaagaagggttacagtccaaaggaaggccggtatcgccacagagcagggcaggaatcggcaagtccctgagagagcctgtggcccagccagggctgctcctgcagccctccaagcaggcccagatcgtgaaaaccagccagcacctgggctctggccagtcggcagtgagaaatggcagtatgaaagttcagatctcttctcagaaccctcctccaagtcccatgccagggagaatcgctgccactcctgctgggagcagaacccagcatttagagggaacaggtactttcactacaagagctggttgtggccactttggggatcggctgggccccagccagaatgtccgcctgcagtgtggtgagaatggccctgcacaccctttaccaagtaagacgaaaaccacagagaggcttctgtctcattcctccgtggctgtggacgcagcccctccaaaccaaggtgggctggcgacctgcagcgacgtgcgacacccagcttccctcaccagctcaggctcttctggttctccatccagcagcataaagatgtcaagttcaaccagtagtttgacttcgagcagcagtttttcagatggcttcaaggtccaaggaccagatactagaattaaagacaaggttgtaacccacgttcagagcggtacagctgagcacagaccccgcaacacgccgttcatgggcatcatggataagactgcgaggttccaacagcagagcaatcctccaagccgcagctggcactgtccggcaccagaggggctgctgacaaacacgtcttctgcagctggcctgcagtctgctaacactgagaagccctctctcatgcaagtgggaggatataataaccaagccaaaacctgttctgtttctaccctgagtgcaagtgtccacaatggggcacaagtgaaggagctagaagaaagcaagtgccaaattccagtccactctcaagagaacaggataactaagactgtttctcatctgtaccaggaaagtatctccaaacagcagcctcatattagtaatgaagcccacaggagccacctcactgcagccaaaccaaagcgatcatttatagagtcaaatgtgtgaaccttaagaaagccccatttgtggaatttggaaacgtgtgttgactcctggtggtaaattaaatagtttttttcatcagaaaaattattttttagccattttttttctttggggtggatctgatgccattgatatatctaaaatgtgggataaaacttctttaatagctagaaatcaccataaataagaatgctaagcagaattggggattaatcaaacataaaaaaataggtcagcccagaagacattaatgactctcacttatgaaattgtttggcttttgccactttcctccttggcctttgctatatggtagaatcacagaacttacttagagaataaatatgtctattgttcaagagtaacaggtttaactcatgaccaagtgatgtacatccaagtgatgtattctggaaacgatggaattttacagttacagctccattgagtcaaatcccattttatatatacataaaaattaagttctgagtgagttctagctaaatataagtgcgactgtaaacgccacccattttttttagccagaatatgagaccacctaagtattctcttcatagcagttcctataaagggattaaacacttatttctgtgttatggttcttattcatatatttttatagcacctttttttggaacctatatttgtgcttgaaggtgtttttgatatttggaaacagtataagccatttggagtcatgattggtggtcaagtggattcaagctaaaatactaagaccagcattcttagtggcgcttataaattagctctcacctggtttccaaactgcttttaacaatggtagtgctcctgggaacaatccttccaagctcctctaaggacaatatttaattcaggatactaaaggtaaggactgggttgttacttttgttttgttgtacaattaggtactttattagtcacatgttgtatatatttaaatagccccgtttttattcagacttgttaaataggacctattttcaattgtaggttattctaaaaacaaaaaagaaaaccccagtcacgatttgcatgttctctgtaagcttcatccatgctggttattgcactgaatgatgtattattagggcatgttaacagtataccagtaacagcactttatctcatttatatgaacacctttgaggtgctactttaagtccaagctctgatgtattatttcatttgtaaagataaggtacaggaatgaaccttggtttaaaggtatttttatatgaaaatggtgtgttattggaagatgttaaagtgctaatttgagagaagtaggagtgtatctgttttatatgttgggatgtgaaatttattttctaaaattgaggagaaggaagttatatatttgcagaatgttttaaagtgaattgttgtaatgaagttcctgtgaacatcattatggttttgtacaaataggaacctctgatgtcattcttcaacgtttgttcctgtgtgtacaattgtactttgtatgaacagctttatcatttttataggctttccatgagttttgctgtaactactatggcttatttattttctttaatatttgtgaaagtcttactcctttgttagttttgtttctgcacaactactgtacttttccatatggaataaagaatattaatagaaa

SEQ ID NO: 122189 - DNA, 948 bp, Homo sapiens
gcaaatattctcatagattctggtgctgatccaaatattgtagatgtgtatggcaacacagctgtccattatgctgttaacagtgagaatttgtcagtggtggcaaaattgctgtcctgtggtacagacattaaagtgaagaacaaggctggccacacaccacttttattggccataaggaaaagaagtgagcaaattgtggaatttttactgacaaaaaaatgcaaatgcaaatggagttgataagtttaaatgcattcatcaacaacttttggaatataaacaaaagatatctaaaaattctcaaaatagtaatccagaaggaacatctgaaggaacacctgacgaggctgcacccttggcggaaagaacacctgacacggctgaaagcttggtggaaagaacacctgacgaataggatacagtgaattcctcttcaaagattttagcctgtaaacatcctttaaaattcaagaggggggaagattaagtacaatgagttcttgagttcctcatcaaagaacaaatatgtcagtatgttcagcttctctgttctttgttctccgttttaaagtttaacttcctcgttcgttatgcctccttgcccctagtttcattaaacaacccccttctagcctctaacacctgctttgtctttagtcattcttagtaacctgctctgtccttagtcatccttagacacctgctctgtaactgtctttcccgctgaaactactcaccctgccactccagctcatacccctgccctctttaaatagccaatctgaattggcttagagtgtgcagtccaaccctatccaatagggaaaagacacaacagtagggactagctgcgttagaaataagaacactttcccctcccttgtccggtgtgatcttgccattgctccatctgcaagaccactcttccatagaagtaaatttgcc

SEQ ID NO: 122190 - DNA, 1461 bp, Homo sapiens
atggtttcaggaaccactcaccaggctcaaggaaggaaagaagacagctgcccacaagcagagacttgtgcattcaaatcacccagtctgcacaagtccaaatgcctcgtggagaggattttagtgcacagaaattatgaggctattcacaagagccttatacctgtgcttccagaagactcttctggattcgaggtagcacctactgtcattgggcagccttcaacggcaaacagagcaacccagtctaaaccgaaggcagataccagtatcagccacccagacgcctccttggcccaagcagggatgctccctgagtactctgaatctccttgtcgctacttcttcccaggcctcttggccacttatcctgagcactggtactaccacaaggctcaaataggaagagccaatagtccatgtgagaaaccacggaaggctaaagatagaaggaaatatttgggccacgttgaagaacaagttcaccagtttagggttgcagttgaccacagcctatcctgtcagctcaggatgcaatgtgggaaccagccctggacaggacgccatcgcattgccggtgcactcacacatacccacagttactcagactgggaccacacagacatgtcaatcgacctcacatgcacagccttgggaaaaggaacatctacaggaacacctgacgaggctgcacccttggcaggaagaacacctgacacggctgaaagcttggtggaaaaaacacctgatgaggctgcacccttagtggagggaacatctgacaaaattcaatgtctggggaaagcaacatctggaaagtttgaacagtcagcagaagaatatgcggtgcccggttcggtcccagacgcggccaccaaccgacgtaaagccggtgagccgctcggggaggagagaggatcggcgggcggcgggcggggaagggggcgcagacaggcaagggccggggaccgcgagggcaagggcacctgggagcccgcagaggggcggctgagggagaaacctcaggcatggccgggccaccaggaaaacacggccgcgggatcccaccgccacagacacgagggcggtcccgcggcgccccgcctgggacgccggaaggccctcggcacccaccaagacctgcctcacgagcccctggtcccgccaccggggccccgaagcgaccacagccacaaactcaacgccagggccacatcgctcgtgattctcgtccatcctccgacccggtcccgctccgggagaccggcgcgcccccaccgtgggacgctttcccagggccaggcggcccgaccacgtgccacgcaaacgccgtcgtccgcaccggtcgcgactcggcaagggagcgggcggagagctgactcgcggcggaggggggtcactcgccggacggaacgctgcgcgcagccatcgctcgctgtcagccgcgtcccaacccgctag

SEQ ID NO: 122191 - DNA, 424 bp, Homo sapiens
gagaacatgcattagttctgtttgaaaagtgtgtgcaagataaatatttgcagcaggaacatatcataaaaaagttaattaaagaaaataagaagcatcaggagctcttcgtagacatttgttcagaaaaagacaatttaagagaagaactaaagaaaagaacagaaactgagaagcagcatatgaacacaattaaacagttagaatcaagaatagaagaacttaataaagaagttaaagcttccagagatcaactaatagctcaagacgttacagctaaaaatgcagttcagcagttacacaaagagatggcccaacggatggaacaggccaacaagaaatgtgaagaggcacgccaagaaaaagaagcaatggtaatgaaatatgtaagaggtgagaaggaatctttagatcttcgaaagga

SEQ ID NO: 122192 - DNA, 816 bp, Homo sapiens
atggtgcaaaaggaacttgaggaggagggaagaaaaagcacccctcaaagctggggaagagaaaatatggagaaagccctaaattcctcattgaaggccagtctcggaagtggaggggttatgatctgtgcttcagtcaaagctctcctcactgttgtgattgcaaaggtgcttggaaggttacttgatgagcctctttctgctgctccagacccagactgctctgtagcagacactggacatacaaacagaaatattagtcaccaatatcaagatgaaatcattatccttgatgggtcagatcttccgaggatgagtccgcgtaggaaatatgaaccccctgtcttcccggggcggaagacctacaagatctcaattagaggaaaggccaacaagaaatgtgaagaggcacgccaagaaaaagaagcaatggtaatgaaatatgtaagaggtgagaaggaatctttagatcttcgaaaggaaaaagagacacttgagaaaaaacttagagatgcaaataaggaacttgagaaaaacactaacaaaattaagcagctttctcaggagaaaggacggttgcaccagctgtatgaaactaaggaaggcgaaacgactagactcatcagagaaatagacaaattaaaggaagacattaactctcacgtcatcaaagtaaagtgggcacaaaacaaattaaaagctgaaatggattcacacaagtcctttaagaatcccttggtccgatgtaactttgccgccacttttggttactacaaaaaacttattccagaaattaagacaggttctagccattaa

SEQ ID NO: 122193 - DNA, 808 bp, Homo sapiens
ataatgtgagagtggaaccaacggattcaagcttcatggaagctattgagtttgcccaaaagggagcttttgatgcctatgttgctgtcggtggtggctctaccatggacacctgtaaggcctgctaatctgtatgcatccagccctcattctgatttcctagattatgtcagtgcccccattggcaagggaaagcctgtgtctgtgcctcttaagcctctgattgcagtgccaactacctcaggaaccgggagtgaaactactggggttgccatttttgactatgaacacttgaaagtaaaaattggcatcacttcgagagccatcaaacccacactgggactgattgatcctctgcacaccctccacatgcctgcccgagtggtcgccaacagtggctttgatgtgctttgccatgccctggagtcatacaccaccctgccctaccacctgcggagcccctgcccttcaaatcccatcacacggcctgcgtaccaggggcagcaacccaatcagtgacatttggggctattccacgcgctggggattcgtgggttaagtatcttgaaggagggctgttcaggaaatcccgatggatctttgaaaggcaaggtctcatatgcacttggcaagtgcttttgctggcatcggctttggaaatgctggtgttcatctgtgccatggaatgtcttacccaatttcaggtttagtgaagatgtataaagcaaaggattacaatgtggatcacccactggtgccccatggcctttctgtggtgctcacgtccccagcggtgttcactttcacg

SEQ ID NO: 122194 - DNA, 1730 bp, Homo sapiens
gattgatcctctgcacaccctccacatgcctgcccgagtggtcgccaacagtggctttgatgtgctttgccatgccctggagtcatacaccaccctgccctaccacctgcggagcccctgcccttcaaatcccatcacacggcctgcgtaccagggcagcaacccaatcagtgacatttgggctatccacgcgctgcggatcgtggctaagtatctgaagagggccgtcaacagcactgacaaatgaagaagaagaatgagtctcagggcaccttcctgggagtggccctcgccatccaggggaccagcgcgttgcctcccccggcgcttttacatcacatgaggcagctgacagcgttatttattatggcctttgcttgaaacagttgatgagaaatatgtttcccttcagttttcatttagaagacaaggcgtcgtttgaataacttgcctgatttttcttcctaccgagtagcatttctttttttttcaccatatctttccctaaggcagctccttattctgtaggaattgccaatgttgatgtgttattgttaggtatttatatcattcacagggctggcagaaatcccgatgatcttgaaggcaaggtctcatatggcacttgggcaagtgctttttgctgggcatcggctttgggaaatgctgggtgttcatctgtggccatgggaatgtctttacccaatttcagggtttaggtggaaggatgttattaaaggcaaagggatttacaatgtggggatccaccccactgggtggcccccatgggccttttctgtggtgcctcacgtcccccagcggtgtttcacttttcacggccccagatgtttcccagagcgaacaccctggagatggcaagaaatactgggagccgacacccgcactgcccaggatcccaagatgcagggctggtgttggcagacacgctccggaaattcttatttcgatctgggatgttgatgatggcctagcagctgttggttactcaaaagctgatatcccggcactagtgaaaggaacgctgcccccaaggaaagggtcaccagctttgcaccccgtccccagtcagaagaggatctggctgctctgtttgaagcttccaatgaaactgtattaaatgtccatcttaactgaaagaatttcccgctggccattgtagtgctgaagagcaagagctggatcttagcttagggctttggtcttttcatctttgtgccataacttacctgtttaccagttattaggtggggatataccatttatcttgcagggaaattccccaaaagctcagagtcccagttccttcccataaaacagggtgggacaaatggaccacttatgttaggacccccagggctcgacttcaggggtcagtgttcctggtcccaaaccccacacagaatactctggcctctggctttcatgtaggccaaatgaggcaaaaaacttcagtatctattcaaaagtgtaaattatatttcctaatgcctagtaattcacttcatgtctaaaaatttatctgatagaaacactagcaccagtacatacagaagcatggcaaggatgtttctggcagcacttttctaataataaaagatttgaaacaaccttaagtattcattattggtatatagatcacttatagtatactagacagtggaatactatggtactgttaataaagatgaagtaaatctcttggaaaaaaa

SEQ ID NO: 122195 - DNA, 993 bp, Homo sapiens
atgggaaaactggatatccatatgctgaagaatgaaactagaccctacttctcaccatatacaaaaatcaagtcaaaatggattaaagacataaatgtaaaacctcaaactatgaaactactacaagaaaacatcagagaaactctccaggacattggtctgggtgaagatttctcacaagcacaggcaaccaaagcaaaagtggacaaattggatcacgtgaagtttaaaaacttctgcacagcaaaagaaacaatcaacaaagtgaagagaaaacccaaagaatgggagaaaatactaatatttgcagactatccatctgacaagggattaataaccagaatattatttattgatcattcttgggtgtttctcggagaggggaatttggcagggtcatcggacaatagtggagggaaggcttggaagcacctgctgccacttctggcctctcgctgctccggcacccattccaatcttagagcaaagttgaggctgagccagggcactgtcgcgacctggccagttttgaagagagaaggagagaagagctgcggcccttcagagagcccagacctaggagctccccaagccagggatgtgacaccctgtttgggaatctgtagttcctggcttctccaagcttctgggcaccaccacattccctggtgccaactgtggaagctgtttgtggtatacctggtccagctgcagcctcacagggaggtagcgcttgtgccagcacctggagctgcccaccccaccacagccagtgtgcctgtctgtgcgcagtggctggaccccatggtcattcactcacacaccctttgctgctctgagcctgactcacccttggcaggcatgggattcaggccagtagcacaagccaagcacaaccctgccaggccgagtggatggaatgagtccagtaggcctgagcaaaacttggacaaaggtgccactagccacagaggtttctggctggcaaggtga

SEQ ID NO: 122196 - DNA, 400 bp, Homo sapiens
ggacaatacccgtggcctttagaaacaaaccctaggttcctgagggaatgaacactgccaaagtccttacagaaatcccttttatgagatagcccagtcccagaataaagcctttgcggtacttgtcaacaagcaagaagcctttctgaagaggtagatgaaagcagtatttcacagcaggtgtgctgcccgacgtgacgaaagacatgcatgcccctctcagcacagaccagaagatcatctgttgttgaaaacagtccgatggtggtgagaagagatgtcgaccacattactaggtgcattatttcaattttattgtattaagaacaggaatgactgccatttctttaaataaccaactaaacaaataaaaaggagcagaaatcctcgtgccaagctt

SEQ ID NO: 122197 - DNA, 690 bp, Homo sapiens
agattacgctcgggaaggactgtattatgcacgggtacatgctgaactgggaaacccatttctgactcagtggcagcgtcgctattttaccctctttccaaagaacatttgatggagacgaaggggagaatccccgccaaaatttactgacaatggaacagattctctctgtggaagaaactcaaattaaagacaaaaaatgcattttgttcagaataaaaggagggaaacaatttgtcttgcaatgtgagagtgatccagagtttgtgcagtggaagaaagagttgaacgaaaccttcaaggaggcccagcggctattgcgtcgtgccccgaagttcctcaacaaacctcggtcaggtactgtggagctcccaaagccatccctctgtcacagaaacagcaacggcctctagcacccagaaacagggagggtcctcgaggaggacacaccagggtctcagccttttggggtgaacgaggatgaggcatctgatctattcgctaccgggactcctccaggctcccgagaggagtcgggacccttcggctttggggtcagctcagctccctgccttgtcacatttgtctgcattagaaactactgaagaaaataaaagttctttttctttgctacacactttggtaccctatgaacctagaacttgaagtgactcctacttatcacgtaaa

SEQ ID NO: 122198 - DNA, 4714 bp, Homo sapiens
tataaatgaatgttgactgtataaaacaataatgtcgtgtttctcgagcttatgatgcctacatcatgaaggaacttctttcctgttcacatgtaagtatttcttcttactctgttactttagtactgatgaataagggaccatgttcagcgtatggttgcaggaaagcagacactggaaaaatgtaagctttcaatgctcttatgttttactggcactattaaaattttaatatttgcatgaaagtggcttctgtccttcagaagcgaatcgagagaagcgacttggattactcacatccgaattgtccttttgagattgtccctagtcagcgtttcactggaaggtgatcttacctgcctctcactacctgctactctgtttatcagcctttccatttctagcacacctgtggcaagagctatggaagacaggcacacagtgctcggaaggcctttcgcagggtggagatggggtcagcgaatgcctttctgaagttgggggttacctggagaggagccagtgcacgtggctcctctgagcccaggcacgtgaggttgggggaatcagatgaggggccagggtctgcggtggtggggggagtcgtgcaagttcttcaacaacgacttcatggtcctgttttatcacagtttttttatggcgagttcctgcaaaatgtaagctattttgttgacttttagtaggaaatcaaagtagacagttccttgctcaagagtttcctggatctgatgaacggtaagcaaaacttggaaaatctgaatgccttgaaagactttgccatgatgttaaatcttagttatgccactgaaatcattctgggtctggaacacatgcacaatcggtttgttgtctacagagatttgaaggtgaggacgattgacagactcattctgcatagtaggtattgtgtgaatggtcctctagaagacaaagtcacggaaaaggactttccaggcaaccctgaaattaaaccttcccggaaaatggcttggatgtccctcatagaaatctccaacgctctcacagcgtggcctgatgaccttaccctgtcaaactttaggttcgggctgattgagctttccagaatgctggatttgccctgatggaccaacgcccattttgccgactggttctccctgggctgcatgcttttcaaacttctgagagggtgagttgaaatgcatccttctagtgctgtcctcatggcagcaggagcttggatgaaaactaccgtggtaaggggattcaaaactgtattcttgtctgtatggtaattgtcatgcttcattccgtcaaagcgagacgttagcaagcggctgggctgtcacggaggcgggtaggccattgttcctgcctttcggtatctttaccagaagagcaaaatagtgattttaaatttccagtacccaccacccttgattcctccccggggagaagtcaatgctgctgatgcctttgatattggctcatttgatgaagaggataccaaagggattaaggtacacatgtgatcatttatttctttatttttatttttggatgggatgatttctgttggaaagcaagaagtaacggaaacagtttatgaagcagtaaatgcagacacagataaaatcgaggccaggaagagagctaaaaataagcaacttggccacgaagaaggtaaaatagctcacgtgtctcaaaacatttctaatgcagtaaattttcaaaatttcttgtatctgactcagtggcagcgtcgctatttttacctctttccaaatagacttgaatggagaggagagggagagtcccgggtaagtctaaggcagcctcaccgagcatgtttcccagtacgtacaatggcatatggttattggctattgcgtcgtgccccgaagttcctcaacaaacctcggtcaggtactgtggagctcccaaagccatccctctgtcacagaaacagcaacggcctctagcacccctgctgtgaaatactgctttcatctacctcttcagaaggcttcttgcttgttgacaagtaccgcaaaggctttattctggactggctatctcataaaaggatttctgtaagactttgcagtgtcattccctcagaacctaggtttgtttctaaagccacggtattgtcagaaatccaaggtgacagtccccaagccacagctgcctgggcatgactgtcttcctgtaggtccgcgggtcactttgaaaacaagagtgtttcggtggaaggatttgagaacaaaatgctggggcaaatggacattcgtaagaatcactctcctcaggccccagctgttcgctaataatttttaaaaatgtgtttagataagacttccagggctgctgtggacccatggaaatgcaggaagcctgctgtgtgtaccctcatcaaccctttgcagagtgaaatgtccacttctgcggcagaaggcaggttagagaagtcccaggagactgagcattgttctgaagaaactaggagccatgtcccctgagtagggagcacaatgcctagtggtcagctcctggggcacacagcagtgtggcctgaaggtgacagaattctaaatgaagatccaattaataaagaaccaaatagtgacctaagccttgtggccagtggaggggagggcaggtgacagcgggtgtttgggtggaggctgcaggaggctgtcatagaatcctgcagggtgacaccgtggccccagcgcaagatccacaaggcgaccccagctggcctcccggtcggcaggggcgggtgtggggggggcgggggttgctggattggagaactttcatgtctagctgtaaaatggtccaatcggcaggatgtgggtggggtcagataagggaatgaaagcaggctgccagcaccagcactggtaacccgcccgggtctcccacctcatgggcttaaaacagcagctgacgaggcaggtgtatgttttgggcccggaccggagtatggcgataagaacacttgcttaaattaagtcttcctcactccaccttgtgcatgtgatttgatgagttggaggtgggagggtgagaaacttctttctggctgcctcctgcctgcccctgcccctgcccctcccagcctgatgaagcagttagctgtcgcctctccagaacgagaggtaagtggttcctaagaaggaggaccgtatgcgtttccatacccatcattctgtcttgtgagccagcagatctctcaggacgaccagtcaagctctcctgggagctcagacattctgggcaaggagagcgaggggtcccgcagccccgaccctgagcagatgacaagcatcaatggtgagaaggcccaggagctgggctccagtgcgacaccaaccaaaaagactgtccccttcaagaggggcgtgaggaggggtgatgtgttgttgatggtggccaagctggacccggactcagccaagccagagaagactcatccccatgacgcccccccttgcaagacctctccccccgccacagatactggaaaggaaaagaaaggggagacctctaggactccttgtggctcccaggccagcaccgagatcttggccccgaaagctgagaagacccggactgggggtcttggggacccaggccaaggaactgtggcactgaaaaaaggcgaggagggtcaaagcatagtggggaaggggcttgggacccccaagaccacagagctgaaagaggctgagccccagggcaaagacaggcaggggaccaggccccaagcccaagggcccggcgagggggtgcgaccagggaaagcagagaaggagggagcagagcccacaaacacggtggaaaaggggaatgtctctaaggacgtagggagtgaagggaagcacgtaaggccccaaatccctgggagaaagtggggaggtttcctgggaagaaggagtaagtgggacggtccccagaataagaaggacaaagaaggggtgctcttaagtaaggcagagaagacaggtgagcctcagacccagatggagaagacaagccaagtgcagggcgagttgggggacgatctgagaatgggggagaaagcaggtgagcttcggagcacgactgggaaggcaggtgagtcctgggataagaaggaaaagatggggcaaccccagggtaagtccgggaacgcaggtgaagctcggagtcagacagagaagggctgtgaagccccaaaggaggtgagcacaatggtggagtcgccagcagctcctgggaagggaggctggccaggaagccgtgggcaggaagcagaggagccctgctcaagagcaggtgatggggctggtgccctggagacagagctggaaggacccagccagcctgctctggagaaggatgcagaaaggcctcggatacggaaggagaaccaagacgggccagccccgcaggaggagggcaaaggaggccagagcagagactcagaccaggtgagggggctgcggccctgggagcgggaagcggcagacaggcctctccagagatgcagggatgggaaagatctgccccagggatggacaaggggtggacggggggtgggcagggaattggagaggggtggctggaactgcaaggcacccagaggaggggacgagcctcttggtaagtaggggtgttagcacctttggagggtctgagtcttctcctgtgccccctactgctg

SEQ ID NO: 122199 - DNA, 434 bp, Homo sapiens
tctctcttctttttctttggctttgttaatccaaataggcgggtagtagtcagaggtgtgacgcaggggcctggctctgcctttctggtcctttgtttgtctggctggttgaactcagtatgtgaaaaggccccttatctttgtgtgtccgagagatgctgttcctttttggggacactgaaagttctgagtccaatgaccctgatttggctatggaaggtgcagatggcgaggggggctcctcaggactggggaagaacgatgggatcctcatcagcttggtatgtggatgggaaacctctgcgaactctacagagctcacgtctgtggactgcatagagcttgaaggtttcattagctgccctcccccaagtagtatctgacacaggtcccgttctgtctgccgctggctgagcgctctgcctcccggcgca

SEQ ID NO: 122200 - DNA, 184 bp, Homo sapiens
  misc_feature (1)...(184): n = a,t,c or g
ggtgtggtgctgcagcaggacagctacattgaggaccagaaactgcgcgaggaggaggtgcagcaggggcagcaggacctggaaaaggagcgggaggagctccagcagaagaagggcacataccagtatgacctggagcgactgcgtgctgcccagaaacagcttgagagggaacaggagncag

SEQ ID NO: 122201 - DNA, 820 bp, Homo sapiens
atgagacgggcttgaaaaatgaggggagagttctagtccgtcatagtgcctggtgccccctgctgtggggtcgggagggatccagaagctcgctgtcgtcctggccagagttgcagggctcccctctgtgtgcctcccagggtgtggtgctgcagcaggacagctacattgaggaccagaaactggtgctgagcgagagggcgcttactcgcagcttgtcccgcccgagctccctcattgagcaggagaagcagcgcagcctggagaagcagcgccaggacctggccaacctgcagaagcagcaggcccagtacctcgaggagaagcgcaggcgcgagcgtgagtgggaagatcgtgagagggagctgcgggagcgggaggccctcctggcccagcgcgaggaggaggtgcagcaggggcagcaggacctggaaaaggagcgggaggagctccagcagaagaagggcacataccagtatgacctggagcgactgcgtgctgcccagaaacagcttgagagggaacaggacgcagctgcgccgggaggcagagcggctcagccagcggcagacagaacgggacctgtgtcaggtaatgggactccctgccgagagcaacctaatgatgatattaattaagaccccctgtgtattaagcaaggtaagaaagtgagcagaaatacagagcctgtttttggccagatgctcatgcctgtgatcccagcactttaggaggctgaggtgagagggtagcttgaccagcctgggcaacagagggagactctgtctctcctaaaaaaaaaacaaacaaacaaacaaac

SEQ ID NO: 122202 - DNA, 1390 bp, Homo sapiens
tttcgtcctactcttgttggaagagaaggagatgattttccgggacatggctgagtgcagcacccctctcccagaggattgctccccaacacatagccctagagttctcttccgctccaacacagaagaggctctcaaaggaggacctttaatgaaaagtgcaataaatgaggtggagatccttcagggtttggtgagtggaaatctgggaggcacacttgggccgactgtcagcagccccattgagcaagatgtggtcggtcccgtttccctgccccggagagcagagacctttggaggatttgacagccatcagatgaatgcttcaaaaggaggcgagaaggaagagggagatgatggccaagatcttaggagaacggaatcagatagtggcctaaaaaagggtggaaatgctaacctggtatttatgcttaaaagaaacagtgagcaggttgtccagagcgttgttcatctttacgagctcctcagcgctctgcagggtgtggtgctgcagcaggacagctacattgaggaccagaaactggtgctgagcgagagggcgctcactcgcagcttgtcccgcccgagctccctcattgagcaggagaagcagcgcagcctggagaagcagcgccaggacctggccaacctgcagaagcagcaaggcccagtacctcgaggagaagcgcaagcgcgagcgtgagtgggaagctcgtgagagggagctgcgggagcggggaggccctcctggcccagcgcgaggaggaggtgcagcaggggcagcaggacctggaaaaggagcgggaggagctccagcagaagaagggcacataccagtatgaccttggagcgactgcgtgctgcccacaaacagcttgagagggaacaggagcagctgcgccgggaggcagagcggctcacccagcggcagacagaacgggacctgtgtcaggtttcccatccacataccaagctgatgaggatcccatcgttcttccccagtcctgaggagcccccctcgccatctgcacctttccataagccaaaatcagggtcattggactcaggaactttcagtgtccccaaaaaaggaacagcatctctcggacacacaaagataaggggccttttcacatactgagttcaaccagccagacaaactaaggttcagaactttgtgtgtccgagagatgctgttcctttttggcgacactgaaagttctgagtccaatgaccctgatttggctatggaaggtgcaaatggcgagaggggccttttcacatactgagttcaaccagccagacaaacaaaggaccagaagggcagagccaggcccctgcgtccacctctgcctctacccgcctgtttgggttaacaaagccttaggaa

SEQ ID NO: 122203 - DNA, 651 bp, Homo sapiens
atgaacagaggtggttttgcggtaaagatccttgcactgctggatgctctgagtacagtgtgcagtcagagggtgcagaaggccaagaagcagcagcacctgcagaataaagagcattttaaagcactcctcaagcagaaggagaagctgaagcagcaagaggacctcagaagaagctcttctgaattcagggcatcaggtgcccccaagcgaccccccaccacgggcagtgcagcctctgatagtgcacctaccccaccacctttctaccaccctggccatgctgcagtctccgtcacagccagcaactgcagtgaggcgagccacgatgccacaggctacagcctccagggtttttctggctttgcccacactgctgcttcctaccaggagaaggaggatccacctgctggatattggaggctggaggctggagcctgtggtcctgcagcttgcctcgctcggctgctctgggtccctgaaagagggtgtggtgtggacgatctgggttctgaatcggattttgttgagtctgggttttatacgtccactagagctgcccgaggctttgcgccctggatccttggctttgcctccgacccacccctcagccgagtggtgatggtggtgatggtcccctccatcttctag

SEQ ID NO: 122204 - DNA, 942 bp, Homo sapiens
atgcgagcagttgtgtggtcagggctgtcccgcctgggtgggtgtttgggggttccggtgtgggctgtgtgggccggactgcgagagcgggcttctgatttctggttcacggatgtttgccgggccccaaggacacccggggcaggcacagctgtcaccctcctggcagctggagaagaagggcttgagagttctacagctcagcacggctcaggcctttgcagcgaagagccgccaggtgccacgacgtcacgcgtggcaaggcaaatcctacagccggaactggctgcctccggctcgccccaggcctgcccttgctatgtcctcagacacccgggggcaggcacagctgtcaccctcctggcagctggaaaagaagggcttgagcagttctacagctcagcgaggctgcagggctttgcagggaagagccgccagtgccagacgtcacgcgtggcaaggcaaatcctacagccggaactggctggctccggctcgccccaggcctgcccttgctatgtcctcagacacccgggggcaggcacagctgtcaccctcctggcagctggaaaagaagggcttgagcagttctacagctcagcgaggctgcagggctttgcagggaagagccgccaggtgccagacgtcacgcgtggcaaggcaaatcctacagccggaactggctggctccggacagaggcccacgtggcggagaagcgtgtgcgatggccgtgcgagggccgcgtagtcatgagcagcgatgcccgtggagtgctggagcagactcagtgtcgtaggggcactgtgagggcacagacggccgagtggcaagcggtgcatgcctgcaggtcgactctagaggatccgcgggacagaacctacctctggaccctgaacattggcatgtcttctgctttgatttcccatgaaagaacgatctga

SEQ ID NO: 122205 - DNA, 1752 bp, Homo sapiens
atgggtccagggggcaagtctgtgtgtccgtgccagccgtgcacctctccctctggccaggccataggtccagggggcagaactaacacacccttggggcccggcagcacatccgtgaaccagaaatcagaagcccgctctcggcagctccggcccacacagcccacaccggaaacccccaaacacccacccaggcgggacagccctgaccacacactgctcggcatggcccagtgcaggagcatgggagggggcagcggggaccccatttacacaaaaccgaaacaccgcaggaggccacaccgtgagaagtcggctccatcgctactgaacaggcttggcttcctcacctgtgtctctagcgcccacctcccttccatcaagggcttttcccccgagggccgtgcatggaaggtgctcagcaaagagttgaaggatcatcaagtgcacaagggacccaagtgtgcatgggacccaaaactgctggtgactgggacggcccttggctcgtctgctggtttcactgaggagaggctgctgccagaatcctgcggccaggtctgggggtggctgtcaggccatcccctctggccccaaggaggtgggcagatgacagtgggttatggaggagccagtgaagcttgtggggctggggagctgttgatgcggagggcccctcctcagagtccaggcaaggcccgtgggcttcctgcccttactggcaccagggccagacagggcctcgaaaggcagaaatcggcacagaaggagggagacaggaggatggcccaggaagagcggatggtgttggagaagctgctctgtggacgggaagtgctaccagacccgcaggctcccaatttggcaaggaaggaaaaactaattatggcttcatgtcctgcaagaaagagcctgcagcggctcttcagaaacctgccgtcatggaacgtcagcaccagcaccttcgctgccctgctgtgcccatttcccagcgaggacactcaaggcgcgcagggcccagcagctgagctggaggacgaagcccgggtggacgctccacaccatggcctccagggagtgttcccgacctggaggaggcaggtcaccggggtggccctggtggagactgacctggagggagccaggctcccagtgcctctctctgacccagctgcaggaggggcgcctggtggcttgcgtgctgtgcccttgaggatcatctgtaaccagcaccagccccaccctgccctccggacaggacgcgcgggccagattccgttttgtaaaatcgagacagcggctcaggcgcacatgcagtgcgtggagtgcagaaggcctgggtactccggaagcttccagagacagcgtggggcggctgacgtgcggggagacacagacgtggaggacgccacggccgcctcgcccccagggctcccggagcgcggctggctgaggagccaagcagatggtgctgctgagcgtttcctgcctgggcgggaggaggtggggttgccgccggcggggcctgtgactggaaaacgatatctcttcatctttctgccctggacattggaaatcagcggtgagaacagtgctcttgctacaaaatgctcaggttctagaatgctcccatctttccttccattccacatggagtttatccaaagcacaaaggccagtcacggcactgacatccgtggtgcccgctcaccggggagtgggaagcacaagcctgtcctcagaggaccgtga

SEQ ID NO: 122206 - DNA, 759 bp, Homo sapiens
atggcggcggtggtagctgctacggcgctgaagggccggggggcgagaaatgcccgcgtcctccggggtaaggagagggaccccggggagggcaggactgcagaagatcccttttctttcacgtccagcccgacgatagcaggagggattctcggcaggagccacagcttaacaaggcttcttcataacaggacccgggcccttcaaaacccacagcttccccagagggcaaggaggaaccctgaaccccttatccccggaactggaaaatacattccccagaaaagaggggcaaagaacccccatggaaagctgtgggaacttgccctgggccatgcggctttcccttgtggttattccttcctctttcatccttcacccaagcggggaagtgggacaagggaccgtgttgaaggcagattgaaggcttcgggcagaacattgcggtttttccaacacggggcgagtatgaagagccagaaggttcagggctttcctcccagaagtggccccgttccccctgatgtttgggtctggggtgtctgggggtgcagacctgaggagcgtctgcgaccctccttaggctattgactgttaagtcctcaggttttggccagattccagtttcgtgcctctgaaggtccaccagaagggcgcatgaagcccaaggctgtttgccaaaaccctaccctgccccacaccaaggaagccagccaaaagggaaaataaagttattgagtgtttagtagaaagaaaaaa

SEQ ID NO: 122207 - DNA, 456 bp, Homo sapiens
atggggcagagacagggaggcagctgggagcctgggggcgctggaatccagggcccaagcgctcagtgtggtcacatctctgtccttttcccggccactggatctggtgtctcattttatgttccctcttcagtgcctagggaactcgaggctctccaagtaaaaaaggagagagggtcagaagagatgcccagcagactgccacatggtagacaaggagcccagcctctggttgctttcaaatttgtgaaggaaacaagcaggatgaggcatgtgatgtgcgcgggctgcaacactgtgagaggcactcactggcaggaccccgagagtacatgccctaagtcttccaggcaggagagaaaggagaggcgaacgcctccctggagcatggcaccctgggtggagaagctgaggagcgcgagtatagaagaggtggatgattgggccatggaatag

SEQ ID NO: 122208 - DNA, 636 bp, Homo sapiens
atgaaaaatagaagcagaaacaaaggaaatgtggaatggcaagcagaagggataagaagtaaaagaagcgtgggaaagcaaaggccaagcaaggcaaagattccctctggggacaagaatggagtatcactaacccacaatgaagtgatcaataatgacaaccctttagaatcaaatgatgaaaaggagggccaagaagccacttgctcacgaccccagattgtaccaggtttcagcagtagtgacttttcagacctgagtaatggagaagagcttcaggaaacctgcagctcatccctaagaagagggtcagtgcctagggaactcgaggctctccaagtaaaaaaggagagagggtcagaagagatgcccagcagactgccacatggtagacaaggagcccagcctctggttgctttcaaatttgtgaaggaaacaagcaggatgaggcatgtgatgtgcgcgggctgcaacactgtgagaggcactcactggcaggaccccgagagtacatgccctaagtcttccaggcaggagagaaaggagaggcgaacgcctccctggagcatggcaccctgggtggagaagctgaggagcgcgagtatagaagaggtggatgattgggccatggaatag

SEQ ID NO: 122209 - DNA, 619 bp, Homo sapiens
ccagaggcagagctacacaaccatggaatccaaattaattcctgttctgtgcgactggtggatataaaaaaggaaaagccattttctaattcaaaagttgagtgccaagcccaagcaagaactcatcataaccaggcatctgacataatagtcatcagcagtgaggactctgaaggatccactgacgttgatgagcccttagaagtcttcatctcagcaccgagaagtgagcctgtgatcaatagagccaccccttgtgaactcaagtgttgaaaggagggcccaagaagccatttgttaaggccccgagatgttccgagagcccttggtttccggaaatttttctccattcgaggaaagttttaggaaagggttgttaggccaagacccggattttccggattccattgagaagaagccgcccgcagaagcctcgagcgggggcactgagaagcaagcatggtgagaaggctcctatgacttctagaagtacatctacttggagaatacccagcaggaagagaccgtttcagcagtagtgacttttcagacctgagtaatggaaaagagcttcaggaaacctgcagctcatccctaagaagagggtcaggtaaagaag

SEQ ID NO: 122210 - DNA, 1155 bp, Homo sapiens
atgagccaccgcatccggcccgtggtctatgttgcccgcaacgcaaaggatgtggcggtttcctactaccacttctaccacatggccaaagtgtaccctcaccctgggacctgggaaagcttcctggagaagttcatggctggagaagtgtcctatgggtcctggtaccagcacgtgcaagagtggtgggagctgagccgcacccaccctgttctctacctcttctatgaagacatgaaggagaaccccaaaagggagattcaaaagatcctggagtttgtggggcgctccctgccagaggagactgtggacctcatggttgagcacacgtcgttcaaggagatgaagaagaaccctatgaccaactacaccaccgtccgccgggagttcatggaccacagcatctcccccttcatgaggaaaggcatggctggggactggaagaccaccttcaccgtggcgcagaatgagcgcttcgatgcggactatgcgaagaagatggcaggctgcagcctcagcttccgctctgagctcatccttcggaaagctctggacaagatcgcggaaatcaagtctctgttggaagagaggcggattgcggccaagattgccggtctctacaatgactcggagccaccccggaagaccatgcgcagaggggtgctgatgaccctgctgcagcagtcggccatgaccctgcccctgtggatcgggaagcctggtgacaagccctctcagccttccagccccctcgttttggctgcctctaaggccctccaggtcctcctgggcttcctcctctacaatcttccctgtctttcccaccgccaccacccccagttcctcagccgcctgcgcctcccgctctacagtggggactgcatctcccaggagtgcctcaacctggtgttcctgctggcagacgtgtggttcggctttctgccaagcatctacctcgtcttcctgatcattctgtatgaggggctcctgggaggcgcagcctacgtgaacaccttccacaacatcgccctggagaccagtgatgagcaccgggagtttgcaatggcggccacctgcatctctgacacactggggatctccctgtcggggctcctggctttgcctctgcatgacttcctctgccagctctcctga

SEQ ID NO: 122211 - DNA, 717 bp, Homo sapiens
  misc_feature (1)...(717): n = a,t,c or g
gggctggatcccgcgggctcccagacagcgagggcagaggggttgggagccatggtggaggctggggggcttctagagaagtggacgctgttggaagaagaggctgttggatggcaggagagagaacagagggaagacagtgaggggcggtgtggggactaccaccctgagggagaggcaccaaggctccttgatgcagagggtctcatggtgaccgggggccggagggcagaggccaaggagactgagccagaaagcctggaacatgtcaggggccaggaggagcagccaacacaccaggcccctgcagaagctgcgccggagtcagtcggggaagccgagacggctgaggccatgggcagtgccagaggaggtgctgccaacagctggagcgaggccccgctccccgggtccctcctagacgtctctgtcccaaggagtcgcgtgcacctctcgagaagctcctcacagcgtcgctcccggccctcttttcgtcggactccggcctgggagcagcaggaggagcccccagcccccaaccctcctgaggaggagctgtcagctcctgagcagagacccctccagctggaggaacccctggagccaagccctctgaggcatgatgggaccccggtgccagccaggagaaagcccctgggacacgggtttggcctcgcgcaccctggcatgatgcangagctgcaagcccgtctgggg

SEQ ID NO: 122212 - DNA, 3054 bp, Homo sapiens
tcactggggcttaggccggcccagacgggcttgcagctcctgcatcatgccagggtgcgcgaggccaaacccgtgtcccaggggccttctcctggctggcaccggggtcccatcatgcctcagagggcttggctccaggggttcctccagctggaggggtctctgctcaggagctgacagctcctcctcaggagggttgggggctgggggctcctcctgctgctcccaggccggagtccgacgaaaagagggccgggagcgacgctgtgaggagcttctcgagaggtgcacgcgactccttgggacagagacgtctaggagggacccggggagcggggcctgcaggaaagggggcacagaggaccatggggccggcttcgggattccactcgttccccccgagaccccaccaagagccctcacctcgctccagctgttggcagcacctcctctggcactgcccatggcctcagccgtctcggcttccccgactgactccggcgcagcttctgcaggggcctggtgtgttggctgctcctcctggcccctgacatgttccaggctttctggctcagtctccttggcctctgccctccggcccccggtcaccatgagaccctctgcatcaaggagccttggtgcctctccctcagggtggtagtccccacaccgcccctcactgtcttccctctgttctctctcctgccatccaacagcctcttcttccaacagcgtccacttttctagaagccccccagcctccaccatggctcccatcccctctgccctcgctgtctgggagcccgcgggatccagcccacagctgtcctctgcgcctgcagattcctcggcctctacccgccctccccaaggtcctccctccctggactcaaaagcctctacttggctgcctctgccagtcacctcttcctctgctgagccctccagaccaaattcttgcccacctgcatgctctcctgctgctgcctcttccttttctttcgagtcccagccttgcccaagcgccccttccaaagcttcaccagcgccagcagcgctgatgtgtgggaccacatcaccccccataatcccagcagccacagagccagtctgtgcatcctcacggtccgggaggcccacagccaccgcttgcagcctccagcctcttctggatgttctgtcagcctccgcctcctcatcctcagtttctctggcataggcctctcccagtgacgggcaaggccctgcgtctgcccctgtgcttccgtccagctcctggttctctgagacagatgcctctccctcctcagttccacatcccgcgtcctgggttgtcagcccctccccgcctgcctctgggacttctgatagttcagactctcggtctccttcagcctcagccgccagggtctggcctcccgcagtctcctcctcctcccgctgctcgccatcggccgcatcctcctgagtatttcctctctccatgtcctttctcgtgcggttttcccaggctcctgggaaggcctcggaggcctcaggctttacagaccccgcgtgcctgggacctgcctccaggctcctctcctgctcctctttgctcagggccagaactcccatgagctccacctcccctgcctccctttcctcgggttgcttagttggggtctgggcgccccccatcagctcaggtccttggcctttggtgacgctgtgtgtgaggccaccccattccacgcccagtaggccacagctagtctgggccgcctcactctcctcccctgtgagctcctcctcaggcctggcctctggagttgcctccaagtcggcagtgccttcagcctctccatctgagggcagctcagccactggatccctgctgctccctctctcctcctgggcctcctctgcctgtaccagctcttccatcctggcccggtcggccctgatccccaagtcctgcctcatctcagcctccttaccacgcaggtctacctggccctcaaagctctcccctgcctcctggcctcccacagcttccctccctgcggtctggctctcagcagcctcttctgttctttcagtgcccaggacctggggctgtttggggaaagggctcacctcagcctctctctcctcatccccctcctcctctaggacccagacttttccagtagcctctaggagcctttctcctgggactgctccatattctgtctgtctgactcccagcaggtcagcctcctctttgcctggggttgtcctggcctcctctctgcctaagattccccagtcctcaggctctgcccctgggccccacgtcccccatgccctagtgctttcacaggccttctccaccactaccacctcttctcctttcccagccccttcggccccaggctcctcagtttcccctgcatctgcctccctgaccccctgctccatctcccggttgtcccctgccgcctttggcccaacagcaccagccttcccctccgtctccccatgccaggtccactctgactccgcccctctggccatccctggctctcttgccctgacctcttcctcctcctcctcctgttcccagcttctcagcctctcttctctgttcacttcctgctcatgggactcctgcctctcctgggcttggccgctcctgtcttggcaagccccagaccctgccttggatttctttctggcctccaagtgggcgcttggctcctggcacctggcagccttggctgtctccccagccccactgtcctgcctctctgcttgggacccatgggagctgccatctccccagccccaggtctgttctacagctgagctccccacttcatgtcttctgtcatctccaggccctctcagccttccagccccctcgttttggctgcctctaaggccctccaggtcctcctgggcttcctcctctacaatcttccctgtctttcccaccgccaccacccccagttcctcagccgcctgcgcctcccgctctacagtggggactgcatctcccaggaggtaggagacaaaggtgccaagggaatc

SEQ ID NO: 122213 - DNA, 3125 bp, Homo sapiens
gacacacagacagagacagacaggatggactttctccggctatacctccctgggctgcaccaggccttgaggggggcactggattccctcggcacctttgtctcctacctcctgggagatgcagtccccactgtatagcgggaggcgcaggcggctgaggaactgggggtggtggcggcgggaaagacagggaagattgtataggaggaagcccaggaggacctggagggccttagaggcagccaaaacgagggggctggaaggctgagagggcctggagatgacagaagacatgaaggggggagctcacctggagaacagacctcgggctggggagatggcagctcccatgggtcccaagcagagaggcaggacagtggggctggggagacagccaaggctgccaggtgccaggagccaagcgcccacttggaggccagaaagaaatccaaggcagggtctggggcttgccaagacaggagcggccaagcccaggagaggcaggagtcccatgagcaggaagtgaacagagaggagaggctgagaagctgggaacaggaggaggaggaggaagaggcccaggtcctgggcactgaaagaacagaagaggctgctgagagccagaccgcagggagggaagctgtgggaggccaggaggcaggggagagctttgagggccaggtagacctgcgtggtaaggaggctgagatgaggcaggacttggggatcagggccgaccgggccaggatggaagagctggtacaggcagaggaggcccaggaggagagagggagcagcagggatccagtggctgagctgccctcagatggagaggctgaaggcactgccgacttggaggcaactccagaggccaggcctgaggaggagctcacaggggaggagagtgaggcggcccagactagctgtggcctactgggcgtggaatggggtggcctcacacacagcgtcaccaaaggccagggacctgagctgatggggggtgcccagaccccaactaagcaacccgaggaaagggaggcaggggaggtggagctcatgggagttctggccctgagcaaagaggagcaggagaggagcctggaggcaggtcccaggcacgcggggtctgtaaagcctgaggcctccgaggccttcccaggagcctgggaaaaccgcacgagaaaggacatggagagaggaaatactcaggaggatgcggccgatggcgagcagcgggaggaggaggagactgcgggaggccagaccctggcggctgaggctgaaggagaccgagagtctgaactatcagaagtcccagaggcaggcggggaggggctgacaacccaggacgcgggatgtggaactgaggagggagaggcgtctgtctcagagaaccaggagctggacggaagcacaggggcagacgcaagggccttgcccgtcactgggagaggcctatgccagagaaactgaggatgaggaggcggaggctgacagaacatccagaagaggctggaggctgcaagcggtggctgtgggcctcccggaccgtgaggatgcacagactggctctgtggctgctgggattatggggggtgatgtggtcccacacatcagcgctgctggcgctggtgaagctttggaaggggcgcttgggcaaggctgggactcgaaagaaaaggaagaggcagcagcaggagagcatgcaggtgggcaagaatttggtctggagggctcagcagaggaagaggtgactggcagaggcagccaagtagaggcttttgagtccagggagggaggaccttggggagggcgggtagaggccgaggaatctgcaggcgcagaggacagctgtgggctggatcccgcgggctcccagacagcgagggcagaggggatgggagccatggtggaggctggggggcttctagaaaagtggacgctgttggaagaagaggctgttggatggcaggagagagaacagagggaagacagtgaggggcggtgtggggactaccaccctgagggagaggcaccaaggctccttgatgcagagggtctcatggtgaccgggggccggagggcagaggccaaggagactgagccagaaagcctggaacatgtcaggggccaggaggagcagccaacacaccaggcccctgcagaagctgcgccggagtcagtcggggaagccgagacggctgaggccatgggcagtgccagaggaggtgctgccaacagctggagcgaggtgagggctcttggtggggtctcggggggaacgagtggaatcccgaagccggccccatggtcctctgtgccccctttcctgcaggccccgctccccgggtccctcctagacgtctctgtcccaaggagtcgcgtgcacctctcgagaagctcctcacagcgtcgctcccggccctcttttcgtcggactccggcctgggagcagcaggaggagcccccagcccccaaccctcctgaggaggagctgtcagctcctgagcagagacccctccagctggaggaacccctggagccaagccctctgaggcatgatgggaccccggtgccagccaggagaaggcccctgggacacgggtttggcctcgcgcaccctggcatgatgcaggagctgcaagcccgtctgggccggcctaagccccagtgactgagacccggtgctctgggagccaggccctgagtgggtgccagaaggcttgctccaatgccactgagccctgctccctctgccactgtggacacatcctctccaccctctgggcctcagtgtcttgatgtatcattcatggagcaggcaaaaccagacgtctgagaagacccgtgaacttaaggagtctgattctccgacacaggctggtggaccacgtaccccactgagaccacctctcagggtgcctgccctggttcctccccagcctgagtcaactgtttggactgcaaagagggtggggacggggggttaaccctgttccccccaaacctttggaggcccaggtgggagggttgctttagacccggagtttgagaccagcctgggcagcatagcaagatccccatcttttaaaaacaaaataaaacaataaagactgcaaaaaaaa

SEQ ID NO: 122214 - DNA, 463 bp, Homo sapiens
ggcgggggcggagggcgcgggcagcggggccgaccctcccggccgcggtacctgtgccctggcccggggccaaccggtggccgggcgcgtgcgcagcggggggggtcaccgttggaccctcggaggacaatgggcgcccattgttacctccccagcgccaccccccagtaggcgacttctctcggagaagatgccgctttcgactccctaagcacaaagaaaggtcgccggacgctcggtttaaagagggacccggaggtgctgccgcccgggtgcacggggacaataggactccgcccgcaccccggactcccgcactaaaactcgtgcgcccacctctcccgatcccaacaggccgacctagctgtgcgagtggcgggcggtgacccgcagggaagcgaggccacctgagtgcgccgccccggccaggccgcagctccccaggtccctctcagcccgggct

SEQ ID NO: 122215 - DNA, 2736 bp, Homo sapiens
atggctctacgccgtgctggggctgggcggactggctgcttcattgccattgacaccatgcttgacatggccgagaatgaaggggtggtggacatcttcaactgcgtgcgtgagtccgggcccaaaggtcaacctggtacgacagaggagcaatatgtgtttgtgcacgatgccatcctggaagcgtgcctctgtgcaacactgccatccctgtgtgaagctgcagaatctattccagaacacaaaatgcacagccatgagcaactacacactcactcagggattgctgcagcactggctgagctgaacgacttagttcatctggttggcaggtactatgaggctgtgtctgagcctgtgtgtggatgccgcttctgcgccttgggttttgaagaccctcaacattgtgacacccgtgtgcggcccgaggactgcagcattgctcgcccgaaccatgataagaatcgaagtatggacgtgctgcctctggaccgctgcctgcccttccttatctcagtggacggagaatccagcaattacatcaacgcagcactgatggatagccacaagcagcctgccgccttcgtggtcacccagcaccctctacccaacaccgtggcagacttctggaggctggtgttcgattacaactgctcctctgtggtgatgctgaatgagatggacactgcccagaggggtcagtcctttgtgggaccactggagtttggaggagcacagttagaaatactttctgtgcaggaagaccactggaaaagaaagggtaggagagagtacttactaggcaatgaagtggaaaaagtcagttggtctagactcttggctgaagaatttgaatctattcttggatcagccaacttcaaaagttttacatctaaggaagaaaatgtcaaggttgcattcaggttctgtatgcagtactggcctgagaagacctccgggtgctatgggcccatccaggtggagttcgtctccgcagacatcgacgaggacatcatccacagaatattccgcatctgtaacatggcccgggatggttatcgtatagtccagcacctccagtacattggctggcctgcctaccgggacacgcccccctccaagcgctctctgctcaaagtggtccgacgactggagaagtggcaggagcagtatgacgggagggagggacgtactgtggtccactgccttctaatgaattctggtgtcattacgctgggtggaggtcaggacctcgagaggacagtggctgacaagctgtgcaacgtcaagaaaatcactgaattttataagcctgagtttcctcgtctgttcattggaaatgggggaggccgtagtggaaccttctgtgccatctgcagtgtgtgtgagatgatccagcagcaaaacatcattgacgtgttccacatcgtgaaaacactgcgtaacaacaaatccaacatggtggagaccctggaaaatccaattactaatcctggagtggaggagatgtgtgttctgctcctctacgtcatggaaaagattgaggctcttgggggtcactgctctgctgccccctgcaacctccttcaggggcctctggcaccagacatttgcagtctggaccagtgtgaccttacgatgttccctaggccacaagagaggccccccatcctcacacctaacctgcatggggcttcgcccacaaccattctgtaccccttccccagcctgggccttgaccgtccagcattcactggccggccagctgtgtccacagcagtttttgataaaggctgtcaaatttctggcctgctaaagaaaaataacagcacatctcaactatcccttcccttttctggcccctccatgatgctctctggcagcccagaccccaactctgagcaagctcacaccttcgctttgggacctgcttctccggccctaatgatgaccagcaaggaggaactggttggcaaactgaaaagcgtgctaaccctcactccagaacagctactggaatgctacatgcaaagaccctgctctcttaaagcttgtgttctagaagcttatgatgcaccaggcaacatttgggacatcaggattctgcagtttgcaatcaaagaatcttccctcatgaaatattctaaaacgccaattatgtatgtgccctgctctgtgcatggcatgcatacagaggtgaacttgactgataaaatccttacctccatgggcttcccaatctggttgaggataagtgtaaagagagagaagaatcaaatagacgcaataaaaaatgataaaggggatatcaccactgatcccacagaaatacaaactaccatcagagaatactataaacaactctacacaaataaattagaaaatctagaagaaatggataaattcctggacacatacaccttcccaagtctaaaccaggaagaagttgaatccctgaatagaccaataacaagttctgaaattgagctagtaattaagagcctaccaaccaaaaacaaagcccaggaccagatggattcacagtcgaattctaccagagaagaaaacctaggcaataccattcaggacataggcatgggcaaagacttcatgactaaaacactgaaagcaatggcaacaaaagccaaaattgacaaatgggatctaattaaactaaagagcttctgcacagcaaaagaaactatcatcagagtgaacaggcaacctactgaatga

SEQ ID NO: 122216 - DNA, 490 bp, Homo sapiens
cgaatcagaaagcccttgctggtctttgcattggcagcaccagttatgtccatggtgacatacttaggcctgagtaagagcagtaaagaagccctttcagaggtgaacgccacgggagtggccatgcttttctctgccgggacatttctttatgttgccacagtacatgtcctccctgaggtgggcggaatagggcacagccacaagcacgatgcctcgggagggagaggcctcagccgcctggaagtggcagccctggttctgggttgcctcatccctctcatcctgtcagtaggccaccagcattaaatgctcccggtccagccttggtccagggccgtttgacaaacagtgagaacagccggcacgtgacagctactcacttcctcagtctcttgtctcaccttgcgcatctctacatgtattcctagagtccagaggggaggtgaggttaaaacctgagtaatggaaaagcttttagagtagaaac

SEQ ID NO: 122217 - DNA, 972 bp, Homo sapiens
atggtttattctgctctaggaaaacaccaccaagcaagtgaaacacataatgtgattgcatcagacaaagcagcagaaaaatcagttgtccatgaacatgagcacagccacgaccacacacagctgcatgcctatattggtgtttccctcgttctgggcttcgttttcatgttgctggtggaccagattggtaactcccatgtgcattctactgacgatccagaagcagcaaggtctagcaattccaaaatcaccaccacgctgggtctggttgtccatgctgcagtattttatgtttccttgtttccaaatatagctgatggtgttgctttgggagcagcagcatctacttcacagaccagtgtccagttaattgtgtttgtggcaatcatgctacataaggcaccagctgcttttggactggtttccttcttgatgcatgctggcttagagcggaatcgaatcagaaagcacttgctggtctttgcattggcagcaccagttatgtccatggtgacatacttaggactgagtaagagcagtaaagaagccctttcagaggtgaacgccacgggagtggccatgcttttctctgccgggacatttctttatgttgccacagtacatgtcctccctgaggaacgactgaagctggtgactgttttgggtgctggccttctctgtggaactgctctggcagtcatcgtgcctgaaggagtacatgccctttatgaagatattcttgaggtagtccccagtttctattattgccatctttatgtctatgagtacctgatgtttagttcccacttctgcagccctgatccctggcaggaccagctgctgaccctgcgtgtgtgtagctccacctctgcctcacttggtgagggctgcttgggagttagcagtatcagaaagggcatggaactgagtgtacaggctcaacaccatgtggaagttgccaaggcctga

SEQ ID NO: 122218 - DNA, 275 bp, Homo sapiens
atgaacttagcatttttgaccaggagccccatgactcagacaagctttcagacagcttggaagatacacaatcaaatagactccttagcagcagttgctttacaaaatagaaggggactggatctcctaactgctgaaaaagggaccatcaaacttcagatgatcatgcaacaaggtttccagccagttccagctgaagacactactgttggccatcaagaagccaccctgtctccactagacagagagcggcgagagttctgtgatccccaatg

SEQ ID NO: 122219 - DNA, 1347 bp, Homo sapiens; identical to SEQ ID NO: 122050

SEQ ID NO: 122220 - DNA, 491 bp, Homo sapiens
cggacgcgtgggtgcctgtcccaccacaaccaccactaacacctccaccgccatcacctccaccatcactatccctactcctactaacaccaccactgcctcaattatcaccaccttaccttttccactggctctaccacctccacaccatcttaaccagcatgcccattacctccacctttattaccaccaccattataatcaccatcatcacctccatcaccaccaccgctcccactgccaccatcaccaccaccacctgaccatccatctcctctgccaacatcatcatcatcacttccatcctactaaacacctccttctagctcacccacaggcacttcaaactcatcatgaaccaccatgacatgctcaccaccgcccccttctaaacttctctgccttgggactgaagccaggaaccaccccctcattaaatcagtcaccgcgtcttgtctatgccacctccgaatatctctttcctaaacaaa

SEQ ID NO: 122221 - DNA, 1257 bp, Homo sapiens
atggcagaggtgtctccgaggctccaagaaagatcaaatgatgctgtgactactgctccaattctccagggctacatttatcctcttccagcctccagcaaatactttcacaagcgctttttcccagaccagagcaagacgcggaggctcggggagaggaggcggccaggagagcgcagaggagacgagcgagttcggggaccgtcacgcgccagaggcagcagcggccacgagggggagcgcgcgggctccggagcccaagcacgcctcaagctgtgggactcgcgggcagtgcgcatgcgctcgaagggaggtggaggcgcaggtccgggcgaagggcgatacggtggccgagagggcacggagaggaggacggtggctgacgagatccggcatggagcatctggagcgctgcgagtggttgttgcgggggacgctggtgcgggcggccgtgcggcgctacctgccctgggccctggtggcctccatgctggcgggctccctcctcaaggagttgtccccgttgcccgagagctacctcagcaacaagcgcaacgtcctcaacgtgtattttgtcaaagtggcctgggcctggacgttctgtctccttctgcctttcattgccctcaccaactaccatctgaccggcaaggctggcttggtcctgcggcggctgagcaccctgcttgtgggcacggccatctggtacatctgcacctccatcttctccaacatcgaacactacacgggcagctgctaccagtccccagccctggagggggtcagaaaggaacaccagagcaagcagcagtgccaccaggaagggggcttttggcatggctttgacatctcaggtcactccttcctgctgaccttctgcgccctccatgattgtaagaagagatgtctgtgcctgcaatgaaggtgaaagacggaccgaagccactgcctccacaccgccatcaccaccctggttgtggccctgggcattctgactttcatctgggtgttgatgtttctgtgcacagctgtttatttccacaacttgtcccagaaggtgtttggcaccttgtttggtttgctgagctggtacgggacatacgggttttggtatccgaaagccttttcccccaggacttcctccccagagctgtagtttgaatttgaagcaagatagttacaagaaataaaagagtaacagaggggggacagaaggacaatggctaatctatttttcaaatatatattttgcttagt

SEQ ID NO: 122222 - DNA, 928 bp, Homo sapiens
gcagtcctgcggcgacgattacgtcgctcgggaggaagtgccgatcggctgctggggcgaaaagggggcgccgggccgctctagcctccctggtccagcgcctccctctctcagcatggacgaagagagcctggagtcggccttgcagacctaccgtgcgcagctgcagcaggtggagctggccttgggcgccggcctggattcgtctgagcaggctgacctgcgccagctgcagggggacctgaaggagctcatcgagctcaccgaggccagcctggtgtctgtcaggaagagcaggttgttggccgcgctggacgaagagcgcccgggccgccaggaagatgctgagtaccaggctttccgggaggccatcactgaggcggtggaagcaccatgcagggcccgtgggtccggatcagagaccgttcctaaagcagaggcggggccagaatctgcggcaggtgggcaggaggaggaagagggagaggacgaggaagagctgagtgggacaaaggtgagcgcgccctactacagctcctggggcactctggagtatcacaacgccatggtggtgggaacggaagaggcggaggatggctcggcgggtgtccgtgtgctttacctgtaccccactcacaagtctctgaagccgtgcccgttcttcctggagggaaagtgccgctttaaggagaactgcaggacggctgagaccgtggtgggggtcctcctccccaaccttcgtggagagaaagagggaacaccagaaggggacacagccacggccccctccgctcaccagttcctgctttatccccagcaaagagctctgggggcgaacgcagccgggaaattcctgtcacctggtggcgtgacaggaatagccatcgccatcctagccatcgccatcctagccatcgccacatcctag

SEQ ID NO: 122223 - DNA, 1515 bp, Homo sapiens
tacccgtgagcgattttcagtagcgaaccgtgtgaccggatcagagaccgttcctaaagcagaggcggggccagaatctgcggcaggtgggcaggaggaggaagagggagaggacgaggaagagctgagtgggacaaaggtgagcgcgccctactacagcttctggggcactctggagtatcacaacgccatggtggcgggaacggaagaggcgcgggatggctccgcgggtgtccgtgtgctttacctgtaccccactcacaagtctctgaagccgcgccccgtctctctggagggaaagtgccgctttaaggagaactgcaggttctcccatgggcaggtggtctctctggatgagctgcgccccttccaggacccagacctgagctccctgcaggccggctctgcgtgtctggccaagcaccagggatggcctctggaacggcagcacgcatcaccgatgtgggacaacggctacttacacagtcaagtttgactcgctgctgctgagggaggccgtggttggagggggacggcatcctgcccccactgcgcacaagaggccacaagagtccgactcagacagcgacggtacgggtgactccagctatgccagagtggtggggtcagatgctgtggactctgggacctgcagctctgcctttgctgggctgggaggtgcacacgcgaggtataggctccagactcctcaccaagatgggctatgagtttggcaagggtttgggccgacacgcggaaggccgggtggagcccatccatgctgtggtgttgcctcgagggaagtcgctggaccagtgtgtggagaccctgcagaagcagaccagggttggcaaggctggcaccaacaagccccccaggtgccggggaagaggggccaggcctgggggccgcccagctcctcggaatgtgtttgacttcctcaatgaaaagctgcaaggtcaggctcctggggccctagaagccggggcggccccagcggggaggaggagcaaggacatgtaccattgccagcaagagtgccaagccgggccctgagcctgcggctctttccagactgaggagaagatcgagcgaacccagcgggacatcaggagcatccagggaggctctcgcccgcaacgctggccggcatagcgtggcgttcaccaagcttgcaggagaagctggcaggagcccagcgccagctggggcagctccgggctcaggaagccggcctgcagcagggagcagaggaaggcagacacccacaagaagatgactgagttctagagaccccacaagcactatggacgaagcgtgggaccccagcacgggctgccctcaggaagaccagtgttgcccgaggaggggccggcctgctggcctggggcgtgcggacactgctgagtggagacagagctgcggggtcccatctggacacttacttgcccacctgccagtgtcttgggcatttccttggcaaggacattaaagtgatttcatcacagtgtcaaa

SEQ ID NO: 122224 - DNA, 419 bp, Homo sapiens
  misc_feature (1)...(419): n = a,t,c or g
nnnnnnnnnnnnnnnnnnnnncagttggcccactctttattaaagccaggccctcctgctgacagctgcaggacagctgttggggcccaggagggacggaaacagcaaatcctgtcccgcagggagaggaaaaacccagggccgaggtcattacccagcaccccaatgcctccctgggacccctgttttcctaaccaccccgccccgaaacctcaccaacctcacccagccaggctaactgaccgccaccacccanggccttttcccacccaccaactaccgtgcctcctacccgcccccagccctggcagcctggttgttgcgctcagcccccaaggccatgtttacactaacgtggagggaactaggtctattagggaatgcagctgcaccaaaaatccgtttcctggccccattca

SEQ ID NO: 122225 - DNA, 1536 bp, Homo sapiens
  misc_feature (1)...(1536): n = a,t,c or g
ggcattttgggtcctggggggctgtacaccttgccctggtactggagcaggtgagccctggatgagccacatggtgctggggcctctgaagaaagggctggggatgtgtttggaccaccacgaagggtacctggcccctcactctggcctctggaagcctggccaacatcttcacaaaaagtaatgccccaagtcaggtgtttacacttacatcaagtgtgggggcagcgtggggggccaccaaggaatacggtgggcatgggcagcacggggccacactggcctggggccaactcctcatgggccatcctaggacccattctaatttcttaaaagagaaaatcttttaaaaaatgtttgcagaaacaagttggacctgaggccaaacagagcctccccaacgggttcccaggagtggcgacagcatggagtccagtcagaagttcagtttgtccactctttattaaagccaggccctcctgctgacagctgcaggacagctgctgggacccaggagggacggagacagcagatcctggccatacagggctagagctgagattcccagagccccccaagcccaccttgcccttggccctttctgaggctcctgtcccgcagagagaggagaaaacacagggccgaggtcattacccagcaccccaatgccttcctggggacccttgctctcctcaccaccccgccccgcaacctcaccaacctcacccagccaggctaactgaccgccaccacccaggccttcttcccacccaccaactaccgtgcctcctacccgcccccagccctggcagcctggctgctgcgctcagcccccaaggccatgtctacactaacgtggagggaactaggtctattagggaatgcagctgcaccaaaaatccgtttcctggccccattcacagtggcctcaaaagcgtgaggggaatgggtcttcacatgaaatacaccccagctgcccgcccagtggcttccatgggcccagtccagagggtaggatgcccaccnaggcaggggccttgcatagttgggtgcctggtttgtcactgagccacggctcaggtccacaccnccccccgaggtggacagccactgtgcaagctgccaggccacgggtgcctccactaaccaatttgtgaaatgggactctaaacagaaacactacttgttctagtgtaatgacagaagcagagttaaagggacctgcgagtgtcctagggccctgattatgggatgtggggaaagatccttcgaccaacctcagtcgctctaagtgagcgctgggctccgagaacggggcgtctgcctgctcccggagaggggcagcccagggaagtgaaagctggggctcagggctgcgagggcctcgggcgcccgtagatgtctgagtttgccacctccggctgagggagacgaaagtaccaaggactgagaggacaagcagagaccaaaaccgaaccggtgcggagggtgccggggtgacctcggtgcaagtgtgggtagagaagaggaggcggc

SEQ ID NO: 122226 - DNA, 362 bp, Homo sapiens
ctctttgataatactgtttattgtccacggaccgagcgattgctcaagaatgatacaaagcatcagagacatgcgcagtctgcttgtcaactttcaacaactcttgtgtgttcccagcaccggaaggtctcagacttcatattccagcataaacacagtgctcccctcccccaaaaatccaaacggaaacaaaatcaacagagcttcatgctaaaaactctcaataaactaggcattgatgaaatgtataagagctatttatgacaaacccacagccaatatcatactgaatgggcaaaaactagaagcattccctttgaaaactggcacaagacaagggttctctctctcaccactcctat

SEQ ID NO: 122227 - DNA, 1233 bp, Homo sapiens
atgattatctcaacagatgcagaaaaggcctttgacaaaattcaacagcccttcatgctaaaaactctcgataaacaaggtattgacggaacgtacctcaaaataataagagctatttatgacaaacccacagccaatatcatactgaatgggcaaaaactggaagcattccctttgaaaactggcacaagacaaggatgccctttctcacaactgctattcaacttaatgttggaagttctcaccagggcagtcagggaagagaaagaaataaaagagaataaaatacctaggaatccaacttacaagggatgtgaaggacctcttcaagaggaactagaaaccattgctcaacgaaataaaagaggacacaaagaaatggaagaacattccatgctcatggataggaagaaccaataccgtgaaaatggccatactgcccaagtttcgataatggacaaggtgacgacagttttcaacagtgcacaaagactagaagttgtcagaaactgtatctcattcatatttgaaaataaaattttggaaactgaaaagacccttcctgctgcactcagagcccttaaaggaaaggcagcaagacagtgtctcactgatgaattgggtttgcatgtccagcaaaaccgggcaatattagaccatcaacagtttgactacataataaggatgatgaattgtactctacagtactttgaaggttccaacagtgacatgtatctcatgcctgctgccatgttttgggaccccttccacaaggacctccacaagctggtgttctgtgaagttttcaagtgcaatcgaaagcctgcagagaccaatttgaggcacacctgtaaacggataagggacatgtggaaattccaaatcggaccctgtgaaggaatcagcatggaagatcatctctgggtgacctgtttcatcttacatcgtgtatgtgaagacttcggagtgatagcaacctttgatcctaagcccattcctgggaactggaatggtgcaggctgccataccaacattagcaccaaggccatgcgggagaatgcccatcatagtgccagcatacacattccccagactgttggccaggagaagaagggttactttgaagatcattgcctctctgccgactgtgacccattttcggtgacagaagccctcatctgcccgtgtcttctcaaaccggagttgagcccttccagtacaaaaactaagtga

SEQ ID NO: 122228 - DNA, 1936 bp, Homo sapiens
tgacaaacccacagccaatatcatactgaatgggcaaaaactgcaagcattccctttgaaaactggcacaagacagggatgccctctctcaccactcctattcaacatagtgttggaagttctggccagggcaatcaggcaggagaaggaaataaagggtattcaattaggaaaagaggaagtcaaattgtccctgtttgcagacgacatgattgtttatctagaaaaccccatcgtctcagcccaaaatctcccttaagctgataagcaacgtcagccaaagtctgaggatacaaaatcaatgtgcaaaaatcacaagcattcttatacaccactaacagacaaacagagagccaaatcatgagtgaactcccattcacaattgcttcaaagagaataaaatacctaggaatccaacttacaagggatgtgaaggacctcttcaaggagaactacaaaccactgctcaaccgaaataaaagaggacacaaacaaatggaagaacattccatgctcatggataggaagaatcaatattgtgaaaatggccatacttgcccaaggtaatttacagattcaatgccatccccatcaagctaccaatgactttcttcacagaattggaaaaaaactactttaaagttcatatggaaccaaaaaagagcccgcattgccaagtcaatcctaagacaaaagaacaaagctggaggcatcacactacctgacttcaaactatactacaaggctacagtaaccaaaacagcatcggtactggtaccaaaacagagatatagatcaatggaacagaacagagccctcagaaataatgccgcatatctacactattctgatcctttggacaaacctgagaaaaacaagcatgggggaaaggcatccctaatttataaaatggctgctggggaaaactggctagcccatatgtaggaagctgaaactggatcccttccttacaccttatacaaaaatcaattcaagatggattaaagatttaaacgttagacctaaaaccataaaaaccctagaagaaaacctaggcattaccattgaggacataggcgtgggcaaggacttcatgtccaaaacaccaaaagcaatggcaacaaaagccaaaattgacaaatgggatctaattaaactaaagagcttctgcacagcaaaagaaactaccatcagagtgaacaggcaacctacaacatgggagaaaattttcgcaacctactcatctgacaaagggctaatatccagaatctacaatgaactcaaacaaatttacaagaaaaaaacaaacaaccccatcaaaaagtgggcgaaggacatgaacagacacttctcaaaagaagacatttatgcagccaaaaaacacatgaagaaatgctcatcatcactggccatcagagaaatgcaaatcaaaaccactatgagatatcatctcacaccagttagaatggcaatcattaaaaagtcaggaaacaacaggtgctggagaggatgtggagaaataggaacacttttacactgttggtgggactgtaaactagttcaaccattgtggaagtcagtgtggcgattcctcagggatctagaactagaaataccatttgacccagccatcccattactgggtatatacccaaatgactataaatcatgctgctataaagacacatgcacacgtatgtttattgcggcactattcacaatagcaaagacttggaaccaacccaaatgtccaacaatgatagactggattaagaaaatgtggcacatatacaccatggaatactatgcagccataaaaaatgatgagttcatgtcctttgtagggacatggatgaaattggaaaccatcattctcagtaaactatcgcaagaacaaaaaaccaaacaccgcatattctcactcataggtgggaat

SEQ ID NO: 122229 - DNA, 1105 bp, Homo sapiens
cttaccaaccaaaaagagtccaggaccagatggaatcacagccgaattctaccagaggtacaaggaggaactggtaccggtccttctgaaactattccaatcaatagaaaaagagggaatcctccctaactcattttatgaggccagcatcattctgataccaaagccgggcagagacacaaccaaaaaagagaattttagaccaatatccttgatgaacattgatgcaaaaatcccttaataaaaatactgacaaaactgaatcccagcagcacatcaaaaaagcttatcccaccatgattaaagtgggcttccatccccctgggatgcaagactggttccaacatacacaaatcaataaatcctaattcagcatataaacagagccaaagacaaaaaccacatgattatctcaatagatgcagaaaaggcttttgacaaaattcaacaacccttcatgctaaaaactctcaataaattaggtattggtgggacgtatttcaaaataataagagctatttatgacaaacccacagccaatatcatactgaatgggcaaaaactggaagctattccctttgaaatgttgaaagttatgtacagggcatttaggcagaataagcaaataaagggtattatattagaaaaagaagaagtcaaattgtccctgtttgcagacgacatgattgtttatctagaaaaccccattgtctcagcccaaaatctccttaagctgataagcaacttcagcaaagtctcaggatacaaaatcaatgtacaaaaatcacaagcattcttatacaccaacaacacacaaacagagagccaaatcatgagtgaactcccattcagcaattgcttcaaagagaaggaaatacctaggaatccaacttacaagggacgtgaaggacctcttcaagaagaactacaaaccactgctcaaggaaataaaacaggatacaaacaaatggaagaacattccatgctcatgagtaggaagaatcaatatcgtgaaaatggccatactgcccaagtaagatgtgcttgcttctccttcgcctttcaccatgactgtgacttgcaggaagcaagttcaggttcttag

SEQ ID NO: 122230 - DNA, 2763 bp, Homo sapiens
cgcgagagcaggttaggagaggagaggaggccgcagtactgctcacacgctccgctcttctcccactctcggcctacctttacccgcccgcctgctcggcgaccagaacaccttccaccatgaccacctcagcaagttcccacttaaataaaggcatcaagcaggtgtacatgtccctgcctcagggtgagaaagtccaggccatgtatatctggatcgatggtactggagaaggactgcgctgcaagacccggaccctggacagtgagcccaagtgtgtggaagagttgcctgagtggaatttcgatggctccagtactttacagtctgagggttccaacagtgacatgtatctcgtgcctgctgccatgtttcgggaccccttccgtaaggaccctaacaagctggtgttatgtgaagttttcaagtacaatcgaaggcctgcagagaccaatttgaggcacacctgtaaacggataatggacatggtgagcaaccagcacccctggtttggcatggagcaggagtataccctcatggggacagatgggcacccctttggttggccttccaacggcttcccagggccccagggtccatattactgtggtgtgggagcagacagagcctatggcagggacatcgtggaggcccattaccgggcctgcttgtatgctggagtcaagattgcggggactaatgccgaggtcatgcctgcccagtgggaatttcagattggaccttgtgaaggaatcagcatgggagatcatctctgggtggcccgtttcatcttgcatcgtgtgtgtgaagactttggagtgatagcaacctttgatcctaagcccattcctgggaactggaatggtgcaggctgccataccaacttcagcaccaaggccatgcgggaggagaatggtctgaagtacatcgaggaggccattgagaaactaagcaagcggcaccagtaccacatccgtgcctatgatcccaagggaggcctgggacaatgcccgacgtctaactgggattccatgaaacctccaacatcaacgacttttctgcttggtgtagccaatcgtatctgccagcattcgcattacccggactgttggccaggagaagaagggttactttgaagatcgtcgcccctcttgccaactgcgaccccttttcggtgacagaagccctcatccgcacgtgtcttctcaatgaaaccggcgatgagcccttccagtacaaaaattaagtggactagacctccagctgttgagcccctcctagttcttcatccctgactccaactcttccccctctcccagttgtcccgattgtaactcaaagggtggaatatcaaggtcgtttttttcattccatgtgcccagttaatcttgctttcttttgtttggctgggatagaggggtcaagttattaatttcttcacacctaccctcctttttttccctatcactgaagctttttagtgcattagtggggaggagggtggggagacataaccactgcttccatttaatggggtgcacctgtccaataggcgtacgtatccggacagagcacgtttgcagaagggggtctcttcttccaggtagctgaaaggggaagacctgacgtactctggttaggttaggacttgccctcgtggtggaaacttttcttaaaaagttataaccaacttttctattaaaagtgggaattaggagagaaggtaggggttgggaatcagagagaatggctttggtctcttgcttgtgggactagcctggcttgggactaaatgccctgctctgaacacgaagcttagtataaactgatggatatccctaccttgaaagaagaaaaggttcttactgcttggtccttgatttatcacacaaagcagaatagtatttttatatttaaatgtaaagacaaaaaactatatgtatggttttgtggattatgtgtgttttggctaaaggaaaaaaccatccaggtcacggggcaccaaatttgagacaaatagtcggattagaaataaagcatctcattttgagtagagagcaagggaagtggttcttagatggtgatctgggattaggccctcaagaccccttttgggtttctgccctgcccaccctctggagaaggtgggcactggattagttaacagaccaacaccgttactagcagtcacttgatctccgtggctttggtttaaaagacacacttgtccacataggtttagagataagagttggctggtcaacttgagcatgttactgacagagggggtattggggttattttctggtaggaatagcatgtcactaaagcaggccttttgatattaaattttttaaaaagcaaaattatagaagtttagattttaatcaaatttgatgggtttctaggtaatttttacagaattgcttgtttgcttcaactgtctcctacctctgcctcttggaggagatgggacagggctggagtcaaaacacttgtaattttgtatcttgatgtctttgttaagactgctgaagaattattttttttcttttataataaggaataaaccccacctttattccttcatttcatctaccattttctggttcttgtgttggctgtggcaggccagctgtggttttcttttgccatgacaacttctaattgccatgtacagtatgttcaaagtcaaataactcctcattgtaaacaaactgtgtaactgcccaaagcagcacttataaatcagcctaacataag

SEQ ID NO: 122231 - DNA, 452 bp, Homo sapiens
caacattccaggccgtgcgcacccaggagaaagagcagatcaagaccctcaacaacaagtttgcctccttcatagacaaggtacggttcctggagcagcagaacaagatgctggagaccaagtggagcctcctgcagcagcagaagacggctcgaagcaacatggacaacatgttcgagagctacatcaacaaccttaggcggcagctggagactctggcccaggagaagctgaagctggaggcggagcttggcaacatgcaggggctggtggaggccgctatgcagggtagcactgggaacaggagacccacctgagctcagccctagccctcagcccacctggggagtttactacctgggaccccccttgcccatgcctccagctacaaaacaattcaattgctttttttttttggtccaaaataaaacctcagctactctgccaataaa

SEQ ID NO: 122232 - DNA, 1448 bp, Homo sapiens
atgtccatcagggtgacccagaagtcctacaaggtgtccacctctggcccctggttcttcagcagctgctcctacttgagtgggcccagtgcccacatcagctccttgagcttctcccgagcgggcagcagcagcttccagggtggcctgggcagaggctatggtggggccagcggcatggaagtcatcactgctgtaatggtcaaccagagcctgctgagccccattaacctggaggtggacctcaacatccaggccatgcacacctaagagaaggagcagatcaagaccctcaacaagtttgcctccttcattgacaaggtacagttcctggagcagcagaacaagatgctggagaacaagtggagcctcctgcagcagcagaagatggctcagagcaacctagacaacatgttcgagagctacatcaacaaccttaggtggcagctggagactctgggccggaagaagctgaagctggaggcagagcttggcaacatgcaggggctggtggaggatttcaagaacaagtatgaggatgagatcaataagtatacagagatggagaatgaatttgtcctcatcaagaaggatgtggatgaagcttacatgaacaaggtagagctggagtatcgcctggaagggccgactgatgagatcaacttcctcaggaagttgtatgaacaagagatccgggagctgcagtcccagatcctggacatgtctgtggtgctgtccatggacaacagccactccctggacatggacagcatcattgctgaggtcaaggtgcagtacgaggagatcgctaaccgcagctgggctgaggctgagagaatgtaccagaactagtatgaggaactgcagatgctggctggggagcacggggatgacctacttagtacaaagactgagatctccacgataaaccagaacatcagctggctccaggctgagattgagggcctcaaaggccagagggcttcctggagtccaccataacagatgtggaacaacgtggggagctggtcattaaggatgccaatgccaagctttcccagctggaggctgccctgcagcgggccaagcaggacatggcactgcagctgcatgagtaccaggagctgatgaacttcaagttggctcaggacatcgtgatcaccacctacaggaagctgctggagagcgaggggagctggctggagtctgggatgcagagcatgagtatccatatgaagaccaccagtggctatgcaggtagtctgagctcggcctatgggggcctcacaagccccagcctcagctacagcctgggctccagctttggctctggcgctggctccagctccttcagccacaccagctccaccagggccgcggttgtgaagaagattgaggcccagaatgggaagctcgtgtccaagtcctctgacgtcctgcccaagtga

SEQ ID NO: 122233 - DNA, 2077 bp, Homo sapiens
ctgcctgcgccaagcttggcacgaggaaaatctgtcttcctccctagacagtaagctctctgaagtcaagaaccatagttgttttgttcactactgtatactcagcacctaatagtacttggcacataagtactcagggactatttgtcaaatgcaagaacatatgcccctaaagcagaagtcaggaaaaccagaaaaaatgcctttaagtattacagaaatgccacaggcctccacttaaattgaaaagcaagctaacccctcttgataaaaatgtggattgagatcaagaagcagcttctctgctccttctaggatctccgcctggttcggcccgcctgcctccactcctgcctccaccatgtccatcagggtgacccagaagtcctacaaggtgtccacctctggcccccgggccttcagcagccgctcctacacgagtgggcccggttcccgcatcagctcctcgagcttctcccgagtgggcagcagcaactttcgcggtggcctgggcggcggctatggtggggccagcggcatgggaggcatcaccgcagttacggtcaaccagagccctgctgagcccccttgtccttgaggtggaccccaacatccaggccgtgcgcacccaggagaaggagcagatcaagaccctcaacaacaagtttgcctccttcatagacaaggtacggttcctggagcagcagaacaagatgctggagaccaagtggagcctcctgcagcagcagaagacggctcgaagcaacatggacaacatgttcgagagctacatcaacaaccttaggcggcagctggagactctgggccaggagaagctgaagctggaggcggagcttggcaacatgcaggggctggtggaggacttcaagaacaagtatgaggatgagatcaataagcgtacagagatggagaacgaatttgtcctcatcaagaaggatgtggatgaagcttacatgaacaaggtagagctggagtctcgcctggaagggctgaccgacgagatcaacttcctcaggcagctgtatgaagaggagatccgggagctgcagtcccagatctcggacacatctgtggtgctgtccatggacaacagccgctccctggacatggacagcatcattgctgaggtcaaggcacagtacgaggatattgccaaccgcagccgggctgaggctgagagcatgtaccagatcaagtatgaggagctgcagagcctggctgggaagcacggggatgacctgcggcgcacaaagactgagatctctgagatgaaccggaacatcagccggctccaggctgagattgagggcctcaaaggccagagggcttccctggaggccgccattgcagatgccgagcagcgtggagagctggccattaaggatgccaacgccaagttgtccgagctggaggccgccctgcagcgggccaagcaggacatggcgcggcagctgcgtgagtaccaggagctgatgaacgtcaagctggccctggacatcgagatcgccacctacaggaagctgctggagggcgaggagagccggctggagtctgggatgcagaacatgagtattcatacgaagaccaccggcggctatgcaggtggtctgagctcggcctatgggggcctcacaagccccggcctcagcttacagcctgggctccagctttggctctggcgcgggctccagctccttcagccgcaccagctcctccagggccgtggttgtgaagaagatcgagacacgtgatgggaagctggtgtctgagtcctctgacgtcctgcccaagtgaaacagctgcggcagcccctcccagccttacccttccttgcgttgccccagagctgggggaagggagggccgttattgcagggtagcactgggaacagggagacccacctgaggcttcagcccttagccctcagcccacctgggggagtttaattacctggggaccccccttgcccatgcctccagctacaaaacaattcaattgctttttttttttggtccaaaataaaacctcagctagctctgccaaaaaaaaaaaaaaa

SEQ ID NO: 122234 - DNA, 3522 bp, Homo sapiens
atgcacaaggagctgcctgcgttggctgcctgtggtcttgttgctgactttgaccccgtgggggaggaggaaactgcagactttggcccattggtgctagattcagacagtgacgattccgtggaccgggacattgaggaggccatccaggagtacctgaaggtgggatccagcaaggaccagggctctgcctccccagtcagcatgagcagagcagactcctttgagcagagcatcagggcagaaatagaacagtttctgaatgagaaaagacagcatgagacccaaaaatgtgatgggtcagtggagaagaaaccagacacacatgaaaattcggcgaagtcactctcgaaatcccaccaagagccggctacaaaggtggtgcaccggcagggcctgatgggcgtccagaaggagttcgccttctgcagacctcccccggttagcaaagacaaacgtgcagcccagaagcctcaggtccaaggtcacgaccacgaccacgcaggagaaggagggcagcacaaagccagcaacccccaccgcccttcagaagcagtacagaataaaagtgggattaaaaggagcgccagcaccgcaaggaggggaaagcgagtcacgagcgccgtacaggctcccgaggcgtccgactccagcagcgacgacggcattgaggaggccatccagctgtaccaggtgcagaaaacacacaaggaggccgacggggacccgccccagagggtccagctccaagaggaaagagcacctgcccctcccgcacacagcacaagcagcgccacaaaaagtgccttgccagagacccacaggaaaacacccagcaagaagaagccagtgcccaccaagaccacggaccctggtccaggggatctggacgctgaccattcccccaagatcccaaaggaaaccaaagctccacctccaacgagcccggcttccaggagcaagtttgtggaatggtcctcttgccaggcagacacctccgctgagctgataagcagtcctggacattttcaagacgatcctgccggccctatggagggcagcgatgggtccctgtccgcaagcccactcttctactcccccaacgtgccttcccgctctgatggtgacagtagctccgtggacagcgacgacagcattgagcaggaaatctggacgtttttggccctcaaggtgcagtctagaagtttgctggccagaggtgagagctgccctcaggctgcccagggcccactttcaccacctggcctcagcagccagaccggcagccccaaggcccctctctctaaaacactggacccactcctggctgcaaaaggaagcatagaggcggctgccaaggcacagccagcgaggccccgggatgggagggcgccgctagggtgggacctttccatccagggcacagccagcgaggccccgggaggagagggcgccgctagggtgcccggtgacactcgcacgtcacagggccagggtaagacagacgaggcaaggcacctagacaagaagaagagctccgaagacaaaagcagttccctggacagtgacaaggacctggacacagccatcaaggacttgttaagagagtcccagggcccagctcccagccctggctccttgtctgacaacagcagttcagtggacagcgacgatagcatcgaactggagattaggaagtttttggtggaaaaggccaaggagtcgggagtcccaggccaggcccagccttgtctttggaagcccacacttgctggcgaagaaggactgcgatcaccggccaagcaggaaggtgcctggtgctacgactcccaggaccccaagtgtggtgactcgaagaagccttccaaaaagcgtgtgaaaaggaagccctactctactaccaaggtgacttcagggagcacattcaatgagaatacaagaagatatgctgtgcacaccaaccagtgtaggagacctcatggctcccgggtaaagaagaagaggtacccacaagaagatgacttccatcatacagtcttcagcaaccttgaaagattggacaagcttcagcccactcttgaagcctctgaggagtctctagttcacaaggacagaggagatggagagaggccagtcaacgtgaaggtggtgcaggtggcccctctgaggcgtgaatctagtaagtattctggaatcacttaccaagaaaacaatctggatgccaagaaagctccccatgaggacaccgtacacaacatcactaacgaggatgcctcacacgatatcactaacgaggacgctgtccacggcatcgctaacgaggccgccgacaagggcatcgccaacgaggacgccgcccagggcatcgccaacgaggacgccgcccacggaatcgccagcgaggacgccgcccagggcatcgccaacgaggtcgccgcccagggcatcgccaacgaggacgccgcccagggcatcgccaaggaggacgccgcccacggcatcgccaacgaggatgctgcccacggcattgctaacgaggatgccgtgcacggcatcgctaatgaggactccgtatacgacatcgctaatgaggatgccatatatgacatcgctaatgacaccgtacaaggcacactaacgaggacgctgtacacgacatcgctaatgaggacaccatacaaggcattggtaatgaggacgttgtatatgacatcgctaacaaggacactctacaagccgtcgctaacaaggacactgtacacaacatcgctaatgacggcaccatacaagacatcaccaatgagggcgctttatacgacattgctaatggcaccgacaaggcacgctaacgtggacactgtacacgacattgctaatgaggactccgtatacgacatcgctaatgagggtgccgtatatgacatcgctaatgacaccgtacaaggcacgctaacgaggacgctgtacacgacatcgctaatgaggacaccatacaaggcatcggtaatgaggacgctgtatacgacatcgctaacgaggacaccatacaagccgtcgctaacaaggacactgtacacaacatcgctaatgatggcaccgtacaagacatcaccaatgagggcgctttatacgacattgctaatgataccgacaaggcacgctatcgtggacgctgtacacgacatcgctaatgaggactccgtatacgacatcgctaatgagggtgccgtatatgacatcgctaatgacaccgtacaaggcacgctaacgaggacgctgtacacgacatcgctaatgaggacaccatacaaggcatcggtaatgaggacgctgtatacgacatcgctaacgaggacaccatacaagccgtcactaacaaggacactgtacacaacatcgctaatgacggcaccgtacaagacatcaccaatgagggcgctttatacgacattgctaatgataccgacaaggcacgctaacgtggacgctgtacacgacattgctaatgaggacaccgtataa

SEQ ID NO: 122235 - DNA, 445 bp, Homo sapiens
tcttggctcccagtttccttctgggcagacattgcccctctgccctgaggacctgcttgtttgggggaagaggcctttagaggcaccagggtcatgccaggtgttggacatggtgaactgggaagtgctctccatctggccacagcgcagaagtatcaccgtgctgggggatggggaacagggctgtgaatgggcctatttgcataagcagcatgtgtctggagagaaagacatcacagagcagaagagtgcgggtgcccaggagtgcacttgccacccctacttcatccctgaaagagtaaatggcctggaaggtgtctctgagaggtaatgccgcacaccaccctccctgggggcagggtcaggctacacctgccttatgtggggggctgcagcagcctgagagctctcagtagggccttagtagcctgggagggagcagggg

SEQ ID NO: 122236 - DNA, 2142 bp, Homo sapiens
atggatatgttcaggtctggaatccggcgggatgggggactgggcgacggcattgtgagggctcggcggaggcgccagggggcgctagctggctcctcgcagccgatccaggccgcggcggttccacgaggtccggcgccccgcgccccgcgacccgcggtcctggccaagctgtcagggaagctcaggagaggcttgaccctactggaagctcgagggcgcaggcctggaggaaagagaggaacagaaatccgggctgtgggggagcagctggaaagctggagaagctggaggaaggatgttgctggctgttcttcccccacccccattcctgagtttggggctgcagcccccacaaaatctgccctgcaggtccaagtagtacccagcagccaagcagtagaatttgggcagcaccccggaagaggcttgcaggataggacacagcccacaagaatcatccgaggctgcaccgtgaccagcccctcaagacagagcgagacccaaataacccccgcgggcggacccgcagcgttctgtgactccaccgcggagtccaaaaggcagctgaggctctccattcttcccaaagcagctcggatccctaagtctggagctgccagcgaggcttccaacccgctgcttgccatcacctcccaggtcgttggtggctccgagtctgaaacccgagttgagggtctgatgaaggaggagtctgtgcgggagggcaacgcggcattttcccgctttctacgaaaatctgttgatgcaaacctcccgcttcagagaaagatcgcggcagcagggctgcggagggcgatgagcatgccagttctaatctccaggagcccatcccacaccttccttaaacggccctcggagagaggccagaggccagaggccaacccatccgatttcggcctcctggagagccctgttctcacccgaggtctgttaatgagctggggacaggtgagcctcacacgttccaacttggctgccttcagcggcatccaggagcagtggatcaggccggcccccgcgggcctggagctggatccagagctagggaaactggaaaaacaggcacaaactcggaagccgcggtacggcaagagcctaagcaaagaatcctttccaagattcacacctcgtctacaccagggcaccgcctgggcctacggccttccgaacccgaagcgcccgcagcccagagctggcatcaggccatcaggccgggaaggtcgtcgcaggccccagagtgcgggcgcggggggcgcgcgcccacaggacgcccggggttggccgcgcggcccacagaagcggaacgcgcgtcgagagcgccctgtccgctcgccccagacagatgcccggttattcattaccgcgaggcctagaggaaagagtggctgccgtcttcctgcccacagcccgccggaccctccgtcgcggctgcccggtccccggagccgcagccgccgagcccggctgtgcgtgtcgtggctgctggggagaaagaggcttccggggcggaaacggccttccccgcgtggggaacaatggcgttattttggagtctgcaaccgcgagcgcttcaagctctttgattattttcgaggagtgttaggacatgctctggagtcagaagacagcgaaaagagaagcagaagccccggtggcaagagtctgaagcgcagaagtatcaccgtgctgggggatggggaacagggctgtgaatgggcctatttgcataagcagcatgtgtctggagagaaagacatcacagagcagaagagtgcgggtgcccaggagtgcacttgccacccctacttcatccctgaaagagtaaatggcctggaaggtgtctctgagagcctaaattcggggccccctaccgaggccggccatgatcttgagggcggcataggggaggccgcgctctgtccaccccagcctggtgatgccgttcgcttcttgtgcccgctccacggcggccgcgggctttgtgagctggggccgcgcgccgcgctgcacctgcccggatttaagtaccttggcgaggcagcgcaggcggctgttctaatcgccgtctccaagtacctgctcatgaataaacaccaaccccatttatcaggtacttag

SEQ ID NO: 122237 - DNA, 707 bp, Homo sapiens
atgagcgcggtattactgctggccctcctggggttcatcctcccactgccaggagtgcaggcgctgctctgccagtttgggacagttcagcatgtgtggaaggtgtccgacctgccccggcaatggacccctaagaacaccagctgcgacagcggcttggggtgccaggacacgttgatgctcattgagagcggaccccaagtgagcctggtgctctccaagggctgcacggaggccaaggaccaggagccccgcgtcactgagcaccggatgggccccggcctctccctgatctcctacaccttcgtgtgccgccaggaggacttctgcaacaacctcgttaactccctcccgctttgggccccacagcccccagcagacccaggatccttgaggtgcccagtctgcttgtctatggaaggctgtctggaggggacaacagaagagatctgccccaaggggaccacacactgttatgatggcctcctcaggctcaggggaggaggcatcttctccaatctgagagtccagggatgcatgccccagccagtttgcaacctgctcaatgggacacaggaaattgggcccgtgggtatgactgagaactgcaataggaaagattttctgacctgtcatcgggggaccaccattatgacacacggaaacttggctgcatgtatctgataaaacaaaaactgtcctttaaa

SEQ ID NO: 122238 - DNA, 677 bp, Homo sapiens
  misc_feature (1)...(677): n = a,t,c or g
gcagatgcagtggtcggtaggagcgagtgttcgttgaagctgtaggtgttcgtggcgcgttggctttctggtaattcctccggctgcactagacatgccgcactgtgtgtccttccgtancattgagagagaagagggaggatgcccaggtaaaagatgggaaatagcctagaatatcaactgtgatggtccctggtggggctaatggtggcaaacttttctgcttttttgtaaagaaataacacagggtcctaaaagcccgtgtatcctggaagcagagggtctgcgtcggaacagccgactctggaagggcgttggctatgtccctggacgtctcctgcagctccttccatctcccctgagtctggcccagctggaaaggatgtgggggccacaggttaagtggccaccctggggcctgctgttcccagactgcctggctgtgctgggagttctgtcccgggagagacacagcttcgtctcggctgcggccgtggtccccaaggctctgttccctgtgtgcaaaggtggatatgtcttcctttagtctcctcatggccacaatttaatttttttgaaaagtttttggccaaataacctggctaccaaccccgggcccccattgttggaggaaggtgatgtggggaaagacgtgactcttggacagtgcctgcctt

SEQ ID NO: 122239 - DNA, 427 bp, Homo sapiens
acgccaagcttggcacgagggtggctgaggccgagtctcacggtgtctccctttcaaactggtcacacccgtcttgtgtttttgtctctggcacagatcctattaggaatacaggaacttctaaatgaaccaaatatccaagacccagctcaagcagaggcctacacgatttactggttagtagcagccctggccccgctggtggcagctcctccccgtcccagccaaggccgcctggcaggacgggagtggagcacacaggctcaccctagggacagccagggtccgcgcctctgtggggaaggtcggggggcataaaccctgtgggcagcaggcaccgttgcacaccgtctgcggtgggcatggatggcgccggagccgtgtccaggggagggagcaggccacgtgacaggggctgtcttgtgct

SEQ ID NO: 122240 - DNA, 1053 bp, Homo sapiens
tcacgacctgtgcaggccgggcctaaggcaaccgggacccctcagcctcccccctcctgaccagagccggtggagaggcctctcagcatggcctcctctggcacccacgcccagggtccttcccctcctagctggccacaactcactggggcagtggcccaagacagcccgtcacctggcctgctccctccccgggacacggctccggcgccatccatgcccaccgcagacggtgtgcaacggtgcgccaggcagtctgggaacacaggccccagggtggccacttaacctgtggcccccacatcctttccagctgggccagactcaggggagatgggaggagctgcaggagacgtccagggacatagccaacgcccttccagagtcggctgttccgacgcagaccctctgcttccaggatatacgggcttttaggaccctgtgttatttctttacaaaaaagcagaaaagtttgccaccattagccccaccagggaccatcacagttgatattctttttacctgggcatcctccctcttctctctcaatgctacggaaggacacacagtgcggcatgtctagtgcagccggaggaattaccagaaagccaacgcgccacgaacacctacagcttccccgaacactcgctcacactccctggggaacgcgaagacaccaccgcagaccgtcccacaccgcgaccatcccacaccgcaggagcacacgggcgacaccagcagctgcgtggctgtcctgagtgcgaacacgcgtgagcgcgctgctgtggaatgtggggtgacggtgttgaatctcgactgactcaagtgaacagccaggtcctacagcatgagctcagcttccactggtgtggcaggcagcgtccaggggaaacgttcagaacatccgctctctccagcggtggctgaggctcccgctgccctgcgccgcggctccgtctgctcccctgtgcgctacggcagatcccactggggaggctttcactctttggcaaagccaggcatccctgccgcatttgctggctgggtggaggc

SEQ ID NO: 122241 - DNA, 3567 bp, Homo sapiens
atgaagacgatgtcggttggttttcatagccatcctgagaggcctgaagaagaaaggcattcaccacccaacacccattcagatccggggcatccccaccatgtgagtgtgcgactgtgcacgcgaggtggagtgggtagggatttgacactgaacgctgtcttctcggcagtgccacagcaggcccacgggactggaatcctgtcggaagggggcttgcaggagctttcgggacactttgagaaccagaaggtgatgtacggcttttgcagtgtcaaggactcccaagctgctctgcaaaaatacgtgctcatcaactgggtgggcgaagatgtgcctgatgcccgcaagcacatcaccgtaggagaaaccaccgcacgcgaccagggcgtggaaatcttccaggcccgtgcgtccggtcagcaggtcactcatatgcacgtcgatagcatcaaagcctgcacggtggaaagctgccgccatttcaacatgagagttcacgccctgctcacgcagtacggcaactttcggacgtgcgccagtggcaatatacggtgctgccacatcttcgttgatatcgaacgacagttttacattcaggcccggatcggcgtcgttagatttcgcctgatgctcctgatcggcacactccgggttgtcacgcaggcgctgcatctgccaggtagtttctgcccaccagacacgcaacgtggtgcggctttcgctgaatacagtctgcccgttggcggtaatcacaaaacggtcaccggaaaccgcctgccctacataatggacacaatcagcaagcccatgctgtgccagtacggactcgaccgcttcacggtcagcggcacgaacctgaatcaccgcacccagttcttcgttaaacaacgccgccaggcgatcgtcacccagagtggcgatatttaccatttcagcattgtttcccatcggcacagcggtaagctctggcctgaactggcccagcgcgccgacggttttaatgatattggtatcaatatggactggttgccgcccgcctataaaggcgcatcgggcgggtattcggtcggctacaactcctatgatttatttgatttacgcgagcttgatcagaaaagcagcctccctactaaatatggcgataaagcacaactgctggccgcctttgatgctctgaaacaaactattctcgtgcggcgtgttaatgctgatgaccgtacgctaattgacgaaaaaattattgagtgtgaagggtggacgcgttacacctttccccgccgtgccgggcaatactcgcagtttatctgggatttcaaatgttttaccggtatcgaccatatcgaaaaccctgacgaagatggcatttttaaaattgttaacgactacaccggcgaaggctggaacgatcaggttgatgatgaattaggtaatttcgattatctgatgggcgagaatatcgattttcgcaatcatgccgtgacggaagagattaaatactgggcgcgctgggtgatggaacaaacgcaatgcgacggttttcgtcttgatgcggtcaaacatattccagcctggttttataaagagtggatcgaacacgtacaggaagttgcgccaaagccgctgtttattgtggcggagtactggtcgcatgaagttgataagctgcaaacgtatattgatcaggtggaaggcaaaaccatgctgtttgatgcgccgctgcagatgaaattccatgaagcatcgcgcatggggcgcgactacgacatgacgcagattttcacgggtacattagtggaagccgatcctttccacgccgtgacgctcgttgccaatgacgacacccacccattgcgatcacataatgttgtcgagacggttacggaattccggtgtaaagatcttcttgatctcttccatcgcatcggtgctgttatcctggtggataagaccaatggatttgcgctcagtttcccgtaccccggcgttggtggtcatcaccagcaccacgttacggaagtctgctttgcgtccgttgttatcggtcagcgtaccgttatccatcacctgcaacagaatattgaacacgtccgggtgcgctttctcgatttcgtccagcagcagcaccgcatgtggatgcttgatgaccgcatcagtcagcaaaccgccctgatcaaaaccaacgtatcccggaggcgcaccaataagacggctgacggtatggcgttccatatactcggacatatcaaagcgcagaagctcaatgcccaaagctttcgaaagctgtaccgtcacctctgttttcccgaccccgaccagcattttcaagcgatcgccgaggtttttcagggtatcacgatcactctgagaaacactcttctctggaatgcgtgcaatacgggccaccacggactcaatatccgccacattaacggttttcttgcgtttgcttaccggcatcaggcgtgcgcgagcgcccgcttcgtcgataacatcaatggctttatccggcagatgacgatcgttaatgtatttcaccgccagctctaccgccgcacgcaccgcttttgcggtataacgcacgtcgtggtgcgcttcatacttcggtttcaggccattgatgatttgaacagtttcttcgatcgacggttcagtaatatcagaccactagaagctggcgataacagaactttccatcagtgtattcatcgcatccacggtgcggctaacatcctgaatttgcaaaagttgattaatattagccatcagttagaaataacacctgtttcagatgacaatccgcttctgcgagcaaatttgtttttggatggtcttgaggggacagtgcaggtgttcgtcctgttcagggatcccgggtgcaaggggcacaagtttgcacacagtggcctggcttgccagctgccccagccctgcgaggcagatgaggggctgggtgaggaagaggatagcagctctgagcgaagctcctgcacctcatcctccacccaccagagagatgggaagttctgtgactgctgctactgtgagttcttcggccacaatgcgagaagtgaacgcttgggagtgatgaaggcagagtggaagcaaaaaggctctcagtcccccaagtgtgacagccagccgagggacaggcccctgcccgcacgggctaaaatgatgcataccgacgtggatctcaaagcaacagcttgcctggcggagccaatgctgctgatgagcgtactggataatctttactccaatgcggtgcactacggggctgaatccggtaacatttgccttcgcagcagtttacatggtgcgcgggtttatattgatgtcatcaatacaggcacgcccattccgcaagaggaacgcgccatgatcttcgaacccttttttcagggaagccaccagcgaaaaggggcggtgaagggcagcggtctgggattaagcattgccagggattgtattcgccgtatgcaaggggaactgtatctggtcgacgagagcgggcaagacgtttgtttccgcattgaattaccgtcgtcgaaaaacacgaaataa

SEQ ID NO: 122242 - DNA, 445 bp, Homo sapiens
ggaattcgctactatgcctgctcaaccgtatcacctgagaggcaaagaggttctggagagaacctggtctcttagagatggggacatgggaccttaggagaccagagaccacccgagggaacctctgagtgtgcttgtcatgggtccctctgacccaacaggttctgtttggattctgcaaagcacactcgtcagaaagttgctgtgaactggaccaacttcagcctcaagaaaaccactcctagcacagctcagtgaggtacagagaccccaagagttacatccactgcctctccctgtgcttggccaccctatctgtacgctcaccagaccattctgtgctctggggcacagggagttggacttggggcatgggatccctggcttctgtctgcatcttcacagcaatggctggctacagcctccaaaggtcaaggccccatcg

SEQ ID NO: 122243 - DNA, 1449 bp, Homo sapiens
atgcagggcctctttgccttcagcaccccctgtgcccctgacctgtgcagggctgtggccggggccatcgcccgccagcgggagcggctgccagagctgaccaggccccagccctgccccctgccacgggccacctctctgccctccctggacacccccggagagcttcgggagatgccaccaggacctgagccacccacgtccaggaaaatgcacctggccgagcccggaccccagagcctgccgctactgctagatctcatggtgttgcatggaacaaaaaaaaaggttacccattttcaaagcgggaaggggccctatgaattcatcatctgcccttcggaggacagttccccactcttgcgatgcgccttctgcattgggggcatgtccgtgaaagagcagatggagaccatccgacatcctctgcagaccaccagaggccctggaccaggccctctgttcacagatgggccagaccccatcccggaggccttcctccacggacttctgagtattagggagatggtgagcacagaaaaggtgaagccagtgggccaggaaagcgagcccagagtaaagcctctggagcttgatgacagcgcttctggcggtgtacacatgatggtggccaccccggggcgcctcatggatttgctgcagaagaagatggtcagcctaaacatctgtcgctacctggccctggacgaggctgaccgcatgatcgacatgggcttcgagggtgacatccgtaccatcttctcctacttcaagcacacttccgcagctgccatcggcctgcagcttgctctggacggagggacgggaagtggccagaaggggaagtgtgaggagttcccgtccagcatgtcagcagtctccacaggtcttgaagcgtcggcctgctgcctgtccgtgaccatggaccctctggagaccctatcaaggatggcatcctctaccagcagcatgtcaagtttggcaagggcctggctctctcccgagcctggagactcaccggggatggtaggaggactcccaagagagctgcctggcatggccccactggaatgtggggaattccagaggcccgagagcttatgtgccgacaggaacgagctaggatcccagtctcccgagttcccagggcaggaagaggaggacgaggatgaggatgatgacggcggaagacgaggcacgacatgagcagtcatctccacaagaacgccactgcatgttctcgaccttctgcctttcatcttcctccatgctctttcggcaactctggcagacccaagaggcatctcgcctaggagattcttgacgagcctgcaacaccagtccattttgagaagggccttctcccagccttgcgttcccggtgacacagcaggcagcaagtctgcacaggcggctggaggcgggggggacgcgggcgcggtagctcat

SEQ ID NO: 122244 - DNA, 1311 bp, Homo sapiens
atgcctgctgtgactgtcagaggatcccgggtgcaaggggcacaagtttcacacagtggcctggcttgccagctgccccagccctgcgaggcagatgagggctggccacccgcgccccgacgagtcggaactataccgagatccgggagaagctccgctcgagctgaccaggcggaaagaggagctgcccatgaaggggggcaccttgggcggatccctggggagcccgccgtggaccaccgagatgtggatgagctgctgaattcatcaacagcacggagcccaaagtccccaacagcgccagggccgcaagcgggcccggcacaagctgaaaaagaaggaatggaaagagctcagtgtctctctgctcccttctcccactgccagcccggacactctcaccttgtctttgtgtcttctgtctacacgaaggaaaaggagaaggcccagttggcagcagaagctctaagcaggcaaatcgtgtttctggaagccgggagccaaggcctgccaggggaggctcttggagtggcccgaccgggaactggatcgggtcaacagcttctgagcagccgtctgcaggagatcaaaaacactgtcaaagactccatccggccagcttcagtaaccacacgttacaagctccaggcgagccagcccaccatgggcagaaatgagaggcccccacccaccatggacagagctaaaagaccaccaggtaacgagccctccagcatctccttccataggtggttcttgagccattactgggtgccagctgccccggccgcgggtccccgagtgacgctggcggcacctgagagtgtggcgcggcccggggccacgcagcggagcccagtgtccagtgaagcgtctgaggaccgccgcccgtgccgccgccatggtgatgtcccagggcacctacacgttcccacgtgcttcgccggcttctggctcatctggggtctcatcgtcctgctcgctgcttctgcagcttcctgcgccgccgcctcaaacggcgccaggaggacgactgcgcgagcagaacctgcgcgccctagagctggagcccctcgaaccgagggcagtctggccgggagccccccgggcctggcgccgccgcagccacaccacaccgtagccgcctggaggcgccggctcacgcgcactcgcatcccacgtgcacgtgcacccgctgctgcaccacggcgaaagaaggggtgtcgcaacgcgaaaaggtttaccccgttcaaaggggattgggcccaaaggggaggtaaccgccgagacataggaaaggccacgggttga

SEQ ID NO: 122245 - DNA, 3172 bp, Homo sapiens
  misc_feature (1)...(3172): n = a,t,c or g
ggaggcaggagaatgggaagaaggcccttctcaaaatggactggtgttgcagggtgagaagctgccccctgacttcatgccaaagctcgtcaagaatctcctaggcgagatgcctctgtgggtctgccagagttgccgaaagagcatggaggaagatgaaaggcagacaggtcgagaacatgcagtggcgatctccttgtcacacacatcctgcaaatcacagtcttgtggagatgactctcattcgtcctcgtcttcctcctcatcatcctcatcctcgtcctcctcttcctgccctgggaacttcggagactgggatcctagctcgttcctggcggaacataaacgtctcggcctctggaattccccacattccattggggccatgccaggcagctctcttgggagtcctcctaccatccccggtgaggctttccccgtctcggagcaccaccagcactcagacctcactgctccccctaacagccccaccggccaccacccgcagccagcatctctaatcccgtctcaccccagctcctttggctccccaccccacccacacctgctgcccaccaccccggcagcacctttccctgcccaggcttcagagtgccctgttgctgctgccactgccccccacactccagggccatgtcagagctcccatctaccctccaccagcatgccgctcctgaagatgcccccaccattctcggggtgcagccacccctgcagcgggcactgtggtgggcactgcagtgggcctctcctcccacccccgagctctcagccactccctagcactcacagggatcccgggtgcaaggggcacaagtttgcacacagtggcctggcttgccagctgccccagccctgcgaggcaaatgaggggctgggtgaggaagaggatagcagctctgagcgaagctcctgcacctcatcctccacccaccagagagatgggaagttctgtgactgctgctactgtgagttcttcggccacaatgcgccacccgctgccccgacgagtcggaactataccgagatccgggagaagctccgctcgaggctgaccaggcggaaagaggagctgcccatgaaggggggcaccctgggcgggatccctggggagcccgccgtggaccaccgagatgtggatgagctgctggaattcatcaacagcacggagcccaaagtccccaacagcgccagggccgccaagcgggcccggcacaagctgaaaaagaaggaaaaggagaaggcccagttggcagcagaagctctaaagcaggcaaatcgtgtttctggaagccgggagccaaggcctgccagggagaggctcttggagtggcccgaccgggaactggatcgggtcaacagcttcctgagcagccgtctgcaggagatcaaaaacactgtcaaagactccatccgtgccagcttcagtgtgtgtgagctcagcatggacagcaatggcttctctaaggagggggctgctgagcctgagcctcagagtctagccccctcaaagctcagtggctcctcagagcagcagcctgacatcaaccttgacctgtcccctttgactttgggctcccctcagaaccacacgttacaagctccaggcgagccagccccaccatgggcagaaatgagaggcccccacccaccatggacagaggtgagggggccctctcccgttttcgtccccgagaacggactcgtgaggagactgagcaccgtgcccaacctatcccgggtgatctgggtcaagacacccaagccgggctatcccagctccgaggaggcaagctcaaaggaagttcccagttgcaagcaggagctgcctgagcctgtgtcctcaggtgggaagccacagaagggcaagaggcagggcagtcaggccaagaagagcgaggcaagcccagccccccggcccccagccagcctagaggttcccagtgccaagggccaggtcgctggccccaagcagccaggcagggtcctagagcttaccaaagtaggcagctgtgctgaagctggagaggggagccgggggagccggccaggaccaggttgggctggcagtcccaaaactgagaaggagaagggcagctcctggcgaaactggccaggcgaggccaaggcacggcctcaggagcaggagtctgtgcagcccccaagcccagcaaggccacagagcttgccccaaggcaaggggccncagccgccggagccgcaacaagcaagagaagccagcctcctcctttggacgatgtgttcctgcccaaggacattggacggggtggagatggatgagactgaccgagaggtggagtactttaagaggttctgtttggattctgcaaaacaaaattcgtcagaaagttgctgtgaacttggaccaacttcagcctcaagaaaacactccaaagcccagctcaagtgaaggccctgccccaggctgagctgccttcaggggcgtcctgaggccctgactgcccagctgaaggccgtataatttttccctccgtgtgcccccaccctacccgtccaaggaccctctgtgctcccccacccatccctggaccaacccaaaagctgaacgggatgcccacactgtgctggggccccttgaccctcagcagagccgctttcctggtgctacggagccttccacattcagagcccgtggaactgggctggcctaagggccaggggctgatggtactgctggcccaacactgctctctttgtgtttggtttttttgtttttgtttttattttgtttttttccaattctttacttttgatactgtgaagatctttcgtgccgaaagataaaagcaacatttggacacagagttggcatgttggtgatttgtgggtctgggcggggagggagttgagggtgtgctcagaagcatgggctctcccttagtcactaaccctagcatgcaccatgcatcagcagtttggtgctattgtcccattttacaggtgaggaaactaaagccgataggaaagtgactcagctcaacttagtctggctgattagcattgagcgcagactggtatgattatggcatctgtgcccttttctccttttgggaggtctctggtatgtgagcctggggcagccccttccccactctttcctgtttccctc

SEQ ID NO: 122246 - DNA, 434 bp, Homo sapiens
cgacttcggcggggcccaggtgagaaaggcccacctgtgtcctggttgagggtctccagggttctttggggcccgaggccaatggtggcagagtctacatagaactatgcttcgtggtgttctggggaaaacctttcgacttgttggctatactattcaatatggctgtatagctcattgtgcttttgaatacgttggtggtgttgtcatgtgttctggaccatcaatggagcctacaattcaaaattcagatattgtctttgcagaaaatcttagtcgacatttttatggtatccaaaggtgccaatgggtcatgtttggttagaaggtgacaatctacagaattctacagattccaggtgctatggacctattccatatggactaataagaggacgaatcttctttaagatttggcctctgagtgattatgg

SEQ ID NO: 122247 - DNA, 360 bp, Homo sapiens
taaaaattggccagtcacgttggtgtctgcctgtggtcccagctactcgggaggctggggcacaagaatcacttgaacccaggaggcagagtgagccgaggttgtgccactgcactgcagcctgggctacagagagcaagactctgtctcagaaaaaataaaataaaataaataaaaaaagatatagtattaatgcctgtatttatgaagacagggccattgcactgctgctatgtatttaatattttgtgtacagtaaaagtcagaactcatttaaagaactttaagggatcctttagaaacatttttacttaatttcaaatgagtgggctgagcatgtagactagcagctttttatca

SEQ ID NO: 122248 - DNA, 219 bp, Homo sapiens
gagacagagtcttcgctctctgtagcccaggctgcagtgcatcggccaacctcggctcactctgcctcctgggttcaagtgattcttgtgccccagcctcccgagtagctgggaccacaggcagacaccaacgtgactggctaatttttaaaaaaattatttttagtagatatggggtttcaccatgctgggcatgggctcgggcacgtgtaatcccag

SEQ ID NO: 122249 - DNA, 615 bp, Homo sapiens
atgcttcgtggtgttctggggaaaacctttcgacttgttggctatactattcaatatggctgtatagctcattgtgcttttgaatacgttggtggtgttgtcatgtgttctggaccatcaatggagcctacaattcaaaattcagatattgtctttgcagaaaatcttagtcgacatttttatggtatccaaagaggtgacattgtgattgcaaaaagcccaagtgatccaaaatcaaatatttgtaaaagagtaattggtttggaaggagacaaaatcctcaccactagtccatcagatttctttaaaagccatagttatgtgccaatgggtcatgtttggttagaaggtgacaatctacagaattctacagattccaggtgctatggacctattccatatggactaataagaggacgaatcttctttaagatttggcctctgagtgattttggatttttacgtgccagccctaatggccacagattttctgatgattagtaagcatttattcttttgacttgattattgtctccttttcatgtgaatttattactcccgttgaaaccgtgtacttaccaataaactatttgctattcaaaaaaaaaaaaaaaa

SEQ ID NO: 122250 - DNA, 1181 bp, Homo sapiens
gtgagccgaggttgtgccactgcctagcagcctcgggctacagagagcaagactctgtctcaaaaaaaaataaaataaaataaataaaaaaagatatagtattaatgcctgtatttatgaagacagggccattgcactgctgctatgctgaaatgaacttttataaagtattattgactatagccaactacagatggcatatgcccttaaagatgcatttttctatgtatttaatattttgtgtacagtaaaagtcagaactcatttaaagaactttaagggatcctttagaaacatttttacttaatttcaaatgagtgggctgagcatgtagactagcagctttttatcaaacctggcattgtcaggttgaacttataaatacgaataattactactctgacttgtaaatgtagctgctaaagtatgaggtatatttaagaagaatagattagtttcattatacctataagaacaagaattcaaaagtgaggtagtcatccaggttccccctcccacaatatttttgtatcataaaatttagatgacttttttgggttacatttttatccatatattttgaactaacagaacttgggcagaatgtgtgttgaatattctttacatttaacaattaaaaacaactaaaactgaatagcaaatagtttggtgggttattacacggtttcaacgggagtaataaattcacatgaaaaggagacaataatcaagtcaaaagaataaatgcttactaatcatcaaaaaatctgtggcccattagggcctggcacgtaaaaatccaaaatcactcagaggccaaatcttaaagaagattcgtcctcttattagtccatatggaataggtccatagcaccctggaatctgtagaattctgtagattgtcaccttctaaccaaacatgacccattggcacctagaattagagaagaaatgcagcctcttaaagataaaacctaatttgggtactataattaaaaagcatgtcattcagaggtagggagaaatgtcctaaggctctcttttatagaatagatacaaatcctaatattgcatttttgcttttatttcttgcacaataacttttactaaatatcaaaggtttcaacttttttaaaaacctatcatctttttttgtccgaacgcgtgggcggacgcgtggg

SEQ ID NO: 122251 - DNA, 1623 bp, Homo sapiens
atgtggggtgtaggcaaaataacagaccccaaagacgtcgacacactcatccctggaacctgtggctgtgttaccttgcatggcgaaaggcactttgtagatgtgattaaggctggccctacaagaagtgttcaaggaaatcctaaacttggaagcaaaaaaatggaagttagcatcatgaaaacacaggaaagtataaaactcactgttaaagcgaccacacaaaggaggaacagaaatgaatcaaatgggcccactacagaattccaccagtccacaatgacaaacactcactctgatacgtggatggtggtactggatcctatgaagcctggaggacctttcgaagtgatggcacaacagactttggagaaaataaacttcaccctgagagttcatgacgtcctgtttggagatgtctggctctgtagtgggcagagtaacatgcagatgactgtgttacagactctttcctgtggcgttgttactgtgatcttcattatgaccctggctggtgcacatggttccactttgtcttctgggatattctcaatatatcaaagtgactctttgaagtgtaagtcgggtcggaaggctccagtgggtccccgtgtgctgaggacaggttacacatggtctcaagaaaattccacaggaaatccagacctgtttgttcaggatcatacctggcagttctgcactaagcactcaggatcctatgttgcttccatggaaacagtggatgaaactgctttcattctctccacccacactagcttccgcactgactgggaactcaagtgcttcatcacagtgagacgccagcttgggaggcagtatgagagaacatgctacttgtcttttagacccgttgctaacactgtagagtactgtattggttttcgctttgcttcatacatcaataatgatatggtgctgcagaaggagcctgctggggcagtgatatggggcttcggtacacctggagccacagtgaccgtgaccctgcgccaaggtcaggaaaccatcatgaagaaagtgaccagtgtgaaaggattgatctcattgctcgtttgtctttctcagtttgaaattgttcctgaagatgacccccagaatgccattgtcagctcttctgcagatgcttgtcatgcagaactgctcaggactataagcactactatggggaaactaatgcctaacctgcttccagctggagctgacttttttggattttctcatccagccatccacaacctgatccagagctgtccaggagctcgaaaatgcatcaacctgcctgcttctcgaccagtagggctcagtattggcccccttagccctctggacagttaccagtgggtgaaatttgatgtgtgcaaacctggagatgggcagctacctgaggggctgccggagaatgatgcagctatgagctttgaagcctttcagagacagatctttgatgaagatcagaatgatccccttctgccagagcttcagcctgcagcctttgtgtcttcttaccagcccatgtacctgacacatgaacccttggtagatactcacctgcagcacttgaagtctccatcacagggtagcccaattcagtcttcagattga

SEQ ID NO: 122252 - DNA, 903 bp, Homo sapiens
atgtcagcagtgtgctggctctttggacgtcacctttatgacactctgcagtatcccatcgggctgatcgcctccagctggggcgggacacccattgaagcctggtcatctggacggtcactgaaagcctgtggggtccctaaacaagggtacttgctaaagaagctcctccagcttcaggctctaactgaaggggaagtacaggctgcagctccttcccacagttccagtttgcccctgacttatggtgtggccagctctgtgggaactatacagggagctgggcctatttcagggcccagcactggggctgaggaaccatttgggaagaaaactaagaaggagaaaaaagaaaaaggcaaagagaacaacaaactggaagttctgaagaaaacatgcaagaaaaagaaaatggcgggaggtgctcgcaagctggttcagcccattgccctggatccctcaggacggcctgtgttccccatcggactagggggtctaacagtatatagcctgggggagatcatcaccgaccgacctggctttcatgatgagagtgccatctaccccgtgggctattgcagtactcgaatatatgccagcatgaagtgcccagaccagaagtgtctatatacctgtcagatcaaggatggtggtgtgcagcctcaggcagttcttaccaagaagatgtcgattccattctccaacacccactaccgaattccacaaggatttgggaatcttcttgaagggctgacacgcgagattctgagagagcaaccggacaatataccagcttttgcagcagcctattttgagagccttctagagaaaagagagacagagctcaaaatctctgccaatttcctgaatgttgctggtcttttccatatccggtcagggtga

SEQ ID NO: 122253 - DNA, 1188 bp, Homo sapiens
ctaagcaaaaaagattacatcccgattaccaagatgaaagtaaacagaattgacaagagaaatttattactaaaaataaagcagctgaaggttttcccagggaaaaccatcaccaccaggaccttccatgatgaaataccgttagtatcttctttaccttctgaattgctgccttctttcatataccccaaaattttagtttaagttaaattaatcacgacaaaaacgatgtggcatctgatcccttcttgttcaatctgaagacctgaattgggctaccctgtgatggagacttcaagtgctgcaggtgagttatctacccaagggttcatgtgtcaggtacaatgggctggtaagaagacacaaaggctgcaggctgaagctctgggagggtccaaggatcctgggcagaagggggatcatttctgatcttcatcaaagaatctgtctctggaaaggcttcaaagctcatagctgcatcattctccggcagcccctcaggtagctggcccatctccagggtttggcacacatcaaatttcacccactggtaattgatgcattttcgagctcctggacagctctggatcaggttgtggatggctggatgagaaaatccaaaaaagtcagctccagctggaagcaggttaggcattagtttcccccatagtagtgccttatagtcctgagcagttctgcatgacaagcatctgccagaagaagctgacaatggcattcctgggggtcatcttcaggaacaatttcaaactgaggctgcacaccaccatccttgatctgacaggtatatagacacttctggtctgggcacttcatgctggcatatattcgagtactgcaatagcccacggggtagatggcactctcatcatgaaagccaggtcggtcggtgatgatctataaaaaacattcccccaacctgggattgaggtcactgaagaatttagaagtccagtttcctgtggtagcctttagaaccactttggggctcccccaggctatatactgttagaccccctagtccgatggggaacacaggccgtcctgagggatccagggcaatgggctgaaccagcttgcgagcacctcccgccattttctttttcttgcatgttttcttcagaacttccagtttgttgttctctttgcctttttcttttttctccttct

SEQ ID NO: 122254 - DNA, 414 bp, Homo sapiens
atggtacacagcctgttctctctggaacgggagaagaaactgttaggctaggatttcctgtggatccacgaaaggtgctaatagtagctggccatcacaactggattgtagctgcatatgcccattttgctgtgtgttacagaatcaaagaatcttcaggatggcagcaagtgtttacgagcccatatttggattggactatcgaacgagtagctttattagcaagggcaagaaggactgagagctttcacagttatagggacttccagactattaatttgaacagaaatgtagaaagagctgtccctgaaaatggtaacttgggtccaatacaagctgaagtgaaaggggcaacaggggaatgtaatatatctgagagaaagtctcctggagtagaaataaaaagtttgagag

SEQ ID NO: 122255 - DNA, 2448 bp, Homo sapiens; identical to SEQ ID NO: 119244

SEQ ID NO: 122256 - DNA, 248 bp, Homo sapiens
gaaaatggtaacttgggtccaatacaagctgaagtgaaaggggcaacaggggaatgtaatatatctgagagaaagtctcctggagtagaaataaaaagtttgagagaattggatagtggattggaagtgcataaaatagctgaaggtttttcagaatccaagaaaaggtcatcagaagatgaaaatgaaaataaaatagagtttaggaagaaggaggattttaagggggaggattccttcgaagaaag

SEQ ID NO: 122257 - DNA, 512 bp, Homo sapiens
ttctccgaagggcggaatcgctttctgaacgtagggccgaccagatttagtacctcaagacaaactcttatgtggattccagattcttttttttccagtttgctgagtgggagaatttcaacacttcgagatgaaactggcgctatatttattgatagagatccagcagcatttgcacccattttaaattttcttcggacaaaagaactagacttaaggggagtgagtattaatgttctcaggcatgaagcagaattttacgggatcactccattagagaaaataaaaatggagtactgtttttctgtttgcatgtactcttgacaagtttgctttgaaatgtttttagtaagaaggcttctcttatgtgaagaattggagcgttcctcttgtggcagtgtccttttcatggttacttgcccccaccaggtattcctagtcgaaaataaacaacacagtcagatctgctgattctaggaatggtctaaattctacagaaggtgaagcccggg

SEQ ID NO: 122258 - DNA, 678 bp, Homo sapiens
atggatgaagctggaaaccatcattctgagcaaactattgcaaggacagaaaatcaaacacgtcatgttctcattcttgtgcagtactctgctaaagagagacaagtgtataaggccaatatgccgcaccaaggagtgttcagcctgggtgttcctgtagatgctctcttctttattggtaaccagttggtggccacgagtcatacagggaaagtgggagtgtggaatgctgtcactcagcactggcaggttaggacaggcttgagcacacttgtagctagagaggagagttgccagaaggacctgaagactgaaagaatggagattatttccggtcccataaaagtcaagagtgtatatgggatctacagcacagctagaaagctatctactgtacttaatagtattaaggatactttacctgttaaaaagagggaaaatgcaacaaaatatgagctccagggttatgctgtgcctcagtaccgagccccattttcggtggacagcaatttgtctgtggtgtgtgtgaactggagtgacaccttcctcctgaacggccaactgaaggagtacgtgttaaccgacggagggcgacgcgtgtacagcggcttggacaccaccctctacataccgagaacggcggacaaaactttacgggatgctaaatctgaaagctga

SEQ ID NO: 122259 - DNA, 981 bp, Homo sapiens
tcaggcaccagtgacggcatcagtgagctgagtatgcctgtccttctgtcccaggttggcatacactgacactggttttagcagatctaggcaggtcaatttttgggcctccagatagcctgtgtgagttccagaaatggcagcagtggggtgggcaggtgggtagattcttgagccctcagtagtaggcatggtgtgagtgatggcagttgcagtagtggaacaatgctctgggacccaagctgtcagtgctgttgttgtcagtggctctaggattagtttttcctttcccaatccatgttgacaaagtgggtcataaagatccgtagatcgtttgcccagatctgccctcaatctgcgaatcagcttcctcgttttagaaaatcgtgtatagggctgtttcacgcactgccgcttgcatttgacctgtgggtccccttggttatcgctcgccgctgttgttttattggcggtttcatggatcctttcatttctatcaacgagttgtatggtgccttggtcaagtgtcgagaggtccacttgctccatgaaataatgcgctgcgtacataggcggatagcgctcccaggtactacggtagcgtcgatctagaggatccccctggccctgcagccgtcgccgctgcctcaggctacagccccgggctcggcggtcccggctggggatgtgagggcggcgagcgcgtccggagccgccggagatggcgggagggcactgcggcagcttccccgcggcggcggccggcagcggcgagatcgtccaactgaacgtaggggggaccaggtgagtcggcgggtagcgggcttgcagcggggatgccttggcggcctcctcctttggtgtcgacggggaccgagagtcgcaggaacgagggcgagcgtgggaggccaagcctggaggggaacgtgggggcctccaggcggcaagaacgtcgggcggattttggagctggtgaagcat

SEQ ID NO: 122260 - DNA, 3204 bp, Homo sapiens
  misc_feature (1)...(3204): n = a,t,c or g
cctggaacgggagaagaaactgttaggctaggatttcctgtggatccacgaaaggtgctaatagtagctggccatcacaactggattgtagctgcatatgcccattttgctgtgtgttacagaatcaaagaatcttcatgatggcagcaagtgtttacgagcccatatttggattggactatcgaacgagtagctttaaatgcaaaggtggttggagggccacatggagacaaagacaaaatggttgctgttgcctcagagagtagcatcatcttgtggagtgttcaggatgggggaagtggaagtgaaattggagtgttcagcctgggtgttcctgtagatgctctcttctttattggtaaccagttggtggccacgagtcatacagggaaagtgggagtgtggaatgctgtcactcagcactggcaggttcaagatgttgttcctataactagttatgacactgctggatcattccttctgcttggatgtaacaatggatcaatatattacatagatatgcagaagttccccttgcgaatgaaagataatgatcttcttgtaactgaactgtatcatgatccttcaaatgatgctattactgctctgagtgtttacctcacacccaaaacaagtgtcagtggtaactggatcgagatcgcttatggtacgagctctggaccagtacggagtgattgtacaacacccagagacagttgggtcaggtcctcagctttttcagactttcacagttcaccgaagtcccgtaacaaaaatcatgctatcagagaagcatcttgtatcagtctgtgcagataataatcatgtccggacgtggacagtaacacgattcagagggaatgatctctactcagcccgggttctactcctttagcgtcattcaagatactatccctggaggagacagaaagtcatggtagctattcctctggaaatgacataggaccttttggagagcgagacgatcaacaggtgtttatccagaaagttgttcccatcaccaacaaactatttgtaagactctcatcgactggaaaaagaatatgtgagatccaggctgttgactgtactacaatatcctcatttacagtgagggaatgtgagggatccagtaggatgggctcaagaccaaggcgctacttgttcacaggccatacaaatggcagtatttcaaatgtggggatctggaccactgctatgggatatggttaacaaaagtgaagataaggatgtaagtggtccaacccgaagaagagctactcaaattactcgatcaatgtgatttgagcacatctcgctgtgctactcctaacatcagtccagcaacttccgtagttcagcatagccacttacgagaatcaaattctagccttcagcttcagcaccatgataccactcatgaatctgctacttacggctccatgaggccttacagagaaagtcctttattagcaagggcaagaaggactgagagctttcacagttatagggacttccagactattaatttgaacagaaatgtagaaagagctgtccctgaaaatggtaacttgggtccaatacaagctgaagtgaaaggggcaacaggggaatgtaatatatctgagagaaagtctcctggagtagaaataaaaagtttgagagaattggatagtggattggaagtgcataaaatagctgaaggtttttcagaatccaagaaaaggtcatcagaagatgaaaatgaaaataaaatagagtttaggaagaaaggaggatttgaagggggaggattccttggaagaaagaaagttccctatctggcatcatcaccaagtacttcccgatggaggaactgactcacctggtactgcgtccccatctcctacaaagactactccatctcctcggcataaaaaaagtgattctttcaggtcaggagtacagcttgtgaaaactcaccaaaatgaataagttgtttcgttacatttagatgaaagttaaactttactgaatttcagtaccattagtttttacactaaaactttacaagataaaattgggacttccatttagtatctttttaacagaattacttgggaataatggagatacaataatcatatctcttttggacattttgggaaatttttttaattttacaagtacatttaacagatcatttataaagcaggagtccattttaacacttaccgactttttttggtttgggaaacatattaccacgtcttaataggatggtgcccatataggtgagcatccctttagatcatgggaaccagcagactgcattcctaatcttcattaatgcctgagaacttgtcttacaatgttaactttaagtgaatcacataattgtctttggaacttgggctcccaacacttattgtgattggcaaagtggttacccagatatttggatgaggtgctatgtttgtgaaaaacatattcatgtaattgcaaaaacactatttgatattggantacccagattaccactatgtagtaagtcttttagggtggattttaatttagtccgtgcgtcattttctgatttctcatcattgggagatcttaaatcttagcaagcattagcaatattaaatgccaaaattcccatggaaacctttccaagtttgggagcaattgtctggtgtttgaaaaggatgaaataaaaataataatcaagggccaaagctttggagtgccccagaacgggaaagctgtacccagttgcctaccctgtcttgttnccgggagcccacccatgtttttttttcccagtgttaaaccaacaatccatgataattaaattaaaaacacctagtttgttccacttgtaggacctgcagtttctgaattttggggtaaagggtttggctgctggtaagaatgtgaatttgaatgtattttgaattgtaagagcaaaagaacgtttttgtacaatttttttttcatttaattggaatgatctttcaggtttctacaaatagggtaattgtaaatttaaagcattagcgatttattggtgaataatgtatatatccccattcccaagaaatataagtgagtgaagttgaaataaaatctttaaaatttactatattgccaagtggtttcacaacagttctcttgtatttatttatcaattaaatcaaataaaaatgattatgtcaaaaaaaa

SEQ ID NO: 122261 - DNA, 383 bp, Homo sapiens
ggcacgaggcccaaagagcgctctactcacccagaatggcacgggcagccttcctcgcaacctggcagccacactgcaggacatcgagaccaagcgccaactagctctgcagcagaagggacaacaagtgattgaagagcagcggcggcgactggctgagctgaagcagaaagcggcagctgaggcacagtgccagtgggatgcccttcacggggcagcacccttcccagcgggcccctcgggcttcccccctctcatgcaccactctatcctacaccacctgctctccttcccagcattgagcccttggttgcctgggcccaggctgggggttttcagtatttgtaagcatttcagcaaaacaatcacacctttggactacg

SEQ ID NO: 122262 - DNA, 357 bp, Homo sapiens
  misc_feature (1)...(357): n = a,t,c or g
tttttttcgtagtccaaaggctttattgttctgctgaaatgcttacaaatactgaaaacccccagcctgggcccaggcaaccaagggctcaatgctgggaaggagagcaggggaggtgggcttagtgttaaggcgtgaagggcgaggccagacagctggaggcctggtcctccactctccatttccatcacccttcggaggctgaaggaagggcggcggcaccacagggcccttcccctctgctgcatcataacccttctagcttcctctcccaactgcatcgctcctcctctgttccatagatcccccggcttcatcccttctggctctaagcaaggcaccantggaagggagagg

SEQ ID NO: 122263 - DNA, 1842 bp, Homo sapiens
atgcggggcacctcgcccatgcccccagcccctgtgccaggcctttctccctgggcctccgcctcccgggacctggttcccaccacctgccttcctcccatgctgccctcctcctcgttcgcttccatcacgccttcacctaagatggagaagctgctgctccctgctgtagacttagagcagtggtaccaggagctgatggccgggctggggactggccccgctgcagcctcccctcactcttctcccccgcctctgcccgccaaagcttcccgtcagctgcaggtcagtcaaatttgcatccaggtcagcaaacacatgggaggggccaaagtgatggcaaccacaggaggaaccaatttacgagatgacataatgaggcttgatgatacagccccatacaacgcatgcccctgtggcctggtcttccaggcccagagtggcattgcaagcaccacccaaccccctttgtcactgtcgttgaaggaggcagaggccctggagactgagacaaagctctttgaggacttggagttccagcagttggagcgggagagccgcgtggaggaggagcgcgagctggccggccaggggctgctccggagcaaggctgagctgctccgcagcatcgccaagaggaaggagcgcctggccatcctggacagtcaggctgggcagatccgggctcaggccgtgcaggagtcagaacgcctggcccgggacaagaatgcctccttacagctgctgcaaaaggagaaggagaagctgactgtgctggaaaggagataccactcactcacagggggcaggcctttcccgaagaccacatcgaccctcaaagaggttagagaaaataagagccaaccaccagtagcttatcaatactggccgctggctgaacttcagtatcagccacccccagaaagtcagtatggatatccaggaatgccccagcaccacagggcagggcgccataccctcagccgcccactaggagacttaatcctacggcaccgcctagtagacagggtagtgaattacatgaaattattgagaagaaaggaaggagatactgaggcgtggcaattcccagtaacgttagaaccgatgccacctggagaagaagcccaagagggagagcctctcacagttgaggccagatacaagtcttttttgataaaaatgctaaaagatatgaaagagggagtaaaacagtatggacccaactccccttatatgagtacattattagattccattgctcatggacatagactcattccttatgattgggagattctggcaagatcatctctctcaccctctcaatttttacaatttaagacttggtggattgatggggtacaagaacaggtccgaagaaatagggctgccaatcctccagttaccatagatgcagatcaactattaggaagaggtcaaaattggagtactattagtcaacaagcattcatgcaaaatgaggccattgagcaagttagagctatctgccttagagcctgggaaaaaatccaagacccaggaagcgcctgcccctcatttaatacagtaagacaaggttcaaaagagccctaccctgattttgtggcaaggctccaagatgttgctcaaaagtcaattgccgatgaaaaagcccataaggtcatagtggagttgatggcatatgaaaacgccaatcctgagtgtcaatcagccattaagccattaaaaggaaagggttttcagggacaaaaacccccactgtcccaagtgtttcagggaataagccagttaccacaatacaacaattgtcccccgccacaagcggcagtgcagcagtag

SEQ ID NO: 122264 - DNA, 580 bp, Homo sapiens
gatgatacctgcctgcacgtggagctcagcagcaaggactgccgtggctacttggtcaagatgggcggcaagattaaggcatggaagaagcgctggtttgtcttcgaccggctcaagcgcaccctttcctattatgtggacaagcatgagacgaagctgaagggagtcatctatttccaggccattgaggaagtgtactacgaccacctgcgcagtgcagccaagagcccgaacccagccctcaccttctgcgtaaagacccatgaccggctgtactacatggtggccccatctgcagaggccatgcgtatctggatggatgtcattgtcacaggggctgagggctacactcagttcatgaactaactggccggggccctcctgggccagagccacaacttgggggcttttgtataagaagactttaatattctgtaaggagcttggtcctgtgagtttctgggctctgggcttcctgaagaaccagccagaagaagaaaagttaggaggtggctttgttgcctcctggggagcccagaacttgcagtaaccctttagggtcctgccccaggcccagcca

SEQ ID NO: 122265 - DNA, 5011 bp, Homo sapiens
gcatgattccagcagggggccgagcccctgggcccccctacagccctgttcctgcagaatcagaaagtctggtaaatgggaaccacaccccacagactgcaacacggggaccctctgcctgtgccagccacagttccctggtgagctctattgagaaggacctgcaagagatcatggactcactggtgctagaggagcctggagctgctggcaagaagcctgccgcaacctctccactgtcaccgatggctaatggtgggcgctacctgctgtctcccccaaccagccccggcgccatgtctgtgggctccagctatgagaacacctctccagccttctctccactctcttcaccagccagcagtggaagctgtgccagtcactcacccagtgggcaagagccaggaccttctgtgcccccgctggtacctgcccgttcctccagctaccatctggccctacagcccccacagtcccgcccaagtggtgctcgctccgagagtcctcggctgagcaggaaagggggccatgagaggcctcccagccctggcctccggggtctgctgacagacagcccctgcactactggtcttggcggaggccccggagagccacctgaaaccccccggctgggtgggcagctgcctgtggtggccatcagcctgagtgaatacccagcttctggtgctctcagtcaacccaccagcattcctggcagccccaagtttcagcctccagtccctgctccccgaaacaagattggcacactccaggaccgccctcccagccctttccgtgagcctccaggcagtgagcgggtgctaacaaccagcccctcacgccaactggtgggccgaacattttcagatgggttagccacccgtaccctgcagcctcctgagagtccccgcctgggccggcggggcctggacagtatgcgagaactaccccccttaagtccatctctgtcccggcgagctctctccccgctgcccacccggaccaccccagatcccaagctaaacagggaagtggcagagagtcctcggccccggcgctgggcagcccatggggcttcaccagaggacttctccctgacgctgggggcacggggccgtaggacacggagcccctcacccacactgggtgagtctctggcaccccacaagggcagcttcagtggcaggctgagcccagcctacagtctgggctctcttactggggcttcaccctgccagagtccctgtgtccagaggaagctctccagcggggacttgcgggtgcctgtcacaagggagcggaaaaatagcatcacagagatcagtgacaatgaggacgacctcctggagtaccaccggcgacagcgccaagagcggctccgggagcaggagatggagaggctggaacgccagcgcctggagaccatcctgaacctgtgtgccgaatacagccgggctgatgggggacctgaggctggggagcttcccagcattggggaggccaccgcagcattggcactggcaggccggaggccctcacgaggccttgcaggggcctctgggcggagcagcgaggagcctggcgttgccacccaacgcctatgggagagtatggagcgctcagatgaggaaaatctcaaggaggagtgcagcagcactgagagcacccagcaggagcacgaagatgcacctagcaccaagctccagggagaggtgctagccctggaagaagagcgggctcaggtgctggggcacgtggagcagctcaaggtccgtgtgaaggagctagagcagcagctgcaggagtcagcccgagaggccgaaatggagcgggcactgctgcagggagagagggaggcagagcgggcactgctgcagaaggagcagaaggcagtggatcagctgcaggagaagctggtggccttggagacaggcatccagaaggagagggacaaggaggcagaggccctggagactgagacaaagctctttgaggacttggagttccagcagttggagcgggagagccgcgtggaggaggagcgcgagctggccggccaggggctgctccggagcaaggctgagctgctccgcagcatcgccaagaggaaggagcgcctggccatcctggacagtcaggctgggcagatccgggctcaggccgtgcaggagtcagaacgcctggcccgggacaagaatgcctccttacagctgctgcaaaaggagaaggagaagctgactgtgctggaaaggagataccactcactcacagggggcaggcctttcccgaagaccacatcgaccctcaaagagatggagaagctgctgctccctgctgtagacttagagcagtggtaccaggagctgatggccgggctggggactggccccgctgcagcctcccctcactcttctcccccgcctctgcccgccaaagcttcccgtcagctgcaggtttaccgctccaagatggatggcgaggccaccagcccccttccccggacccgcagcggccccctcccctcctcctctggctcttcctcctcctcctcccagctcagcgtggctaccctggggcgtagcccctccccaaagagcgctcctactcacccccagaatggcaccgggcagccttccttgcaacctggcagccacactgcaggacatcgagaccaaagcgccaactagctctgcagcagaagggacaacaagtgattgaagagcagcggcggcgactggctgagctgaagcagaaagcggcagctgaggcacagtgccagtgggatgcccttcacggggcagcacccttcccagcgggcccctcgggcttcccccctctcatgcaccactctatcctaacccaccttggccttgcggggcgggagcgtggggaggagggtgagcacgcctatgatacgctgagtctggagagctctgacagcatggagaccagcatctccaccgggggcaactcggcctgctcccctgacaacatgtccagcgcgagtggtctggacatggggaagatcgaggagatggagaagatgctgaaagaggctcatgcagagaagaacccggctcatggagtcgagggagcgggagatggagctgcggcggcaggccctggaggaggagctggcggaggctgtgagcaggtataacggaggctgcagagtgagagtgcccggaggcagcagctggtcgagaaggaggtcaagatgcgggagaaacaattttcccatgcacgacccctgacccgctacctgccaatccggaaggaggactttgacctgaagacacatattgagtcatcgggccatggtgttgatacctgcctgcacgaggtgctcagcagcaaggtctgccgtggctacttggtcaagatgggcggcaagattaaatcatggaagaagcgctggtttgtcttcgaccggctcaagcgcaccctttcctattatgtggacaagcatgagacgaagctgaagggagtcatctatttccaggccattgaggaagtgtactacgaccacctgcgcagatgcagccaagaagaggtttttccgcttcactatggtgactgagagcccgaacccagccctcaccttctgcgtaaagacccatgaccggctgtactacatggtggccccatctgcagaggccatgcgtatctggatggatgtcattgtcacaggggctgagggctacactcagttcatgaactaactgccgtgggcctcctggcagagcacaactggggcttttgtataagaagacttaaatattctgtaaggagcttggtcctgtgagtttctgggctatggcctcatgaagaaccagccagaagaagaaaagtagaggtggctttgctgcctcctgggagcccagaacttgcagtaaccctttaggtccctgcccccaggcccagccagggctggaggagctgtcacagagagggcctcagctctgacctgacacctggctcttccccagcctgttttcttcttttcttaaaagacaattatgggtaccataagctgccaaagatcccctcctgcctcagacccctttgccaggggcttttgggggctgagaagaggcacatacagagtggggtaatagctcattcggcccgctttccatttctcaaaccccgctgtggcccattggtctcctttccctttatactttttatttaccttgctcaaggggccagaggattttcaagtgttcaaccttggagggtcccagctccatcccctagttgcagactcatcaccatggttaccatagtgactgcttcattgccatggttacatactaattgctgcagctctgtggcccagcccactgcttcagctgtgcgcgagtctgaggggacgttgcaaccatctcccaagcccaggcccctgggcatcatcatgctggggggaagggacttgaatacctttttccttcccccgtgccatgtgtctttcagccctgatgcacaaggctgccagccccccacgtccaggcctctcccttccactggtgccttgcttaagagccaagaagggaatgaagccgcgggaatctatggaacagaggaggagcgatgcaagttgggagaggaagcttagaagggtttatggttggagttcttgtacagtgttgagtttccgacagggaatagaggattcctccgaatgcatccttagagagaaaggcctgagcaggagatgatgcaagcagaggggaagggccctgtggttgccgccgcccttccttcagcctccgaaggttgatggaaatggagagtggaggaccgaggcctccagcttgtctggcctcgcccttcacgccttaacactaagcccacctcccctgctctccttcccagcattgagcccttggttgcctgggcccaggcttgggggttttcaggtatttgtaagcatttccagcagaacaataaagcctttggactacggaagcaaaaaaaaaaaaaaaaaaaaaaaaaaaagtcgtatcga

SEQ ID NO: 122266 - DNA, 415 bp, Homo sapiens; identical to SEQ ID NO: 121860

SEQ ID NO: 122267 - DNA, 307 bp, Homo sapiens; identical to SEQ ID NO: 121861

SEQ ID NO: 122268 - DNA, 1515 bp, Homo sapiens
attgcggcggcgccagagctgctggagcgctcggggtccccgggcggcggcggcggcgcagaggaggaggcaggcggcggccccggtggctcccccccggacggtgcgcggcccggcccgtctcgcgaactcgcggtggtcgcgcggccccgcgctgctccgaccccgggcccctccgccgccgccatggctcggccgctagtgcccagctcgcagaaggcgctgctgctggagctcaaggggctgcaggaagagccggtcgagggattccgcgtgacactggtggacgagggcgatctatacaactgggaggtggccatcttcgggccccccaacacctactacgagggcggctacttcaaggcgcgcctcaagttccccatcgactacccatactctccaccagcctttcggtttcttaaccaagatgtggcaccctaacatctacgagacggggtacgtgtgtatctccatcctccacccgccggtggaacggacccccagagcggggagctgccctcagagaggtgggaaccccacggcagaacgtcagggaccattcttcctgagtgtgatcttccctcctggaacggaggcccaacacctttcttcggcccgcaaacgtgggacggcttccgtggatgttacagggaagttgggaaagagagcaagggggaaggattcgggagttacacagaacatcattccggaagcaggtcctggggaccaaggtggacgcggagcgtgacggcgtgaaggtgcccaccacgctgccccgagtactgcgtgaaagaccaaggccgccgggcgcccgacgagggctcagacctcttctacgacgactactacgagggacgcgagggtggaaggaggaggccgacagctgcttcggggacgatgaggatgactctggcacggaggagtcctgacaccaccagaataaacttgccgagtttacctcactagggccggacccgtggctccttagacgacagactacctcaacggaggttttgtgctggtccccgtctcctctggttgtttcgttttggcttttttctccctccccaatgtctgttctgggttttcaacgttgctttcaagaagaaagaaggggcttgccccccacccgcccaactcacgttcacttcggggctcggttggacggggccccagggtgggagcggccggcccaccttgtcccctcgggaggggagcttgagcccgacttctaccggggtcccccagcttccggactggccgcaccccggaggagccacgggggcagctgctgggaacgtgggcggggggcccgtttttctgacactacccagcctgggaagccccaggtgtaagcggtccgaggggcccggtcctgcctgtcagctccaggtcctggagccacgtccagcacagagtggacggattcaccgtggccgactcttttccctgctttggtttgatatgaaatctaaataaaactactttatgagaggccaaaaaaaaaaaaaaaaa

SEQ ID NO: 122269 - DNA, 599 bp, Homo sapiens
  misc_feature (1)...(599): n = a,t,c or g
cggaattcccgagtcgacgatttaggtgaaaaagctggagcaaccaaacacggcttacaattctaggacggctgtttaaatagcgcaggggccattttaccctccaggttggccctgctcaggaccaggaggaaacacctccagcccgcgacctcctcccacagggggaaaaggaaagcaggaggaccacagaagctttggcaccgaggatccccgcagtcttcacccgcggagattccggctgaaggagctgtccagcgactacaccgctaagcgcagggagcccaagcctcccgcaccggattccggagcccaagcctccgcaccggattccggagcacaagctccaccgcgcatgcgcacacgccccagacccaggctcaggaggactgagaattttcttgaccgcagtgcaccatgggaagctctgaagtttccattaattcctggggcttccagaaaggaaggaaaaggcggccgtgggagagacgaagatttcatgttgcttgaaagttcttgaaaggaagtttaagggtttgagggttgattgagggccccatttttttgttgttgttngggtttcaggcnggaggattttt

SEQ ID NO: 122270 - DNA, 862 bp, Homo sapiens
acttctccgtcagtcacctgctagacctggaggaagccggggacatggtggcggcacaggcggatgagaacgtgggcgaggctggccgcagcctgcatggagtcgccgggactcaccagcggcacggctaccccgcagcaggacaatgaccagctgaactcagaagaaaaaaagaagagaaagcagcgaaggaataggacaaccttcaatagcagccagctgcaggcttatggagcgtgtctttgagcggacacactaaaccccttcttctttgtttttcctctctttccttatgccttcttgcctcctaacaatcctccaggtgtggtttcagaaccgaagagccaagttccgcaggaatgagagagccatgctagccaataaaaacgcttccctcctcaaatcctactcaggagacgtgactgctgtggagcagcccacagacttgcagctttgtgaaactaatgcctgttattctccctgctctctcctttgtccctacagcgccatggctacttattctgccacatgtgcccaacaatagccctgcacagggcatcaacatggccaacagcattgccaacctgagactgaaggccaaggaatatagtttacagaggaaccaggtgccaacagtcaactgagtgaaaaaaaataattaaacaggccctaaggaagaaatcaaaaaccataagacacctatcctgctctgttatttcttcatctgctggggggaaaaagtaaattacaaacaaacaaacaaagcagaactaaaatattgggaccatggcagagaaaagcaggagaggagcaaaatgaaaattagttaacaaatgttccgtcgctcctctgggataccacc

SEQ ID NO: 122271 - DNA, 1903 bp, Homo sapiens
aacgggtcgacgatttcgtggcggtgcagcttgggcggcctatcggatcgtgcttcggcggccgagcgcagctacaggagggtgtccagaagccacaagccatggctgtggggaacatcaacgagctgcccgagaacatcctgctggagctgttcacgcacgtgcccgcccgccagctgctgctgaactgccgcctggtctgcagcctctggcgggacctcatcgacctcgtgaccctctggaaacgcaagtgcctgcgagagggcttcatcactgaggactgggaccagcccgtggccaactggaagatcttctacttcttacggagcctgcacaggaacctcctgcacaacccgtgcgctgaagaggggttcgagttctggagcctggatgtgaatggaggcgatgagtggaaggtggaggatctctctcgagaccagaggaaggaattccccaatgaccaggtcaagaaatacttcgttacttcatattacacctgcctcaagtcccaggtggtggacctcaaggccgaagggtattgggaggagctgatggataccacacggccggacatcgaggtcaaggactggttcgcagccaggccagattgcgggtccaagtaccagctgtgcggtcatctttctgtatgccgcgcagggccctcatgggaccttccagccagacccggcgaccatccagcagaagagcgatgccaagtggagggaggtctcccacacattctccaactacccgcccggcgtccgctacatctggtttcagcacggcggcgtggacactcattactgggccggctggtacggcccgagggtcaccaacagcagcatcaccatcgggcccccgctgccctgacaccccctgagcccccatctgctgaaccctgactggtaaacaactgctgtcagaaaagggctgggcttgggaaggggaggtggaggccaggtgtccccagacctctaacccttgcccctagcaagctcttcttttgtggagcctctcagtgtgggcagccctcgcatgctggggtcgggccagctctccccgaaaggtcttgacctgaatgatggccggggaagcctgcgtgtgcccctttcagagacggagcacctgagatgtgggaggtgcagcatgttcccctgggcccctcaaaaagtcgagcttggaggccagcctggatctgtctctcccttcccctcctgggaccattctacctgtgttctttgaccctcggagcagggacaggcaagacaactggcaagcttgcagctgccctgatggtgcaggtgcagggaggtgaccatgtaactctgaccaatctgggaagtggagggtgggctcatgggccgtgctctgcccctgtctgctgctcccagtctctcgctctgcctgcctgctcagaagaggtggctttggcccagaggctcaggccgggactgagatggacagacccagggtggggtggggtcccaggtcgggtgtggactgtcctcactgtcaatggagcccccagaaagctaagatgggtacccaggtggggttaaggttccccagaggactgagggaatcctgtacaggatgtcccagggtagatggggagcaggattgggacctgctctgacagctggacacatgagccctggatgagtatggtaagggggtttgaagaatcccctgtccacctcccaaatccaggcccggccccctctggcttggagagcattccaagcccccaccccacccctagaactgccattcccaagacctctgtctccccagcccaacccacccttggaacttgcctcttgtccttgctggaaggttaccagtgttctcctgacttcgcccttactgcatgcagccaaataaaaggtgtgcccagtgtatt

SEQ ID NO: 122272 - DNA, 453 bp, Homo sapiens
  misc_feature (1)...(453): n = a,t,c or g
nnnnnnnnnnnnnnnnnnnnnnnnnnnnntccaaactgtgtagacatagtctaaaatgtttggagtgtaatgaagtcttccaggacgagacatcactggctacacatttccagcaggctgcagatacgagtggacaacaaatgaagaaacacccctgccgccagtgtgacaagtctttcagctcgtcccacagcctgtgccggcacaaccggatcaagcacaaaggcatcaggaaagtgtacgcctgctcgcactgcccagactccagacgtacctttaccaaacgtttgatgctggagaagcacgtccagctgatgcatggcatcaaggaccctgacctgaaagaaatgacagatgccaccaatgaggaggaaacagaaataaaagaagacactaaggtccccagtcccaagcggaagttggaagaaccagttctggagttcaggcctcccc

SEQ ID NO: 122273 - DNA, 3066 bp, Homo sapiens; identical to SEQ ID NO: 117706

SEQ ID NO: 122274 - DNA, 1191 bp, Homo sapiens
atgcccctagatgaagacccctccaagctgtgtagacataatctaaaatgtttggagtgtaatgaaatcttccaggacaagacatcgctggctacacatttccagcaggctgcagatatgagtggacaaaagacttgtactatctgccagatgctgcttcctaaccagtgcagagaatccatcagcacaaatctccttaaacctgccctgagtgcagggccatctgcaggttctcactgtgaagtcttctacaagtgtcctatttgtccaatgacgtttaagtctgccccaagcacacattcccacacctacacacagcatcctagcatcaagataggagaatcaaaaataatatataagtgttccatgtgcaacactgtgttcaccctgcaaaccttgctgtatcgccactttgaccaacacattgaaaaccagaagagagatgtgtacatatcccacgtcaggaaggagcatgggaaacaaatgaagaaacaaccctgctgccagcgtgacaagcctttcagctcgtcccacagcctgtgctggcacaaccggatcaagcacaaagtcatcaggaaagtgtacacctgttcacactgctcagactctagaggtacctttaccaaacagttgatgttggagaagcatgtccagctgacgcatggcatcaaggaccctgacctgaaagaaatgatagacgccatcaatgaggaggaaacagaaataaaagaagaccccaaggtccccagtcccaagtggaagttgaaagaaccggttctggagttcaggcctcccagaggagcaatcactcaaccaaagctggaaatcaatgtttttaaggttcacaagtgtgccgtgtgtggcttcaccaccgaaaacctgctgcagttccacgaacacatccctcagcacaaatcggatggttctttctaccagtgccgggagcacctctttgttgcacacaagttaaaggaacctcagccagtgtccaagcaaaacggggctggggaagataaccaacaggagaacaaacccagtcacgaggatgaatctcccaatggcgccatgtcagacagaaagtgcaaagtgtgcgcaaaaacttttgaaactgaagctgccttaaaaactcacatgcagacacatggtatggccttcatcaaatccaaaaggatgagctcagacgagaaatag

SEQ ID NO: 122275 - DNA, 3342 bp, Homo sapiens; identical to SEQ ID NO: 117636

SEQ ID NO: 122276 - DNA, 438 bp, Homo sapiens
atgcccctagatgaagacccctccaagctgtgtagacataatctaaaatgtttggagtgtaatgaaatcttccaggacaagacatcgctggctacacatttccagcaggctgcagatatgagtggacaaaagacttgtactatctgccagatgctgcttcctaaccagtgcagagaatccatcagcacaaatctccttaaacctgccctgagtgcagggccatctgcaggttctcactgtgaagtcttctacaagtgtcctatttgtccaatgacgtttaagtctgccccaagcacacattcccacacctacacacagcatcctagcatcaagataggagaatcaaaaataatatataagtgttccatgtgcaacactgtgttcaccctgcaaaccttgctgtatcgccactttgaccaacacattgaaaaccagaag

SEQ ID NO: 122277 - DNA, 530 bp, Homo sapiens
cctgtgccagcacaaccggatcaagcacaaaggcatcaggaaagtgtatgcctgctcgcactgcccagactccagacgtacctttaccaaacgattgatgctagagaagcacgtccagctgatgcacagcctcaaggaccctgacctgaaagaaatgacagatgccaccaatgaggaggaaacagaaataaaagaagacaccaagttccccagtcccaagcacctcttcattgtacacaagttaaaggaacctcagccagtgtccaagcaaaatggagctggggaagataaccaacaggagaacaaacccagccatgaggatgaatcccccaatggcaccgtgtcagacagaaagtgcaaagtagacactgatgaagctgcttttgagccagattataatgaaagtgacagtggaagttatgtatctgtaaaagatgaggaaacttcaggaaacacttctaaggtcctgaaagataagataatggagaaagcaggagaaagcaaaagaaagcctggacacagttggccag

SEQ ID NO: 122278 - DNA, 2682 bp, Homo sapiens
atgaggctccctgctcagctcctggggctgctaatgctctgggtctctggatccagtggggacattgtgatgacccagactccactctccctgcctgtcactcctggagagccagcctccatctcctgcagatctagtgagagcctcttggatactgatgatgaatacacctatttgaattggtacctgcagaagccaggccagtctccacagctcctgatctatgaggtttccaaccgggcctctggagttccagacagagcacagccccctgccctgaagactttttataggctggtcacacccggtgcaggagtcagccccagtcaggacacagcacggatgcaaggtcccccactcagctcctggggctcctggtgctctggttgccagatttgtgaggacagcacctgcatctttgaagagccctgtaaaggctcttctctgtatgtcagatctaatgagacagctcttgtcctatactgggcttttgtggaaactgaacatttgactatgagtcaacaagtcaccatgcgacctgaactgcctatcatgaactgggtgctttctgactcatctagccataacgtgggtcatgcacagcagcattccatcatcacatggaaatggtgtataagtgattgggctcaagcaggtcctggggggcacaaggatggaggctatgcatggattcagcaatgtggacttccactcaccaaggctgaactgtctgtggccactgctgagtgcccaatttgccagcagcagcagagactaacagtgaaccctttgtatggcatcattccctggggtgatcgaccagctacccagtggcaggttgattatattggacctcttccaccatggaaaggagagaggtttgtcctcattggaacaggcacttactcaggatatgggtttgcctacctgcatgcaatgcttctgccaagactaccatttatggactcaaggaatgccttatccactatcacggtattccacacagcattacctctgaccaagcactcactttacagccaggattcacagatccaggattcaaggggtggatgtgaaagtggaaccactcactatgatgcactagcaaaatgtttgctttctgttcccacgacattaggttctgctttactagtcatcttagctccagagggaagaacgctgctaccaggagacacaataatgattccattaaactggaagttaagatggccacttggacgctttggggtcctcctacctttaagtcaacaagctaagaatggagttacagtgttggcggcagtgattgacccagactatcaagatgaagtcagtccgttactccacaacggaagtgaggaagagtatgcatggaatataggagatccattagggtgtctcttggtattatcatgcactctgattaaggtcatttatttcccctgggttgcctacactcgcttcttcccactcccctatgaaggacaatataagcctctggacctcactaggcagacagtaatccagataaataagtgcaagggcaaattgggggaaaaattggaatggagagctcagaatctggccccagagaagggcagagggaaaggggacccagttcagaatctcgacacaagaatcagggagcgcaccctgatggtaacatttttttcaggggcctattttggggatcctggtgagaacctgagtccgtcactgaccacggcagcccagcatgctccccagaacactggggcacagaaacactggcccactgaaggggcagctaaggaacacagtgtaagtggtgactcagagcactttgaaagctggagggcagcacagttgtttgaatcagtggatgcagaacccatgaatatggagagtcaattgcatttcattatgcccaaagctctcagaactaaaaaggcggcttcagactcctccaaagaacaagtggccaattcgagggaatcctccccgtcaccaaaagaagtaaacgacagtccgagagccgccaccaagtctcctgaatcccagaatctcatcgatgggacaaaaaaaccatccctaaagcaaccagacagtcccagaaacatctcaagtgacaacagcagcaagggaaccccgtcctctcctgcaggatccacaacagcaatccccaaagtccgcataaaaaccattaagacatcttctggggaaatcaagagaacagagaccagggtattgccagaagtggatcttgactctgggaagaaaccttccgagcagatggtgtctgtgatggcctctgtgacatcccttctgtcatctccagcatcagccgctgccctttcctctccccccagggtgcctctccagtctgcagtggtgaccaatgcagttttccctgcagagcccacccctaaacaggtcacaatcaagcctgtggctactgctttcctcccagtgtctgctgtgaagacagcaggatcccaagtcattaatttgaagcttgctaacaacaccacggtgaaagccacggtcatacctgctgcctctgtccagagtgccagcggcatcatcattaaagctgccaatgctatacaggagcaagctgtcatgatgccagcatccagcctggccaatgccaaacttgtgccaaagactgtgcaccttgccaaccttaaccttctggcttag

SEQ ID NO: 122279 - DNA, 1212 bp, Homo sapiens
gctgcagatacacgtggacaaaagacttgcactatctgccagatgctgcttcctaaccagtgcagttacgcatcacaccagagaatccatcagcacaaatctctctacacctgccctgagtgcggggccatctgcaggtcggtgcacttccagacccatgtcaccaagaactgtctgcactacatgaggagagttggttttcgatgtgtgcattgcaatgttgtatactctgatgtggctgccctgcagtctcacattcaaggttctcactgtgaagtcttctacaagtgtcctatttgtccaatggcatcaaatcagaacaaagaggacaccaaatccatgaatgggaaagagaaattggaaaagaaatctccatctcctgtgaaaaaatcagtggaaaccaagaaagtggccagtcctgggtggacgtgttgggagtgtgaccgcctgttcattcagagagatgtgtacatatcccacgtgaggaaggagcaagggaagcaaatgaagaaacaaccctgctgccagcgtgacaagcctttcagctcgtcccacagcctgtgctggcacaaccggatcaagcacaaagtcatcaggaaagtgtacacctgttcacactgctcagactctagaggtacctttaccaaacagttgatgttggagaagcatgtccagctgacgcatggcatcaaggaccctgacctgaaagaaatgatagacgccatcaatgaggaggaaacagaaataaaagaagaccccaaggtccccagtcccaagtggaagttgaaagaaccggttctggagttcaggcctcccagaggagcaatcactcaaccaaagctggaaatcaatgtttttaaggttcacaagtgtgccgtgtgtggcttcaccaccgaaaacctgctgcagttccacgaacacatccctcagcacaaatcggatggttctttctaccagtgccgggagcacctctttgttgcacacaagttaaaggaacctcagccagtgtccaagcaaaacggggctggggaagataaccaacaggagaacaaacccagtcacgaggatgaatctcccaatggcgccatgtcagacagaaagtgcaaagtgtgcgcaaaaacttttgaaactgaagctgccttaaaaactcacatgcagacacatggtatggccttcatcaaatccaaaaggatgagctcagacgagaaatag

SEQ ID NO: 122280 - DNA, 420 bp, Homo sapiens
tcaattcccatctatgagtgagaacatgcggtgtttggttttttgtccttgtgatagtttgctaagaatgatggtttccagcttcatccatgtcccgagccgcttcatggtcccaaaccaggacccaaagtgctgcttgggcttaaggttgtaattatttgcagccaactggagcagcggacctccttgcttactttgaattcctgggtccagagggaaaaactgggtggtgacagggactggacagggatgccacaggggccccgccgagtccgacggcccggcaggggtgggcaaggcactgggaacagccgccagcttgatacctagttttattcctttgtagtcaaagaagatggccagggagacagcagcgtggtcagagtggtaggagctggccatcggtgagagctgctccat

SEQ ID NO: 122281 - DNA, 2235 bp, Homo sapiens
atgatcatcaacaccatcatcaccaccaccaccaccatcaccattatcttcatcatcaccatcatgtcatcatcaccaatcaccatcaccaatatcatcaccatcatccaacatcatcaccaccacaatgaccgaacggctatccccttcccccaaggtggagctgacagccactgcctgtgccttgttgtctgcctggcaggccagcactccatggctgggagcaacctgcagtgccccctgggcttttactgctggaatggagtgatggctttgtggctgggccccaacagcacctgcagtcggctcccagaactcacagacagcgaggactgccagccagcagactccccaggggatgaggaccccaagccctggtgggacccaccccatgaggcccccctcacaggctacttccacccatatggtgctgcctttgtgccacgccatgccggaaacttcaaggacaggagagaggtgccccaccaggacaccagcttctgctcagcaggtcagttctggattctgccttctgcttgcaagacaggaagagtggccttgactctgaccttgctgattggtgcttatcaaacgctaacagaagctgatgttaagggactgacagcagcccgggcagcgagtccaggggcgaagtggaggacacagttcccctgcccagcaggcacctgcagctcccaggcaggcaacggccagctcgaggactgtctgccctaccccccggggccttctgccccagtggggtccctgagccggagctctgccaacggcacgaagtacgccacccagttcccctgccctcggagctactacgacccagacccactgacccagagcctggacagctgcctgccctgtcccccaggccactgctgcggtattaagctgggtgtctttctcacagacaggaaggatctgactgccgatgcacaggagctgaaaggggagctatactgcctgccatgccatgataaaatgggggtccccatctgtggcgcttgccgacggcccatcgaagggcgtgtggtgaacgccatgggcaagcagtggcatgtggaggtgctgtggctgaggtcccttgtaggcccggctcctactgtgggcctcagacggggctgcccccactctgccccggggggctatgcctgccctgtcagctcctccacctacagtggcctggggcagcgctgtgtctttccccattactgccccccgggcagtgcccaacctcgtgcctgccctgggggctccgaagccctgaatgggaccagcctcaggtctctgaggagatatgctgcctgccgcctctgtgaagcgggcacctaccgcagccgggccctggatgctctacccttacagccctgcccgcctggattcagctgcccccaggctctcagcactaaaaaggtggcatcagactcctccaaagaacaagtggccaattcgagggaatcctcctcgttatcaaaagaagtaaacgacagtccgagagccgccgacaagtctcctgaatcccagaatctcatcgacgggaccaaaaaaacatccctaaagcaactggatagtcccagaaacatctcaagtgagaacagcatcaaaggaaccccggcttctcccgcagggtccacaccaccaatccccaaagtccgcataaaaaccactaagacgtcttctggggaaatcaagagaacagtgaccagggtattgccagaagtggatcttgactctgggaagaaaccttccgagcagacggtgtctgtgatggcctctgtgacatcccttctgtcgtctcccgcatcagctgccaccctttcctctcccgccagggtgcctctccagtctgcagtggtgaccaatgcagtttcctctgcagagcccacccctaaacaggtcacaatcaagcctgtggctactgctttcctcccagtgtctgctgtgaagacagcaggatcccaagtcattaatttgaagctcgctaacaacaccacggtgaaagccacggtcgtacctgctgcctctgtccagagtgccagcagcaccatcattaaagctggccaatgccatccagcagcaaactgtcatgatgccagcatccagcctggccaatgccaaacttgtgccaaagactgcatcttgccaaccttaaccttctgcctcaggttgccccagccacctctgaactctgcccagtgtcaatcaaaactcaaccacagataa

SEQ ID NO: 122282 - DNA, 3769 bp, Homo sapiens
atgatcatcaacaccatcatcaccaccaccaccaccatcaccattatcttcatcatcaccatcatgtcatcatcaccaatcaccatcaccaatatcatcaccatcatccaacatcatcaccaccacaatgaccagcggccatctctgggcaaatgcaggggcctctacattcgagtccggaaggtccctggggagcgggccacagcaaacagcaggtgcccaataaatgcccagggcattgaaagctgctggaatggagtgatggctttgtggctgggccccaacagcacctgcagtcggctcccagaactcacagacagcgaggactgccagatttatggggatacagagagaaagaggagacactccaggaagacgtgcaggtgggagtaccaggttgaaaccaaggacaccttcctggaggagctgctgtttgagccagctctgagaacaggaattcaaagtaagcaaggaggtccgctgctccagttggctgcaaataattacaaccttgagcccaagcagcactttgggtcctggtttgggacgatgaagcagctcggtgagactgagagtatcttctcctttgcttatgaagtttgtttgactgtatatgaaatttttgggctccccggcattgcgccatcaaaaacaaagtcgttctccaacttcttgtcctgcatcactgccatcgcagctctcagcactaaaaaggtggcatcagactcctccaaagaacaagtggccaattcgagggaatcctcctcgttatcaaaagaagtaaacgacagtccgagagccgccgacaagtctcctgaatcccagaatctcatcgacgggaccaaaaaaacatccctaaagcaactggatagtcccagaaacatctcaagtgagaacagcatcaaaggaaccccggcttctcccgcagggtccacaccaccaatccccaaagtccgcataaaaaccactaagacgtcttctggggaaatcaagagaacagtgaccagggtattgccagaagtggatcttgactctgggaagaaaccttccgagcagacggtgtctgtgatggcctctgtgacatcccttctgtcgtctcccgcatcagctgccaccctttcctctcccgccagggtgcctctccagtctgcagtggtgaccaatgcagtttcctctgcagagcccacccctaaacaggtcacaatcaagcctgtggctactgctttcctcccagtgtctgctgtgaagacagcaggatcccaagtcattaatttgaagctcgctaacaacaccacggtgaaagccacggtcgtacctgctgcctctgtccagagtgccagcagcaccatcattaaagctgccaatgccatccagcagcaaactgtcatgatgccagcatccagcctggccaatgccaaacttgtgccaaagactgtgcaccttgccaaccttaaccttttgcctcagggtgcccaggccacctctgaactccgccaagtgctaaccaaagctcagcaacaaataaagcaggcaataatcaatgcagcagcctcgcaaccccccaaaaaggtgtctcgagtccaggtggtgtcgtccttgcagagttctgtggtggaagctttcaacaaggtgctgagcagtgtcaatccagtccctgtttacattccaaacctgagtcctcccaccaatgcagggatcacgttaccaacgcgtgggtacaagtgcttggagtgtggggactcctttgcagttgaaaagagtctgacccagcactatgacagacagagcatgcgcatcgaagtaacatgcaaccatggtacaaagaacctcattttttacaacaaatgcagcctcctttcccatgcccgtgggcataaggagaaaggggtggctgcagatacacgtggacaaaagacttgcactatctgccagatgctgcttcctaaccagtgcagttacgcatcacaccagagaatccatcagcacaaatctctctacacctgccctgagtgcggggccatctgcaggtcggtgcacttccagacccatgtcaccaagaactgtctgcactacatgaggagagttggttttcgatgtggtgcatttgcaatggttgtgtactctgatgtggctgccctgcagtctcacattcaaggttctcactgtgaagtcttctacaagtgtcctatttgtccaatggcatgtaagtccgccccaagcacacattcccacacctacacacagcatcctggcatcaagataggagaaccagaaataatatataagtgttccatgtgcgacactgtgttcaccctgcaaaccttgctgtatcgccactttgaccaacacattgaaaaccagaagttgtctgttttcaagtgtccagactgttatcttttatatgcacagaagcaacttatgatggaccatatcaagtctatgcatggaacattgaaaagtattgaagggcctccaaacttgggtataaacttgcctttgagcattaagcctgcaactcaaaattcagcaaatcagaacaaagaggacaccaaatccatgaatgggaaagagaaattggaaaagaaatctccatctcctgtgaaaaaatcagtggaaaccaagaaagtggccagtcctgggtggacgtgttgggagtgtgaccgcctgttcattcagagagatgtgtacatatcccacgtgaggaaggagcaagggaagcaaatgaagaaacatccctgccgccacctgtgccagcacaaccggatcaagcacaaaggcatcaggaaagtgtatgcctgctcgcactgcccagactccagacgtacctttaccaaacgattgatgctagagaagcacgtccagctgatgcacagcctcaaggaccctgacctgaaagaaatgacagatgccaccaatgaggaggaaacagaaataaaagaagacaccaagttccccagtcccaagtggaagttggaagaaccagttctcaagagtgccatgtgtggcttcaccaccgaaaacctgcttcagttccacgaacacatccctcagcacaaatctgatagttcttcctaccagtgccaggagtgtggcctctggtacacgtctcacgtctctctgtccaggcacctcttcattgtacacaagttaaaggaacctcagccagtgtccaagcaaaatggagctggggaagataaccaacaggagaacaaacccagccatgaggatgaatcccccaatggcaccgtgtcagacagaaagtgcaaagtgtgcgtgaaaacttttgaaactgaagctgccttaaatactcacatgcggatacatggcatggccttcatcaaatccaaaaggatgagctcagccaagaaatagccacagatgctccatgattaaaatccctgtccacattggaataaaaaagacatttttgttacaaagtttgcagtatgctgagagttacacagtactgtctagggctgttgcaatattattcttcttttcaatgttaccttccttcacctcgtcgtatatatcctcgataagtattaaaacagtatttgagtttaaaagagtttgtatatatttaaatgaataactttttatactctttgttacatgtttgtatcagtatttagtggaaaaccatttgagttgttttgggttagaatttttctttttgtactgtttctttaaaacagagttcttagtaacaggggcagttcctgaattcaaataaaccattttgtatgtttggaaaaaaaaaaaaaaa

SEQ ID NO: 122283 - DNA, 438 bp, Homo sapiens
atggggagctccagactggcagccctgctcctgcctctcctcctcatagtcatcgacctctctgactctgctgggattggctttcgccacctgccccactggaacacccgctgtcctctggcctcccacacggaagttctgcctatatcccttgccgcacctggtgggccctcttctccacaaagccttggtgtgtgcgagtctggcactgttcccgctgtttgtgccagcatctgctgtcaggtggctcagttcgtcccattccgagactatgttgaccggtcggggaaccaggtgttgagcatggcccgactggccaaggatgtgctggccgagatcccggagcagctgctgtcctatatgcgcaccagagacatccagcctcggcccccaccccctgccaaccccagcccgatcccagctccagagcagccctga

SEQ ID NO: 122284 - DNA, 597 bp, Homo sapiens
atgcattcactgactgccactctccgcccctacctgagtgccgtgcgggccacattgcaggctgccctctgcctggagaacttctcctcccaggttgtggaacgacacaacaagccggaagtggaagtcaggagtagcaaagagctcctgttacaacctgtgaccatcagcaggaatgagaaggaaaaggttctgattgagggctccatcaactctgtccgggtcagcattgctgtgaaacaggctgatgagatcgagaagattttgtgccacaagttcatgcgcttcatgatgatgcgagcagagaacttctttatccttcgaaggaagcctgtggaggtccacgatcacgtcgcgcccgccgcccagcgctgcccgtatcagttcagccagcgctcccaccaggcgccgctgcgcctccgagtccgccgcgtgcaggaggagcactggccgcgctgggcccgggcctggtggcgggaagcaacagatgaaggctgggcggctgagggactgctcagccctcttctccccaccctctcgggataccaactcaccatccggacacaagaggtgcttccaggcaaactggacatctga

SEQ ID NO: 122285 - DNA, 1062 bp, Homo sapiens
atgctggcaaaggaggaggtgagccggcaggagctgaggcagcgggtgcgcatggctgacaacgaggtcatggacgcctttcgcaagatcatggctgcccggcagaagaagcggactcccaccaagaaagaaaaggaccaggcctggaagactctgaaggagcgtgagagcatcctgaagctgctggatgggaagttctgcctatatcccttgccgcacctggtgggccctcttctccacaaagccttggtgtgtgcgagtctggcactgttcccgctgtttgtgccagcatctgctgtcaggtggctcagtgtgccgcatactaagtccctggagagccgcatcaaggaggagctaattgcccagggccttttggagtctgaggaccgccccgcagaggactccgaggatgaggtccttgctgagcttcgcaaacggcaggctgagctgaaggcacttagtgcccacaaccgcaccaagaagcacgacctgctgaggctggcaaaggaggaggtgagccggcaggagctgaggcagcgggtgcgcatggctgacaacgaggtcatggacgcctttcgcaagatcatggctgcccggcagaagaagcggactcccaccaagaaagaaaaggaccaggcctggaagactctgaaggagcgtgagagcatcctgaagctgctggatggagttccaaatgccttacagctgactttcagcaacaccagggatccccgcagcggcgccgaccttcgcccggtcagcggccccgacccccgctccgcgcccctgctcgccctgctccacgctgccccgcgcccgctgctgctgctcgcttacttcagtcgcctctgcgccaagggcgacatccccccgccgctgcgcgccctgccgcgctaccgcctgctgcgcgacctgccgcgtctgctgcgggcgctggacgcgcggcctttcgcagaggccaccagctggggccgccttggggcgcggcagcgcaggcagagccgcctagagctgtgcagccggctcgaacgagaggccgcccgacttgcagacctaggttga

SEQ ID NO: 122286 - DNA, 2141 bp, Homo sapiens
  misc_feature (1)...(2141): n = a,t,c or g
ggtggagctctgctcaacctaggtctgcaagtcgggcggcctctcgttcgagccggctgcacagctctaggcggctctgcctgcgctgccgcgccccaaggcggccccagctggtggcctctgcgaaaggccgcgcgtccagcgcccgcagcagacgcggcaggtcgcgcagcaggcggtagcgcggcagggcgcgcagcggcggggggatgtcgcccttggcgcagaggcgactgaagtaagcgagcagcagcagcgggcgcggggcagcgtggagcagggcgagcaggggcgcggcgcgggggtcggggccgctgaccgggcgaaggtcggcgccgctccacagcagcagcacagtgccctgctccccgcgctacgcgcgtncgggcccgcccagagccacggcagcgggcccacgcgcgccacgtgcctcccctcccacaggtccacgatcacgtcgcgcccgccgcccagcgctgcccgtagcagttcagccagcgctcccaccaggcgccgctgcgcctccgagtccgccgcgtgcaggaggagcactggccgcgctgggcccgggcctgactgtgggcgccggcaggtgagggcccagaacaaacacccagtagggtgagggagggccagcagtgcccaggatcaagagcccccaggtgtctgtaagagacatctggacacaagaggtgcttccaggcaaactggacatctgaccgccacacctggctgacagtgtacacggggggcaccaaagtgtcctgccccaagcctgggaggctccaggcagcactgaaggtggcatgcattcttgaggagaagtgaagaatcagctgctgggcttgggtatccatgcttacattccaggatgtgagagacccagtctggtgggggcattcaacatggctgctgtttccaaaagagaaccatggttgtaccttgaagcagagctgggggtgcaggtccaccttctccaaaacataccacccatctgactctcgagctgtggcattcgggaggtctttgcaaagggtatgccagtcgtgcctctggcagagggcagcttccagcttcagtgggcagcggagtgtcagggccatgaccatctgagtgtgctggctgtagtcagtgaagtgcactgacttccagaagtccgagccataggcttctggccagctctggaagggacattttttgcgcctcacagtgtcctcttgcaggtaggatgcctctatgcacagacagggcagaaggaattcataaggcagctctacagtgtggcccccagacacaattttctggacatcatagggactgctcagctcttcacactccagtgcccactggtgacaaagacgcacgctgacctcagggcctgaagatatggtcacccgaatagcccgggcctcaggcagcaaatcaaaggagaactcgggtccaccactcagctgaacccatctcctgttgtacccagtgcccacctccatgcctttgtgagtccaatctgggaagactttcccatgtctctggatccgaaggttgggtccttttagagcgaagtcccttgtgggagatgtctggggaggggatggaaatgtgatggctcttctcagacaggtgacgacgaggcagcagcttcctctgagcaggtgctggcatcttgtgtctcctatagaacttgaatgtggaagactttttggatttctgcaccaggaggtggaagaggccccgttgaagacctgagccacctgacagcagatgctggcacaaacagcgggaacagtgccagactcgcacacaccaaggctttgtggagaagagggcccaccaggtgcggcaagggatataggcagaacttccgtgtgggaggccagaggacagcgggtgttccagtggggcaggtggcgaaagccaatcccagcagagtcagagaggtcgatgactatgaggaggagaggcaggagcagggctgccagtctggagctccccatgggcttctgtgcaattagggctcccggaacatggctgcatggcctgaaggtgggtggcagggccttgctgtgcagcagcgaacacagtaccagcaggagccctcgccccagcctgccctggccccacgaaatcgtcgacccgggaat

SEQ ID NO: 122287 - DNA, 3164 bp, Homo sapiens
tttttttttttttttttcaagtttagggatttgctctatatttgcatttttctttttaaaaggcacagtttttattttaacgacgctgcattgctctttgatgatgaatctcaattcgactcctcaaactgtcaacactcttgttatcctagattctagaaggggcctcatcttttgacttctttctatagagggccacttctaaagctacagcactcatttggaaaaggacactgggatcaacacgtaagcgttgcaagcacaggggccgcctctcttgcagacaggtggccaaagcagggcttgtgctgggccagaagtggaagtaattcctcgccagctacacattcagtctgactggtggatgattgggagtgtttgtccctccctcccccaataattgatggccttgagatctgccagcatctcaaaggcagattcgtggctctgttcccagacttaggtctcagttatttaattggtaaatgacacaatcaagagactcaacactaattggaatgctgatttcaagtatttcctgggctagctggtggaagccatagattgtggaatgtgatttccatttctgaatcagtgggtggcaggttggttacagaaatgcttcctattagtctggaggccctctaggagtctgacatgtaattaacaaagcaaaaggtaaacatgaagggctggcatggagctgggtgtatatctggctgtgggacgtcgggttcttttctccactgcaaatgagactacagttgtgatgatggtgggaggttccaggggtgcaggtcttcaccaaggaccatgttgtaccacagcctctgctgagctgagggacacatgtccccctgctttcccaacaccaccaactttggatttcacagattgtctctaggctgggggctgccttgactgtattacacctggctggctcctttaatcacagcattctagaaatccatattggatgtggaataccagaatcctatgtagcatcctagtttgcaatccaattatagagttctttaaaaattctggagttctgtatgagaactagaaccatgatgaggtcagaggcaggcactttgcccacagttgatcctggaggcctccagactctgtgaggtgagcacctcgcagcacctctgttcctcttttgaggccagtaattgcctggggaagagagacagggaaatggaagcatggatcagggcaaatcagccagcatttctagtttggaggtctacctggccttttccgtgggctcagggccatctgaaacactgccctgtaaagctggtgctgggctgtccttgtgcctggagagtgctaaaattgacatttcaaatacccagagagcagggggagatatcccgcatgtccatagctgcaaagaaatgtctaggggggctccctcttctgactcctcacctggcagctgatcagcattcaatactgaacactcttagggccccaagtatggcctttgaccggaccaaatcacctggggttgtgacagagaacagaagctgtgcagtaactgcaatgttccccccaggacggcagaaactaaaaagccccaagaggacttctttctcttctgctgcagatgagtggcatcgatactaaaagctgccccaaacaggcaaattttacctttgtttctaaagcaccatcatgtaggagagccatctgagggctgggcaacctcgcaggactcacttttgggtggcctaggctaccttggtgttctcccacataatgttcaaggggacatagtgacaaagttgaaaaggctctgttgcttttccgtgatgtcagcagggattaaagcagtctctgctccctgtggggcctcttgtgggatatgctcttcaccctacccccacaactcaggggctcaaggaccaggcagaccccagcccctgaatcaagagccctcttcaccctgaaccatttggccagcaccttttacacctagtgcccacaggggccctgcctcccttgaaagaggaagtctgcagtgagtgccagaccctggggggcctgccaaggggacatgagggctcagttcctattgaatttttccaagactgttgagttggtgtgttcaaacagccactgctgggtgagagaggatgggttgcaggtgttcatgaagatcctatggtcactttcactgcagtccatgcagctgccactgacagggtggtacagggtcttgtctttgcggtatttccacagctggttgcccttcatgctgtggcagtcgtacagcgtgacagggctggtgtgggaaatggcatcaaagcagaacttcttggtgtgctgggggtctccaggccggatgtcctctctccaggtgaaggtgaatacctgcatgttgttccaggcagcctccccacggcctcggacgcagccctctagccttagtggggagcccaaggccccgtgctttgtgtctgcacacagccctgtgcccacatttcggatctccccccaagctgcagccgggggctccacgggtgggtagaatttgggcaggtcccaggctatcttcgtcataaaccacttgaaactcttgcagttaagggagctgcggagctttttctggactgcgacatccccagcggagaggtggcggtattcaggccggcgctggtaaatgtactctgcgtactcatccatccacacttcggccacccgcttaaggttcttacccgggccaggctgactccggccgggaccttgtagggcacatacttcctgtagatatggcccaccctggagcaggggatgtcctccatgcggcccccacacatccacacctgcatggcaagaaggaagagagaggatgacgtttctgcttccagttcaccatcccgccaggccagcatcccttagcgcactcagcaaaagcatcagcctggattgtctgctgaagcctggatcacagacctaatgacatgggaaaacacagtaatataataacagcggtaaaaacagctgacagcactgagtgcttaccattgccacacactatgctaagatggtcacatgcacaaccacacttaagcctcatcagaaaacctataaagtaggtagtaacattttacagatgctgaaatggaggctcagagaagctaagaaatgtg

SEQ ID NO: 122288 - DNA, 387 bp, Homo sapiens
ctatctccagctaggttcatgagctggccctactggtctctcctttccccttttcctcttatcccattgcattagtctggattcttgcttacagataaccaaaaccttagtcaatctgatttaagcaaaaaccagaattgataggctcacataactgaaattccagggtagaccctaaggccgggctggatgcagggactcagtcatctcactcgggctaggtctctctcaatgcctagtccctatttcatctgagttggcttccctctcaggtgggctttttctcatggagatcctcagcagcccatggaaggagagtgtttttcccatcatcttgtacaagtccccaggttgagtctcattggcctgctggccccatgcccatcc

SEQ ID NO: 122289 - DNA, 1008 bp, Homo sapiens
atggcagctggctcctccaaagccagcggtcccacagagaaaggtggaagccacggcatctttatgaccgtcatttctgcagtatcctgtgggttacacaggaaactgagtctcagagaagttaagtaccttaatcaaagtcataaagtgtggatgtgtgggggccgcatggaggacatcccctgctccagggtgggccatatctacaggaagtatgtgccctacaaggtcccggccggagtcagcctggcccggaaccttaagcgggtggccgaagtgtggatggatgagtacgcagagtacatttaccagcgccggcctgaataccgccacctctccgctggggatgtcgcagtccagaaaaagctccgcagctcccttaactgcaagagtttcaagtggtttatgacgaagatagcctgggacctgcccaaattctacccacccgtggagcccccggctgcagcttggggggagggacagagacagtccatgacatacagcaaaggtttcatgtccttttctaggcgctttcaaggtatggtccctggaccacctgcacctgagtcacctggaatggggatccgaaatgtgggcacagggctgtgtgcagacacaaagcacggggccttgggctccccactaaggctagagggctgcgtccgaggccgtggggaggctgcctggaacaacatgcaggtattcaccttcacctggagagaggacatccggcctggagacccccagcacaccaagaagttctgctttgatgccatttcccacaccagccctgtcacgctgtacgactgccacagcatgaagggcaaccagctgtggaaataccgcaaagacaagaccctgtaccaccctgtcagtggcagctgcatggactgcagtgaaagtgaccataggatcttcatgaacacctgcaacccatcctctctcacccagcagtggctgtttgaacacaccaactcaacagtcttggaaaaattcaataggaactga

SEQ ID NO: 122290 - DNA, 1828 bp, Homo sapiens
atgcttggtggttacaagtacagactccattcgcttccaaatcatcccgtgggcagggacagagatgaaacaagagacataaagctaaaggatgggtctatggaagagcacctgaagaagcctcttgaagactacatggcccttttccccagtgtgaggattcttcgaaccaagaaacgggaagggctgataaggacccgaatgctgggggcctcagtggcaactggggatgtcatcacattcttggattcacactgtgaagccaatgtcaactggcttccccccttgcttgaccgcattgctcggaaccgcaagaccattgtgtgcccgatgattgatgtaattgaccatgacgactttcggtacgagacacaggcaggggatgccatgcggggagcctttgactgggagatgtactacaagcggatcccgatccctccagaactgcagaaagctgaccccagcgacccatttgagtgccagcttgtgcgagataccctgggggacgctgacagtcagcagcatgacgtttctcacttagcacggtgccaggcggacttcctgttcccgtggtctcccgtgatggccggtggactgttcgccgtggatcggaagtggttcgggaactcggcgggtgggctttttctcatggagatcctcagcagccatggaaggagagtctgtttttcccatcatcttgtacaagtccccaggttgagtctcattggcctgctggccccatgcccatccctgaacaatactgcaattggtcacctgcagtcacatgccctgtgactgcaggaagagtatgtctgggctggggatggagatagaggaagtagtgggggacaaaggaccttttaggagccaggtggaagagcaagcccttctagagcccctgaactaatcaagatgtgaagcccaatccccacgacctcatcgagcagttccaacgaaaagagcacttttgcacagaatctgcatggctggggtgtcctcaaaatggcagctggctcctccaaagccagcggtcccacagagaaaggtggaaccacggcatctttatgaccgtcatttctgcagtatcctgtgggttacacggtgtggtgtgtgggggccgcatggaggacatcccctgctccaggaaccttaagcgggtggccgagtgtggatggatgagtacgcagagtacatttaccagcgccggcctgaaaccgccacctctccgctggggatgtcgcagtccagaaaaagctccgcagctcccttaactgcaagagtttcaagtggtttatgacgaagatagcctgggacctgcccaaattctacccacccgtggagcccccggctgcagcttggggggagcagaaagatatgcctctttcccagtataccagtaaaggtgcaggaatcaagtcttatcttggatcctgcacccatcactggggccatcggggaagacaaaagcaaggaaatattctcattgcacaccagtgattctcaaccctcattatacgtgagaattgctttggagatcttagaaaatactgagatccagataaacgctggcacaaaatccttcaggatatgccttgaagattcagacgtcctgcagggaaagacacaccaaattgatacagttgtcatcccaaacccttcccatgaagaaattgtggagcacgctgagccttggctctacagcgtgcaagacagacagagtgtgtgcgatacatttcaaggggcattctacatctatcatgtggatgtcataattcagtacgatgcaaaacagtaccacaacgacttgacagtctggctggggcaatga

SEQ ID NO: 122291 - DNA, 1603 bp, Homo sapiens
ctaaaagctggacagacagaaattaatcaggctattttcaaaacagccaccatcgggcagcgtcgctcggacggtccgggcgctaacgttaatctgaggaaatttggctgacactcgccctgaacgtcgctttacgcgcattgatcgtctcccccctacgtttttaacatcaccgctgaactgaaaatgggtcgcgccatttccgctggtatcaggatcgctacgacgttgaaatcgacccggaatcagaaccatcgtcactattggttcgaaagagggcctggcgcatctgatgctggcacgctggatcatggtgacacggtgctggtgccgaatccaagttacccgaccatatttatggcgcggtgattgccggggcgcaggtacgctcagtgccgtggtggaaggtgtcgatttcttcaacgaactggagcgagccattcgtgaagtattccgaaacgcagatgtagtctcccgggttccggtaaacccacggcatggtgggactgggttttcccaaaatttggggtgcggaaactcaattggtgtgccaacagttaacgcattctcataggagaagacccgaaagcctggtcgcacagctgatggaaaaagtgatgaaggaaaaaagtcgctggagcagggcgcaatgcagccgagcttcaaatcggtgaccggaaaggcggcatcaaagtgattgatggcagtagcgtcaagtttggtcgttcgacggcgcagagccgcattgcgtgggcttgactgatcttgtgaccggaacgacggcagcagcatggccgccggttttatgcagtgggagaacgcattttcccgtggaccctgaactacgacgaaatcgacatggtgctggaagggggctgcatgttcgccacgaaggccaaaccatgatcgccaaagcaggcgactgatgtttatcccgaaaggctccagcatcgaatttggtacgacatccaggtgaaattcctgtatgtcgcctggccggctaactggcaatccttctccaattattacattggaatgactcttaactgtaacataaacaggctcatttttacctgctgttatgctattttccagttttattactagagtaccacttttccatgaaccataatgaaaattactggccgagcaggagacgccatcatgggagctgacatctgccacacaaggaccgaaaggttcggcgcaaggagcccaagagccaggatatctacctgaggctgttggtcaagttatacaggtttctggccagaagaaccaactccacattcaaccaggttgtgttgaagaggttgtttatgagtcgcaccaaccggccgcctctgtccctttcccagatgatccagaagagtgaagcttcctggccgggaaaacaagacggccgtggttgtggggaccataactgatgatgtgcgggttcaggaggtacccaaactgaaggtatgtgcactgcgcgtgaccagccgggcccgcagcctgatactcagggcagggggcaagatcctcactttcgaccagctggccctggactcccctaagggctgaggcactgtcctgctctccggtcctcgcaagggccgag

SEQ ID NO: 122292 - DNA, 781 bp, Homo sapiens
atgaaactcatggaaacacttaaccagtgcataaacgctggtcatgaaatgacgaaggctatcgccattgcacagtttaatgatgacagcccggaagcgaggaaaataacccggcgctggagaataggtgaagcagcggatttagttggggtttcttctcaggctatcagagatgccgagaaagcagggcgactaccgcacccggatatggaaattcgaggacgggttgagcaacgtgttggttatacaattgaacaaattaatcatatgcgtgatgtgtttggtacgcgattgcgacgtgctgaagacgtatttccaccggtgatcggggttgctgcccataaaggtggcgtttacaaaacctcagtttctgttcatcttgctcaggatctggctctgaaggggctacgtgttttgctcgtggaagaggggaggctccttgaagccttcaccaaaggcaaagctagcaccctgcttcttgggacgctattttcgggacttgacagctctgctgggcagggggcaagatcctcacttttcgaccagctggccgtggactcccgcaagggctgcatcaccgtcctgctctccggtcctctcaagggccgaaaggtgtacgggcattttggcaaggccccgggaaccccgcacagccacacgcaaaccctacgtccactccaagggccggaagttcgagcgcgccagaggctgacgggccagctgaggctacaaaaactaaccctggatcctactctcttattaaaaagatttttgctgacaa

SEQ ID NO: 122293 - DNA, 363 bp, Homo sapiens
atgctcgggttcgctctcctgccggcccccccaggccctggccttgttgcagcggctagtcgccagatgaccaggcgaagaactggaccggccctcgctccttcctgcctgagccgaccgtcccccgcaaccctcaattcggccgggtccgaaattcacgatcgccctcgaagtggcgcacccccgacgccctgcctccggggctcagcgcaggcaagcacttcagcctgctccccgggggctaatggacctgagcccaagccaggacttggcacgctacggcagcagctggagcacatcatggccaccaaccggctggatgaggcgggctgggtcgcctgctacccgactgatgtccgttga

SEQ ID NO: 122294 - DNA, 715 bp, Homo sapiens
gcatgtccttccgtcagctcttccaggacctgaagcgctacgtgcaggacgccgatgtgcgctgggagtactgcgtgcgcgccaagcgcggccagaccgacacctcgcttggcaggttgtttcagcaaggaccaggtgtacctggacggcatcgtgcgcattctgcgacatcgccagaccatcgatttcccgttgctgacctcactgggcaaggtgtcctatgaggatgtggaccacctgcggccccatggggtgctggataatacccgggtgccccacttcatgcaggacttggcacgctaccggcagcagctggagcacatcatggccaccaaccggctggatgaggcggagctgggtcgcctgctacccgactgatgtccgttgagggctgcagtcagaggccctggacagaagctccagataggcccctagaacatgaagcagtttgctctgtgcgtccacggcctaggtgtttcttggggggtgttgggagggcaggagcattccttgaggaggagtggcaacatcaaagtgtttgtgtcccttgccagcctccctggggtctggggacctgcagcagcatgtctggcaaactgagtcgccctcctgcctccagctctctgttgagcagagggaaggcatgggggcaggaagagagctgagcattgatggggatgggggtggtttgggaatagaaacttgttcttgcatg

SEQ ID NO: 122295 - DNA, 508 bp, Homo sapiens
gagaactagtctcgagttttttttttttttttttttttgagatgggagtttcactcttgttgcccaggcttggagtgcaatggcgccatctcggctaactgcaacctccggcctcctgggttcaagtgattctcctacctcagcctcctgagtagctgggattataggcatgcactgtcacacctggctaattttgttgtttatgttttgttttgtttttatgagacgaagtctcgctctgtcaccaaggctggagtgcagtggtgcgatctcggttccctgcaagctccgcctcccgggttcacgccattttcctgcttcagcctcctgagtagctgggattacaggcacctgccaccacacctggttaattttttgtattgttagtagagatggggtttcactatgttggtcagggtggtctcgaactcctgattacaagtgattcacctgccttggcctcccgagccttagcccttttgattccctgacatcaaatgctgtcgac

SEQ ID NO: 122296 - DNA, 424 bp, Homo sapiens
  misc_feature (1)...(424): n = a,t,c or g
gtcagtcttcagccagtaagccaagaaggagtcagtcagagaaccttgggccagagttccaggagctctgggagtggctgccaggtgagttgaacagtccgattttcagtggggtcccacacagatgggacgcggcttaggaggaatcccgggctgcgggcgttccttggcccagtggccagatttccggcatgtgtagcaagttccggatttgaaattggtgagatgtttcttgggctggttggtctgaggacctgaggtcgtaggtggatctttctcacggagcaaagagcaggaggacaggggattgatctcccaagggaggtcccccgatccgagtcacggcaccaaannnnnnnnnnnnnnnnnnnnnnnnnnnnnnnnnnnnnnnnnnnnnnnnnnncgaggtntnnnnngaattcct

SEQ ID NO: 122297 - DNA, 423 bp, Homo sapiens; identical to SEQ ID NO: 114702

SEQ ID NO: 122298 - DNA, 522 bp, Homo sapiens; identical to SEQ ID NO: 120916

SEQ ID NO: 122299 - DNA, 516 bp, Homo sapiens
ctaagccgagaaggagtcggtcagaaagccttgggccagagttccaggggctctgggagtgtctgccaggtgagttgaacagtccgatttccagtggggtcccgcaaagatgggacacggcttaggaggaatcctgggctgcaggcattccttggcctggtggtcagatagatttctggcacttgtagcaagctccctgtccccggaaaagcagggaaggggtagagacaaggagagaaggggttggggtacttgccccttccccagaaaagcgggacttgccgctaagggtgaaggactgaggcaggcgtccctgcgtggtctgacacccttgaaacgtgggtgtataatcagagaggtgtccctgcaatgattaaacaccaagagaaggctgccttcccagtccgtgaccggtgccggagttttgggtccacagataaaacgtgtctcttttgtctcggatttgaaattggtgagatgtttcttgggctggtcggtctgaggacctgaggtcat

SEQ ID NO: 122300 - DNA, 471 bp, Homo sapiens
ctaagcccaaaaggagtcagtcagagagccttgggccagagttccaggggctctgggagtggctgccaggtgagctgaacagtccgatttccagtggggtcccgcacagatgggacacggcttaggaggaatcctgggctgcaggcattccttggcctggtggtcagatttctggcacttgtagcaagctccattcctgatttttgtaaaaactgtgttatagttctttggagacttctgtgagcccttcagagccattaaatgattgagagccacatataagggtggggagaaatgtggaacacatttttcaacatgattttggctccaggtggatttgaagaagcatggttttgtcatttgtaaagcttccattgcttggtccctacatcctcttatgaccctgagcttctcttgggcacactgagtcttgggcaggtcaatggtcagaaacagcctctggctgctcat

SEQ ID NO: 122301 - DNA, 990 bp, Homo sapiens
atggacttaccttccactgtgagagttacccaaagctcggtgtccgtggtggtctacggggcttctgaggcgatcgggcagtgtcagttttcagacgctaagcccagaaggagtcagtcagagagccttgggccagagttccaggggctctgggagtggctgccagcaaacagtcttgatgatttgactatactatctttatacctcccgctcactctgcaagactgcagtgtagcttttgagacctctcaacaggaagcccaggccagcctcatgggtgtgggaccaagaggctcagtgagactgtttgggaatacggaaaagaagttgaagattgaaattaactgcccctgccaggttgaaggggccttgctcaggctatttgagaagaacaggaagcaaagcaaaaaggagtatttcagttcctcctccagccttgcagtcccctctctagtacctttatggtggcagaacctaacaggaagcctccttgtcaaaggatcagtggaatttgactttgagtttatgggagtaaacaatttatcttcatgcacagaccacaagataagctgtgatgcatcagattctctttggtctatggcctggacagccacagcagacacttttgtggatgctgccaggtctctgccctttgtttcagagcccctagtctccagctcaataatgcaagaaatacaaactaccatcagagaatactataaacacctccacgcaaataaactagaaaatctagaagaaatggatacattcctggacacatacaccctcccaagactaaaccaggaagaagttgaatctctgaatagaacaataacaggctctgaaattgtggcaataatcaatagcttaccaaccaaaaagagtccaggaccagatggattcacagccgaattctaccagaggtgggaactgaacaatgagaacacatggacacaggaagggaacatcacactccgaggactgttgtga

SEQ ID NO: 122302 - DNA, 1764 bp, Homo sapiens; identical to SEQ ID NO: 115471

SEQ ID NO: 122303 - DNA, 885 bp, Homo sapiens
tttcgtttttaagaggtttagaagcctggccgtcaatacctacaacagttatggaggcaagggaaacaggcccttgaaaagaaggtaatgtggagtgggtagcctccgtattgattaagaaggggacggacttaccctccaccgtgagagttacctaaagctcggcatccgtgatggtctacggggcttctgaggcgatcaggcagcatcagtcttcagccggtaagtcaagaaggagtcagtcagagagccttcggccagagttccaggggctctgggagtggctgccaggtgagttgaacagtctgatttccagtggggtcccgcacagatgggacatggcttaggaggaatcctgggctgcaggcattccttggcctggtggtcagatttctggcacttgtagcaagctcctgggggaggaggttctggtggaatgccgggctgctgcggttcaggcgtttggaagttcttatgtgcctccagaaaagcgggaaaggggtcagggcacagagatacgaggtcggggtgcggacataagggattggggcgcagagatatgaggttggggtgcggaaataagggatcggggcacagagatataaggggttggggtacttgccccttccccagaaaagcgggacttgccgctaagggtgaaggaccaaggcaggcgtccctgcgtggtctgacacccgatttaaaattggtgagatgttccttgggctggttggtctgaggacctgaggtcataggtggatctttctcatggagcaaagaacaggaggacaggggattgatctcccaagggaggtcccccgatcttagggcgccccttgagggcctgcagtgctgcagctgtccacttttaggtggtgcccgcat

SEQ ID NO: 122304 - DNA, 750 bp, Homo sapiens
  misc_feature (1)...(750): n = a,t,c or g
agtgcggtggaattcgaagaaggaagannnnnnnnnnnnnnnnnnnnnnnnnnnnnnnnnnnnnnnnnnnngcttctgaggtgatcgggcagcatcagtcttcagccgctaagccgagaaggagtcagtcagagagccttgggccagagttccaggggctctgggagtggctgccaggtgagttgaacagtccaatttccagtggggtcccgcacagatgggacacggcttaggaggaatcctgggctgcaggcattccttggcctggtggtcagatttctggtacttgtagcaagctcctgtgggaggaggttctggaggaacgcctggccgctgcggttcaggcgtttggaagttcttgtgtgctggagatgtggctggggtttgtctcacagtggaggccaggaattgcaacttttttctattattgtacaccttgaaggcgaggttaattaaatcttgcccctgccccaggaaagcaggacttgctgctaagggtgaaggaccaaggcaggcctccctgcaatgattaaacaccaagggaaggctgccttcccagtccgtgaccagcgccggagttttgggtccacggataaaacgtgtctcctttgtctctttgctccggttcccaacaagttcctcatctccatctgagaccacttcagcctggaccttattgtccatatcactatcgggcttttgatcaaagtcattcaacaagtatctattgagttccaaactttcccacat

SEQ ID NO: 122305 - DNA, 555 bp, Homo sapiens; identical to SEQ ID NO: 114711

SEQ ID NO: 122306 - DNA, 1236 bp, Homo sapiens
ctaagccaagaaggagtcagtcagagagccttgggccagagttccaggggttctgggagcggctgccaggtgagttgaacagtccgatttccagtggggtcccgcacagatgggacacagcttaggaggaatcctgggctgtgggcattccttggcctggtggtcagatttccggcacttgtagtaagctcttgccccttccccagaaaagcgggacttgccgctaagggtgaaggagaaggggttgaggggtacttgcccctcccccagaatagcgggacttgccgctttgaaacgtggttgaataatcagggaggcatccctgcaaggattaaacaccaagggaaggctgccttcccagtccgtgaccagcgccggagttttgggtccacagataaaacgtgtctcctttgtctctccacttggcaacgtaggtgtataaatgtgttggacggttaagtgatgatttgggatgttggcaaagcctgttaaatgagactctagttcactctcctctccattaatcaaaaatagaaatgctttcctgcttgccaccactaccacaaccaccaccaccaccactatcatcaccaccatcaacaccatcatcattatcatcatcaccaccatcaccgtatcaccatcatcatcatcaccatcatctttaccatcatcaccaccatcatcatcaacatcatcatcaacattatcatcaccaacatcaccattgtcattttcatgcgtgtccgtgtgaagagaccaccaaacaggctttgtgtgagcaacatggctgtttatttcacctgggtgcagaaaaagaaatcatctttggcattttcttcagttgtcacatcagatcttaaaagcaagaagagaagactttcagggaagagcctggagaccagctcggcgtccctgatggtctacggggcttccgaggcgaccgggcagcgtcagtcttcagccgctaagccgagaaggagtcagtcagagagtcttgggccagagttccaggggctccgggagtggctgccagaatccaagcctcaatcattatttaaggagccagagaggagcattaagaaaacatttcaaagatctttgaaggcttctgaggaccgatcagagattgaccttcagcatcacccagacagaggaactcttgctgccagtgtagtcttggtaactgaatcattacagaaaacatactccataacagatggagatgtttcctaa

SEQ ID NO: 122307 - DNA, 1401 bp, Homo sapiens; identical to SEQ ID NO: 114709

SEQ ID NO: 122308 - DNA, 1152 bp, Homo sapiens
atgtcaggagccaagggattcacaggaggcattccaggggcaggagggggtgtgaaagagggtggggaaccaagggttggcatcctggatactgtggctgtggcacaggatgaggggctccacttgggggaaaagttggattgccctgcagagctcctcagggaggaggaaaggggcctggggaaagggtggattgataggtgtgggttcttggtctcgctgacttcaagaatgaagccgcggaccctcgctgtgagtgttacagttcttaaagatggtgtgtctggagtttgttccttcagatgtccagatgtgtccagagcttcttccttccggtgggttcatggtcttgctgactttaggagtgaagccgcagaccttcacaagtcaaggttttccggcttgggtagccaggtgtcacggcccagtgtccacctgcagctgctttctgtgtcagtcctctgcaccgccaaggtcatagaggtggttgagacaaaagagacatgttttatccgtgaacccaaaactccggcaccggtcatggactgggaaggcagccttcccttggtgtttaatcattgcagggacgcctctctgatgatacactcacgtttcaagggtgtcagaccacgcagggacgcctgccttggtccttcacccttagcggcaagtcccgctttcctggggcaggggcaagtacccctcaaccccttctcctttacccttagcgcacataagaacttccaaacacctgaaccgcagcagccaggtgttcctccagaacctcctcccccaggagcttgctacaagtgcccgaaatctgaccaccaggccgaggaatgcctgcagcccaggattcctcccaagccgtgtcccatctgtgcgggaccccactggaaatcggactgttcaactcacctggcagccactcccagagcccctggaactctggcccaaggctctctgactgactccttctcggcttagcggctgaagactgatgctgcccgatcgcctcggaagccccgtagaccatcacggacgccgagcttccggtaactctcacagtggaaggtaagcccgtccccttcttaatcaatacggaggctacccgctccacattaccttcttttcaagggcctgtctcgtgcc

SEQ ID NO: 122309 - DNA, 1812 bp, Homo sapiens; identical to SEQ ID NO: 114708

SEQ ID NO: 122310 - DNA, 1038 bp, Homo sapiens; identical to SEQ ID NO: 120543

SEQ ID NO: 122311 - DNA, 664 bp, Homo sapiens
atccttaattaaattaatcccccccccccgccctttcggccggaaccgccatcttccagtaattcgccaaaatgaacgaacacaaaggggaaagaggagaggcaacccgatatatgttctctaggcccttttagaaaaacatggagttgttccttgtggccacatatttatgcgaaatctataagcaaaggtgtgattttgtagacatccaaggggaatggggtacctgttcaaaaaagggaatgccccccacaagtgttacccatggccaaaactggaaggagtcttacaattgttaccccagcatgcttgttgccattgtttaacacaacacagtttaggcgcaagattcttgccaaagagaattaatgttgcgtattgagcacatttaagcactcctaagagcccgagattagcttccctgaaaccgtgtgaaggaaaatgatcaggaaaaagaaagaagcccaaagaggaaaggtacctggggttccacttaaagccgccagcctggctccacccagaggaagcacactttttggaggaacccaatggggaaggagccttgagctgctgggaaccttttccctattggatttccttgggcttattaggtgttaaaaaaaaaaataaaaaggacctctgggctacaaaaaaaaaaaaaaaa

SEQ ID NO: 122312 - DNA, 1343 bp, Homo sapiens
atgagcgaaagcttcctgaagcccttgccagaagtagatgctggtgccatccttcttgtacagcctgcagaactgtacagcaaggccagcagactagatgactgttatcaaaaagatagttatactcacagatgccaagagaagcggacatgccacaccacagggggccactcggggaagcaccagagtctgtcaggagcttctgtatcgccaacgtgttctgcgaaaactcgggacaagattaactgcttcgatttcagccctaaaagcgaggtgatcaccttgagcagcaacgacgactccatcgtgctctctgactgccaggagggcaaaccaaaaccctgttcagggccatttgctacctttaagatgcagtatgatcgaacttgtgagtggacagcacttaaaatcagcaacggtggcaagctcatcctcatttccaccaatgtcagcttcattcgtctcattggtgcattcaaaggagtggtgatacacacatttggcagttatgccaacagcgaagctgtcacactggaggcttcatttactgcagactctcagtttgttatgattggttcagaggatggcaagatccatgtctggaatgaagagagtggtataaaagtagctgggttggatggtaaacacacaggcccaattacctgtttgcaattcaaccccaagttccatgacttttgccagtgcgtgttccaacatggccttttggttgcccaccattgatgactgaccctgttgctgcttggctatttctgtatagtgagggcggccagaaggaagaaactcagagggaactgagatcctagtgggattggatcatttgacctgggctggagaaccatccttttacatggccttccccatggatgtgcttgtacatctgcatcaaaaagaaaataattactcttgaatgagccgtcttcaaaacggactcttggtgcaacagacatcaattggcactccagcgttttctaactgtcacatgcaccaagctctgctggaggagtgaccagactcacgatttggtatagtggggctctcaagcatcttcaatttgaatgtacatgctgctgaggagccggtgaagtccatcagttccgcacatcccttctaccctccaactgcatgggaagccaaagtcctggttttgaaatgcttgggcagctcagccgcttgccctcaccctgcatgtcttgttactgggtctccctgtgtacttgtggcattatccacaaccatcatgtttcttaggtgccaaacatttacagaaacattttcatatatcttgggggcagagaaagggaccgatacagaaggaccttgct

SEQ ID NO: 122313 - DNA, 544 bp, Homo sapiens
ggaggtgtggggacccgggcttgcgtcggagggggcggtgggctcacccatgggcctttccaaaagcaaagagaaacccaggaaaggtgaggagcaaaagaagggatccacctattcagttccaaaatctaaggagaagttgatggagaagcattcccaggaagccaggcaggcagacagggagtcggagaagcctgtggacagcctccacccgggggccgggacagccaagcacccgccgccggcagcttcgctggaaggtaggagacggcgggagggagcgaagcgaggtcagtggcttggaggatctggggctggggtgaggagcctactgtaagaccctaccggatggacactagtagcaggcacgcgccgtaaagatgaaactggtttgttttgggaactttatgtaggaggtaaatatccagaaatcttagttgaaaacataagtttaatgaaaatgtaggtcagttcccgagtgataagtgcgtaccaggtggtcgaggggctggggcagtgtgcgtgtgtctcacctgaggttctc

SEQ ID NO: 122314 - DNA, 933 bp, Homo sapiens
gaggtgtggggacccgggcttgcgtcggagggggcggtgggcatcacccatgggccatttccaaaagcaaagagaaacccaggaaaggtgaggagcaaaagaagggatccacctattcagttccaaaatctaaggagaagttgatggagaagcattcccaggaagccaggcaggcagacagggagtcggagaagcctgtggacagcctccacccgggggccgggacagccaagcacccgccgccggcagcttcgctggaagagaaacctgatgtaaaagcaaaagtccagcaggaagaaagtggtcgttccacagatcatcatcacgccgagcgtctgaatgagacgctagtcagtttgcagttccagcgggagtgaccagcagagaaccattcgggagccggaggactggggcccctaccggcggcacaggaaccccaacaaggacagctcgttcgaggacctggagcagttcctgggtacgtctgagcggcaggaccggggccgtggggtacagccggagccccagctgcagcagctgaagaccgcggtggaggagatccacaatgccgtaggctgctggcccaacagggcagcagctgtaggtgaccgtttccagtcccggactccctgccctgggcagcaagacgtgagtgggctccactggtacaaattccatttgaaatttcctcagttgttccatcagctgccaaatttccacactggcaacacccttctgtttcagctgggacgatgccggagtgtgaaggagtttgagaagctgaaccgcattggagagggtacctacggcattgtgtgtgagtggccaaggctaggacatgtggccgcagctcgtggctgtgacagtgtgggacgagactgtcgaagcagcagccgcgttggggctggaagggactcagaccctgtgctctga

SEQ ID NO: 122315 - DNA, 496 bp, Homo sapiens
  misc_feature (1)...(496): n = a,t,c or g
ggggttagnnagggaggggattggagcccctnngnattgtagaccactgtccgtgcggtggaattcaagagcaggtgaaatattttctcagcactcttcctacaaggcgaggtcgagagtcaccttgtgttgaaaatcttactagtataggactcaacagaaaatatattccccaaatgcccgtaagaattcctacttcaaacctcagacttcaaataactgccagaactacttgactgagctgttgctgtattggacacttgctcccatctactttcttctctagaatccacnnnnnnnnnnnnnnnnnnnnnnnnnnnnnnnnnnnnnnnnnnnnnnnnnnnnnnnnnnnnnnnnnnnnnnnnnnnnnnnnnnnnnnnnnnnnnnnnnnnnnnnnnnnnnnnnnnnnnnnnnnnnnnnnnnnnnnnnnnnnnnnnnnnnnnnnnnnnnnnnnnnnnnnnnnnnnnnnnnnnnnnnnnnnnnnnnnnnnnnnnnn

SEQ ID NO: 122316 - DNA, 417 bp, Homo sapiens
cagcaaaatattatcttcgctcaagacatgtgtggacgagatgcagaagattacgctatttctcatcatttgacaaaaattcaacaacaaattttggaacataaaaagaagacacttaaaacggagaaatcagatgttggaagttctgatgaatctgcagtcagcattttccatgaactgcatgtggattcattgcctgcatcggatgacaaagacttgaatattgctactaagtgtgtccccgagaaagtgtcagagcctttacctggaccttcgcatgaaaaaggaaacagaatagtcgatggacaaggagaagggcctcctgcaaaacatccttccttgaagcctagcactgaagtagaagatcctgctgtgaaaggagcagtacaaagaaagaatgtacagacattgagagca

SEQ ID NO: 122317 - DNA, 475 bp, Homo sapiens
cggaattcatacaaggctcaattccgaactgttgaaggaagaagaaagcaacaaaagactggaagctgaaattgaatcatcagtctagactgactgctgctataagtaagcacagtgaaagtgtgaaaacagaaagaaacgtaaaacttgcattagagtgaacacaagatgtttccgtacaagtaaaaatgagttctgatatttccgaagtagaagataagaatgagtttcttactgaacaactttctaaaaagcaaattaaattcaataccttaaaagataagttccgtaagaaaagagatactctcagaaaaaagtcattggctttagaaactctccaaacgacctaagccaaacacagcagcaaataaaggaaatgaaagagatgtatgaaaatgcagaagctaaagtgaataattccactggaaagtggagctgtgtagaagagaggatatgtcaactccaacatgaaaat

SEQ ID NO: 122318 - DNA, 742 bp, Homo sapiens
agattttccgggcacccttccgtatctgcctaggcattttgctgtctcctcctaatacggaacaagcacaatataaaaaacaattagagcagttaaacaaggatataatacagcttcactaaataagaaggaactcacacttaaagatgtggaatgtaaattctacaaaatgaaaactgcttatgaagaggttacaactgagttagaagaatataaggaagcctttgcagcagcattgaaagctaacagttccatgttaaaaaaattaactaaatcgaataagaaaatagcaatgatcagtatcagctctttatggagaaagagcaggtgaaatattttctcagcactcttcgtgcaaggcgaggtcgagagtcaccttgtgatgaaaatcttactagtataggactcaacgaaaatatattccccaaatgcccgtaagaattcctacttcaagcctcagacttcaaataattgccagaactacttgactgaggttagtcatatgaccgtttctctttagggtttcatttctccagcgtaattcttgtttataatctggtgaaatactgagttgttctgttgacttttgcatgtgaagtaaagatcataattagctgtgttaacacagaaaggaaatgcgaactctacattttttaattccttggagctctcattttcaagagatatccatttgctaactttattcaataaatgtgactaaactgaaaaaaaaaaaaaaaaa

SEQ ID NO: 122319 - DNA, 3734 bp, Homo sapiens
atggccatggcctgggcaggaccaggttcagggcaggagcaaaagaagggcaaggacagttcaggttcttggcacagccggagtccaggacagggtcagggtagggccaaggcagggtctgggccatggaactgctgggcccactcgggctgcactcctcggggagcaggagcagcagaaactcagacccagccaaccctctgcacccaggtgccacttcctgttccggatgcctccatgtacaaggacctgtccccagtggtgtctgctactccatactggggggtgccaggcagtctccgtggcacagacccagagtgcatgggcccagtaaccacgtgtgtggcggtgatggagacaggcggctggcagcgagagctgctccttgcctggatacaggaagggaaagaggaggcacctaccacaggctggaggctagagtctgtgggactgcggctggcctcgctggctcgcctcgctgctgtgggtggcagcagcggacactgcagccggccagagcgtagaaaggcgattgggagccacaggggccagacggtcctgggcaccatagaccacctgtacacgggttccgggtaccgaatccggtactcggaactgcagaagatccacaaggcagctgtcaagggcgacgccgcggagatggagcgctgtctggcgcgcaggagcggagacctggacgccctggacaagcagcacagaacagccctcatgcttgctgtgcactatgactcaccaggtattgtcaacatccttcttaagcaaaatattaatgtctttactcaagacatgtatggacaagatgcagaagattacgctatttcttgccgtttgacaaacattttccatgaactgtgtgtggatttattacctgcattggatgacaaagtcttgagtattgctgctaagcagtgtgtccccaagaaagtgtcagagcctttacgtggaccttcccatggaaaaggaaacagaatagtcaatggaaaaggagaaggacctcctgcaaaacatccttccttgaagcctagcactgaaatggaagatcctgctgtgaaaggagcagtacaaagaaagaatgtacagacattgagagcagtgaatttgtcaacagaaaaagccttaccagtggcttcagaggaagagcaacaaaggcgtgaaagaagtgaaaagaagcaaccacaggattttcataatcatgaagaagtgaaagatctgatggatgaaaattgcattttgaagacagatattgctatacccagacaggaaatatgcacaatgaaaaatgacaacctggaaaaagaaaataaatatcttaaggacattaaaattgctaaaggaacaaatgctgcccttgaaaattgtataaaactcaatgaggaaatgataacaaaaacagcattccggtatcaacaagagcttaatgatctcaaagctgagaatacaaggctcaattctgaactgttgaaggaaaaagaaagcaagaaaaaactggaagctgaaattgaatcttatcagtctagactggctgctgctataagtaaacacagtgaaaatgtgaaaacagaaagaaacttaaaacttgctttagagagaacacaagatgtttttgaacaacctgctgggctggaggaagcggagctggtgctgtcccggctctcttgcggggaagcaactgagggggcagcgcggcgggccctggcagccgaagaggctggcaggtggcgccgtggggtgggtgctcctggctggcccccgagagccgtttacatgttttaaagacgtgcggatcctgctggtgggagaacctagagttgggaagacatcactgattatgtctctgggcagtgaagaatttccagaagaggttcctccccgggcagaagaaatcaccattccagctgatgtcaccccagagagagttccaacacacattgtagattactcagaagcagaacagagtgatgaacaacttcatcaagaaatatctcaggctaatgtcatctgtatagtgtatgccgttaacaacaagcattctattgataaggaagtgaggagcacctctgcccggctgccctgtctgggaagtgaggagcgcatctgcccggctgccctgtctgggaaatataagaaactcctggaaatgacaataaatgtgttaagtgtatttggaaatgaagacttcgattgccatggagacttaaaaacagatcaactgaaaatgaatattctgattaagaaactaaaacataagtttgatgatcttacagcagagaaggaagctgtatcttcaaaatgtgtcgatttggctaaagacaatcaagttcttcaacaggagttattatctatgaaaaaagtacaacagcaatgtgaaaaacttgagaaggataaaaagatgttggaagaagaaatattaaatcttaagacacatatggaagacaatatggtagaacttagtaaactacaagaatataaatcggagctagatgaaagggcaatgacggcagtagaaaaattagaagaaatccatttacagttaaacaagggtaatacggcttcactaaataagaaggaactcacacttaaagatgtggaatgtaaattctccaaaatgaaaactacttatgaagaggttacaaccaaattagaagaatacaaggaagcctttgcagtagcattgaaagctaacaattccatgtcaaaaaaaattaacgaaatctaataagaaaatagcaatgatcagcaccaagctccttatggagaaagagtgggtgaaatattttctcagcactcttcctacaaggcgaggtcaagagtcaccttgtgttgaaaatcttactagtatagtactcaacagtaaatatattcccaaaatgaccggaagaattcctacttcaaacccttaaaccttaaataactggcagaactacttgactgaggaagacatggtcagtggggacttgatcagtgggacctggtcaatggaggagtggtcattaggggcctcatcactgggaacctggtcagcggcggttggtcagtacctggcccgctggccactgtgtgacctcagtgtcactgttgctgagtccccatcgcctctgtgttgtggagcagttagagacacacagcagtgtcgtgagtggctctgtgtgaaggaccgttttctagatgagaggcacatctcaacacagctcactgatcagactcagggcttctacagcactgtgggcttcttggatgccaagaggcagaccacaggccatcttgagaaggacttggtcctgcctgggctgattggcaaagagctcactgacagtgtggaaggcatctatggtgaagtggggtctatgttcaagtgcagaaagggcccaatctggtggatgaaccacacggccagcttctggatgcaggcacagtgccacattttttgtcacttcctgatgcgccccaccagcactgaagagacagcctggagacagggcaagaggaaggctgagaaggatgagttgtccaggcaggacctggacccagccatggacctgttagtgctgtctcagggacaccagaccaacatcctggacatcatccacatacacaaggaagctcttactaaagtcacggagagcaaacaacaagtggcagaagggaatataaaggtgcagaggctgatgatgtcagaatcacaggaacaggatttctttggccactttggctga

SEQ ID NO: 122320 - DNA, 394 bp, Homo sapiens
cttaaagcatttggccatccagtgtcattggtctcagaggccaccagttattggagatgtccttcaaggctacagtgggtctgaagggagggctattattttctgtgagaccaagaagaatgtaactgaaatggccatgaatccacacataaaacaggtaagactttttttcatgctttctctaattgaaattatggggatgaatcactgaacgaaaattatattgtcctttgtggaccagatttgatagtcattctcaaaactgagttgtaaggctgggcatggtggcccacacctgtaatcctgtgacctgataagtcaggatagaattttatcagttttgtttgtttgtcttgagacagggtctccctcttatgcccaggctggagtgcag

SEQ ID NO: 122321 - DNA, 1434 bp, Homo sapiens
atgactcaaaaggctgcagcttctgtggaacatttggccatccggtgtcattggtctcagaggccagcagttactggagatgtccttcaagtctacagtgggtctgaagggacggctattattttctgtgagacccagaggagtgtaactgaaatagccatgaatccacacataaaacagaatgcccagtgtttacatggggacattgcacagtcacaaagagaatttacactaaaagacttcagagaaggtagttttaaagttttggtggcaaccaacgtggctgcctgtggtttggacattcctgaagttgacctggtgattcatggttctcctcctcaggatgttgagtctatatccatcgttctggacgcacagggatttgtgaccatgactctggaaagcctagaggaaatacaggatgtcagctgtgcttggaaagaacttaacagaaagctgagtagtaatgcagtgtctcagattaccagaatgtgcctcctgaaaggaaatgtgcgtgtttgctttgatgttcctacaactaagtcagaaaggttacaggcagagtggcatgattccgactggatattctcagtgccagccaaattacctgaaattgaagaatattatgatagaaacacatcttctaattccagacagaggagtggttggtcaagtggccagtcgggccgatcaggtggtcgatctggcagccgtaattattttgccgtagacactgcctctgctatagctattgccttgatgacatttggcactatgtatcccatgagtgtgtacagtgggaaagtcttactccagacaacaccaccccatgttattggtcagttggacaaactcatcagagaggtatctaccttagatggagttttagaagtccgaaatgaacatttttggaccctaggttttggctcattggctggatcagtgcatgtaagaattcgacgagatgccaatgaacaaatggttcttgctcatgtgaccaacaggctgtacactctagtgtctactctaactgttcaaattttcaaggatgactggattaggcctgccttattgtctgggcctgttgcagccaatgtcctaaacttttcagatcatcacgtaatcccaatgcctcttttaaagggtactgatgatttgaacccagttacatcaactccagctaaacctagtagtccacctccagaattttcatttaacactcctgggaaaaatgtgaacccagttattcttctaaacacacaaacaaggccttatggttttggtctcaatcatggacacacaccttacagcagcatgcttaatcaaggacttggagttccaggaattggagcaactcaaggattgaggactggttttacaaatataccaagtagatatggaactaataatagaattggacaaccaagaccatga

SEQ ID NO: 122322 - DNA, 1835 bp, Homo sapiens
ccgctcaccaaaggtacttgttttggctccaacacgggaactggcaaaccacgtatccagagacttcaaagatataatctaggaaactcagcgtggcgtgtttttatggtggaacatcatatcaaagccaaattaatcatattcgaaatggtattgacatcttggttggaacacctggtcgtatcaaagaccatctgcagagtggccgattggatctttctaaactgcgacatgttgtgcttgatgaagtggatcagatgttagatttaggtttcgctgaacaagttgaagatattattcatgaatcctacaaaactgattctgaagacaatcctcagactttacttttttctgcaacttgcccacagtcggtatacacagttgcaaaaaaatacatgagatccagatatgaacaggttgacctcgttggaaaaatgactcaaaaggctgcaactactgtcgaacatatggccatccagtgtcattggtctcagaggccagcagttattggagatgtcctcaaggtctacagtgggtcttaagggagggctattattttctgtgagaccaagaagaatgtaactgaaatggccatgaatccacacataaaacagaatgcccagtgtttacatggggacattgcacagtcacaaagagaaattacactaaaaggcttcagagaaggtagttttaaagttttggtggcaaccaatgtggctgcccgtggtttggacattcctgaagttgacctggtgattcaaagttctcctcctcaggatgttgagtcctatatccatcgctctggacgcacaggtagagctggacggacagggatttgtatatgtttttatcaaccaagagaaagaggtcaactaagacatgtggaacaaaaaacacaaattacttttaaatgtgtaggtgttccttctacaatggatttagttaaatttaaaagcatggatgccataaggtctctggcttccatttattatgcagctgttgatttttttccaaccatcagctcagagactgatagaagagaaaggtgcagtggatgcattggctgcagctttagcccacatttctggtgcatcaagctttgaaccacgatctttgatcacctctgataaggggtttgtgaccatgactctggaaagcctagaggaaatacaggatgtcagctgtgcttggaaagaacttaacagaaagctgagtagtaatgcagtgtctcagattaccagaatgtgcctcctgaaagggaatatgggtgtttgccttggatgttccctaccaactgagtccagaaaggtttaccagccagagtgccatgattcccgactggatactctccagtgcccagcccaaattccctgaaattgaagaaatattatgatggaaacacatcttctaattcccagaccagaggagtggctggtccaattggtcgaatcaggcccgtccaggccgttcagttggtcgaatctggcggccggtcaggtagaccagagtcgacaaggaagtcgctcaggaagtcgacaagatggtagaagacgaagtggggaatagacatcgtccaagaagttggggggccacaaacggagtttttgactgagtatttgatagttaatctaccagtgtgagcttgcctatttctgcctaatcatgtacattatccaccaaaaattaggtcatcatagttgaggtatgtgtctgctatttgcaaagaagttggtcgtatttttttaaaaagtatttcacaagaatggaacaaatctacttatccagttatccctttgaataaaaaacaaatcattttattgtctcttttcaaaaaa

SEQ ID NO: 122323 - DNA, 621 bp, Homo sapiens
atggccaccaaaagcttggagatgccagaaaccacagaggccaaagagattttacagccctggcttgtgaagacccttggtctgggcttcccagagggccacctattttctcaccttcttgttacctgcaacatggttataatggcacccagccgcagccacaattttcctccaaaatcagagcagacaccaggagtggagaaatgccagacagtgggagcaggccctactgaacctgcaggaaaaaagaggaaaccctcatccctcaagagtacctggattcctggatctggatctgtggctggacagctgcagctgtgcccaggagcatgggacttccacccctctaacttggtaaaagaaatacaaactaccatcagagaatactacaaacacctctatgcaaataaactagaaaatctagaagaaatggataaattccttgacacatacactctcccaagactaaaccaggaagaagttgaatctctgaatagactaataacaggatctgaaattgtggctataatcaatagcttacaaccaaaaagagtccaggaccagacggattcacagccgaattcttccagaggtacaaggagctggtaccattccttctga

SEQ ID NO: 122324 - DNA, 918 bp, Homo sapiens
ttatttcactccatctttggctaccttccctttgctcgtcagactctcctcccaggctctattcttgtttttacttatacccagccccccaaaattcaatttgcaaatgggaccaaagggctccctgatcccctcatgacaccaaaatgacaaaaatgctccactaatgcccttgctggtcagtttaggactttctgcctccactattgctctcggtactagaatagcaggcatttcaacctctgtcactaccttctgtagcctgtctaatgacttctctgcaagcttctccccatatttacatcgttgtttccttccttggtcctccttgtgatctgggaggaaaactagtgtttctgctgctgtgttggtgagcacaaatatttcaatcagcagggtccagggaccattgtgggttcttgggcaggggttgtgtctgctgctgcatccgagccagcagcggcaacatgcttgggtctccttccacactgtagaggcttgttctttcactctttgcaataaatcttgctgttgctcactctttgggtctgtgtcacctttatgaactgtaacactaaccacaaaggtctgcagcttcactccttttaccaagttagaggggtggaagtcccatgctcctgggcacagctgcagctgtccagccacagatccagatccaggaatccaggtactcttgagggatgagggtttccctcttttttcctgcaggttcagtagggcctgctcccactgtctggcatttctccactcctggtgtctgctcatgttgcaggtaacaagaaggtgagaaaataggtggccctctgggaagcccagaccaagggtcttcacaagccagggctgtaaaatctctttggcctctgtggtttctggcatctccaagcttttggtggccat

SEQ ID NO: 122325 - DNA, 2922 bp, Homo sapiens
  misc_feature (1)...(2922): n = a,t,c or g
gtacatcttccaaggtctcggaggatcttagacgaattttacaatgtgaagttctgcatagatgccagtcaaccagatgttggaagctggctcaagtacattagattcgctggctgttatgatcagcacaaccttgttgcatgccagataaatgatcagactgtgaccctgaagacaaatatgggatactttttctttggagaaactaagggtacagcaacatcgtcgcctcattctgaactggaaagtacaggtgcgattctggatgacaaagaagatgcttacttcacagaaattcgaaatttcattgggaacagcaaccatggcagccaatctcccaggaatgtggaggagagaatgaatggcagtcattttaaagatgaaaaggctttggtgaccagtcaaaattcagacttgctggatgatgaagaagttgaagatgaggtgttgttagatgaggaggatgaagacaatgatattactggaaaaacaggaaaggaaccagtgacaagtaatttacatgaaggaaaccctgaggatgactatgaagaaaccnangcatatgctatgatgctgtcactgtctgacaaggagtccctccattctacatcccacagttcttccaacgtgtggcacacattttcaatggttgaagaggactttcagcaaaaactcgaaagcgagaatgatctccaagagatacacacgatccaggagtgtaaggaatgtgaccaagtttttcctgatttgcaaagcctggagaaacacatgctgtcacatactgaagagagggaatacaagtgtgatcagtgtcccaaggcatttaactggaagtccaatttaattcgccaccagatgtcacatgacagtggaaagcactatgaatgtgaaaactgtgccaaggttttcacggaccctagcaaccttcagcggcacattcgctctcagcatgtcggtgcccgggcccatgcatgcccggagtgtggcaaaacgtttgccacttcgtcgggcctcaaacaacacaagcacatccacagcaagattattatagaagacaagatgccaaacgcttcatggtcttgtgcttttacctttcagatgtcagctattgaaaacatggcagaaaagctagagagcttcagtgccctgaaacctgaggccagtgagctcttacagtcagtgccctctatgttcaacttcagggcgcctcccaatgccctgccagagaaccttctgcggaagggaaaggagcgctatacctgcaggctcgagatagaagaaaggatgaaattttggttgcggcaagcttctctgagcagacgacattcatgtagagacctcattgttggaaagaagtcctccatgaacgatctggatgaaagtgtagcagatgcaaatactgtgacagatcatttagcatatcttctaacttgcaaaggcatgttcgctacatccacaataaagagaagccatttaagtgtcacttatgtgataggtgttttggtacaacaaaccaatttagacagacacctaaagaaacatgagaatgggaacatgtccggtgaggtctgccataaatcctatactcagttttcaaacctttgccgtcataagcgcatgcatgctgattgcagaacccaaatcaagtgcaaagactgtggacaaatgttcagcactacgtcttccttaaataaacacaggaggttttgtgagggcaagaaccattttgcggcaggtggattttttggccaaggcatttcacttcctggaaccccagctatggataaaacgtccatggttaatatgagtcatgccaacccgggccttgctgactattttggcgccaataggcatcctgctggtcttacctttccaacagctcctggattttcttttagcttccctggtctgtttccttccggcttgtaccacaggcctcctttgatacctgctagttctcctgttaaaggactatcaagtactgaacagacaaacaaaagtcaaagtcccctcatgacacatcctcagatactgccagctacacaggatattttgaaggcactatctaaacacccatctgtaggggacaataagccagtggagctccagcccgagaggtcctctgaagagaggccctttgagaaaatcagtgaccagtcagagagtagtgaccttgatgatgtcagtacaccaagtggcagtgacctggaaacaacctcgggctctgatctggaaagtgacattgaaagtgataaagagaaatttaaagaaaatggtaaaatgttcaaagacaaagtaagccctcttcagaatctggcttcaataaataataagaaagaatacagcaatcattccattttctcaccatctttagaggagcagactgcggtgtcaggagctgtgaatgattctataaaggctattgcttctattgctgaaaaatactttggttcaacaggactggtggggctgcaagacaaaaaagttggagctttaccttacccttccatgtttcccctcccattttttccagcattctctcaatcaatgtacccatttcctgatagagacttgagatcgttacctttgaaaatggaaccccaatcaccaggtgaagtaaagaaactgcagaagggcagctctgagtccccctttgatctcaccactaagcgaaaggatgagaagcccttgactccagtcccctccaagcctccagtgacacctgccacaagccaagaccagcccctggatctaagtatgggcagtaggagtagagccagtgggacaaagctgactgagcctcgaaaaaaccacgtgtttgggggaaaaaaaggaagcaacgtcgaatcaagacctgcttcagatggttccttgcagcatgcaagacccactcctttctttatggaccctatttacaggtaa

SEQ ID NO: 122326 - DNA, 4193 bp, Homo sapiens
atgcgtatccccgtagatgccagcacgagccgccgcttcacgccgccttccaccgcgctgagcccaggcaagatgagcgaggcgttgccgctgggcgccccggacgccggcgctgccctggccggcaagctgaggagcggcgaccgcagcatggtggaggtgctggccgaccacccgggcgagctggtgcgcaccgacagccccaacttcctctgctccgtgctgcctacgcactggcgctgcaacaagaccctgcccatcgctttcaaggtggtggccctaggggatgttccagatggcactctggtcactgtgatggctggcaatgatgaaaactactcggctgagctgagaaatgctaccgcagccatgaagaaccaggttgcaagatttaatgacctcaggtttgtcggtcgaagtggaagagggaaaagcttcactctgaccatcactgtcttcacaaacccaccgcaagtcgccacctaccacagagccatcaaaatcacagtggatgggccccgagaacctcgaaataatgagtgtgtatatggcaactaccctgaaatacctttggaagaaatgccagatgcagatggagtagccagcactccctccctcaatattcaagagccatgctctcctgccacatccagtgaagcattcactccaaaggagggttctccttacaaagcccccatctacatccctgatgatatccccattcctgctgagtttgaacttcgagagtcaaatatgcctggggcaggactaggaatatggaccaaaaggaagatcgaagtaggtgaaaagtttgggccttatgtgggagagcagaggtcaaacctgaaagaccccagttatggatgggagatcttagacgaattttacaatgtgaagttctgcatagatgccagtcaaccagatgttggaagctggctcaagtacattagattcgctggctgttatgatcagcacaaccttgttgcatgccagataaatgatcagatattctatagagtagttgcagacattgcgccgggagaggagcttctgctgttcatgaagagcgaagactatccccatgaaactatggcgccggatatccacgaagaacggcaatatcgctgcgaagactgtgaccagctctttgaatctaaggctgaactagcagatcaccaaaagtttccatgcagtactcctcactcagcattttcaatggttgaagaggactttcagcaaaaactcgaaagcgagaatgatctccaagagatacacacgatccaggagtgtaaggaatgtgaccaagtttttcctgatttgcaaagcctggagaaacacatgctgtcacatactgaagagagggaatacaagtgtgatcagtgtcccaaggcatttaactggaagtccaatttaattcgccaccagatgtcacatgacagtggaaagcactatgaatgtgaaaactgtgccaagcaggttttcacggaccctagcaaccttcagcggcacattcgctctcagcatgtcggtgcccgggcccatgcatgcccggagtgtggcaaaacgtttgccacttcgtcgggcctcaaacaacacaagcacatccacagcagtgtgaagccctttatctgggaagtctgccataaatcctatactcagttttcaaacctttgccgtcataagcgcatgcatgctgattgcagaacccaaatcaagtgcaaagactgtggacaaatgttcagcactacgtcttccttaaataaacacaggaggttttgtgagggcaagaaccattttgcggcaggtggattttttggccaaggcatttcacttcctggaaccccagctatggataaaacgtccatggttaatatgagtcatgccaacccgggccttgctgactattttggcgccaataggcatcctgctggtcttacctttccaacagctcctggattttcttttagcttccctggtctgtttccttccggcttgtaccacaggcctcctttgatacctgctagttctcctgttaaaggactatcaagtactgaacagacaaacaaaagtcaaagtcccctcatgacacatcctcagatactgccagctacacaggatattttgaaggcactatctaaacacccatctgtaggggacaataagccagtggagctccagcccgagaggtcctctgaagagaggccctttgagaaaatcagtgaccagtcagagagtagtgaccttgatgatgtcagtacaccaagtggcagtgacctggaaacaacctcgggctctgatctggaaagtgacattgaaagtgataaagagaaatttaaagaaaatggtaaaatgttcaaagacaaagtaagccctcttcagaatctggcttcaataaataataagaaagaatacagcaatcattccattttctcaccatctttagaggagcagactgcggtgtcaggagctgtgaatgattctataaaggctattgcttctattgctgaaaaatactttggttcaacaggactggtggggctgcaagacaaaaaagttggagctttaccttacccttccatgtttcccctcccattttttccagcattctctcaatcaatgtacccatttcctgatagagacttgagatcgttacctttgaaaatggaaccccaatcaccaggtgaagtaaagaaactgcagaagggcagctctgagtccccctttgatctcaccactaagcgaaaggatgagaagcccttgactccagtcccctccaagcctccagtgacacctgccacaagccaagaccagcccctggatctaagtatgggcagtaggagtagagccagtgggacaaagctgactgagcctcgaaaaaaccacgtgtttgggggaaaaaaaggaagcaacgtcgaatcaagacctgcttcagatggttccttgcagcatgcaagacccactcctttctttatggaccctatttacagagtagagaaaagaaaactaactgacccacttgaagctttaaaagagaaatacttgaggccttctccaggattcttgtttcacccacaaatgtcagctattgaaaacatggcagaaaagctagagagcttcagtgccctgaaacctgaggccagtgagctcttacagtcagtgccctctatgttcaacttcagggcgcctcccaatgccctgccagagaaccttctgcggaagggaaaggagcgctatacctgcagatactgtggcaagatttttccaaggtctgcaaacctaacacggcacttgagaacccacacaggagagcagccttacagattgcaaatactgtgacagatcatttagcatatcttctaacttgcaaaggcatgttcgcaacatccacaataaagagaagccatttaagtgtcacttatgtgataggtgttttggtcaacaaaccaatttagacagacacctaaagaaacatgagaatgggaacatgtccggtacagcaacatcgtcgcctcattctgaactggaaagtacaggtgcgattctggatgacaaagaagatgcttacttcacagaaattcgaaatttcattgggaacagcaaccatggcagccaatctcccaggaatgtggaggagagaatgaatggcagtcattttaaagatgaaaaggctttggtgaccagtcaaaattcagacttgctgggatgatgaagaagttgaagatgaggtgttgttagatgaggaggatgaagacaatgatattactggaaaaacaggaaaggaaccagtgacaagtaatttacatgaaggaaaccctgaggatgactatgaagaaaccagtgccctggagatgagttgcaagacatccccagtgaggtataaagaggaagaatataaaagtggactttctgctctagatcatataaggcacttcacagatagcctcaaaatgaggaaaatggaagataatcaatattctgaagctgagctgtcttcttttagtacttcccatgtgccagaggaacttaagcagccgttacacagaaagtccaaatcgcaggcatatgctatgatgctgtcactgtctgacaaggagtccctccattctacatcccacagttcttccaacgtgtggcacagtatggccagggctgcggcggaatccagtgctatccagtccataagccacgtatga

SEQ ID NO: 122327 - DNA, 4107 bp, Homo sapiens
tcgacccacgcgtccgcgaagcagcacacgatgttggacagcaatgctgttacttggcaaggtggaactcggccgagagcggctccaaagtcgcgtggccagtgccaggaattcagattttggcaaccgcaccttgtgcgtccccgaaaccgacggacagagacacacggagggaggggaaggaggagaagagcgcaaggaaaagaggccgacaagccggcagagaaacccaccgaaggccggacgacccaccccggagacgtgtccagaccgcaccgtttcgcaggaggaacaaggaaatcgcccggcttagcaacgatctgctctccaggaccacgcgtttcggatttattgtccgccaacagtgtatttttaatacaagaaatgaagtcttctttcgtctgggtgacccgggtttgcctggagaaacacatgctgtcacatactgaagagagggaatacaagtgtgatcagtgtcccaaggcatttaactggaagtccaatttaattcgccaccagatgtcacatgacagtggaaagcactatgaatgtgaaaactgtgccaaggttttcacggaccctagcaaccttcagcggcacattcgctctcagcatgtcggtgcccgggcccatgcatgcccggagtgtggcaaaacgtttgccacttcgtcgggcctcaaacaacacaagcacatccacagcagtgtgaagccctttatctgtgaggtctgccataaatcctatactcagttttcaaacctttgccgtcataagcgcatgcatgctgattgcagaacccaaatcaagtgcaaagactgtggacaaatgttcagcactacgtcttccttaaataaacacaggaggttttgtgagggcaagaaccattttgcggcaggtggattttttggccaaggcatttcacttcctggaaccccagctatggataaaacgtccatggttaatatgagtcatgccaacccgggccttgctgactattttggcgccaataggcatcctgctggtcttacctttccaacagctcctggattttcttttagcttccctggtctgtttccttccggcttgtaccacaggcctcctttgatacctgctagttctcctgttaaaggactatcaagtactgaacagacaaacaaaagtcaaagtcccctcatgacacatcctcagatactgccagctacacaggatattttgaaggcactatctaaacacccatctgtaggggacaataagccagtggagctccagcccgagaggtcctctgaagagaggccctttgagaaaatcagtgaccagtcagagagtagtgaccttgatgaagctcctacaccccagagggagtgacctggcaacaacctccggctctgatctggaaagtgacattgaaagtgataaagagacatttacagaaaatggtaaaatgttcaaagacaaagtaagccctcttcagaatctggcttcaatacataatatgaaagaatacagcaatcattccattttctcaccatctttagaggagcagactgcggtgtcaggagctgtgaatgattctataaaggctattgcttctattgctgaaaaatactttggttcaacaggactggtgcggctgcaagacaaaaaagttggagctttaccttacccttccatgtttcccctcccattttttccagcattctctcaatcaatgtacccatttcctgatagagacttgagatcgttacctttgaaaatggaaccccaatcaccaggtgaagtaaagaaactgcagaagggcagctctgagtccccctttgatctcaccactaagcgaaaggatgagaagcccttgactccagtcccctccaagcctccagtgacacctgccacaagccaagaccagcccctggatctaagtatgggcagtaggagtagagccagtgggacaaagctgactgagcctcgaaaaaaccacgtgtttgggggaaaaaaaggaagcaacgtcgaatcaagacctgcttcagatggttccttgcagcatgcaagacccactcctttctttatggaccctatttacagtataatttttgaggactctcaaaaaaattcaagaaaagtgaggctgtcaggatgcaaatatgccgaggagacatttaggcatctgactcttggctgtgaaggttttgaaaggaccctgaatttaacagcaacccagctgcaaacagcagccactgatgatgcagggatgcagagcagcaggagaaaagaagctgggtctctgagtgactgtgtggagcagagctgccttgccatcctgaacaacatactccttgactttagatgcaaatactgtgacagatcatttagcatatcttctaacttgcaaaggcatgttcgcaacatccacaataaagagaagccatttaagtgtcacttatgtgataggtgttttggtcaacaaaccaatttagacagacacctaaagaaacatgagaatgggaacatgtccggtacagcaacatcgtcgcctcattctgaactggaaagtacaggtgcgattctggatgacaaagaagatgcttacttcacagaaattcgaaatttcattgggaacagcaaccatggcagccaatctcccaggaatgtggaggagagaatgaatggcagtcattttaaagatgaaaaggctttggtgaccagtcaaaattcagacttgctggatgatgaagaagttgaagatgaggtgttgttagatgaggaggatgaagacaatgatattactggaaaaacaggaaaggaaccagtgacaagtaattttacatgaaggaaaccctgagggatgactatgaagaaaccagtgcccctggagatgagttgcaagacaccccaaggtgaggtataaagaggaagaatataaaagtggacttttctgctctagatcatataaggcacttcacagatagccctcaaaaatgaggaaaaatggaagattaatcaatattctgaagctggagctgtcttcttttagtacttcccaatgtgccagaggaacttaagcagccgttacacagaaagtccaaatcgcaggcatatgctatgatgctgtcacttgtctgacaaaggagtcccctcccattcctacatccccacagttcttcccaacgtgtggcacagtatggccagggctgcggcggaatccagtgctatccagtccataagccacgtatgacgttatcaaggttgacccagagtgggaccaagtccaacagtagcatggctctttcatataggactatttacaagactgctgagcagaatgccttataaacctgcagggtcactcatctaaagtctagtgaccttaaactgaatgatttaaaaaagaaaagaaagaaaaaagaaactatttattctcgatattttgttttgcacagcaaaggcagctgctgacttctggaagatcaatcaatgcgacttaaagtgattacagagaaaacaaaaaacttggggggctgaaagcatcttccaatttaccccaccttagggtatgtgtgggcgagaagggcacctgagatggcagcattgatatgaatgaacactccatagaaactgaattctcttttgtacaacatcacctgacatgatagggaacagttgcttttaattacagatttaatttttttcttcattaaagatttatgtaatttaaccctttgaagacagaagtaggtggatgaaatgcacagtcccttattatacaaactgataacagggagtacttggacccccttttgccttcttaagtacattgtttaaaattaggggaaaaagggtatgtgtatattgtaaactatgggatgttaacactccaagggggttaagtcagtgaagtaacctattcatcaccagtaccgctgtaccactaataaattgtttgccaaatccttgtaataacatcttaattttagacaatcatgtcactgtttttaatgtttatttttttgtgtgtgttgcgtgtatcatgtatttatttgttggcaaactattgtttgttgattaaaatagcactgttccagtcagccactactttatgacgtctgaggcaca

SEQ ID NO: 122328 - DNA, 906 bp, Homo sapiens
ttaacaacattggtccatgactcttaggccaaaactcccaatcctgttaaaccggtgcccattggttgcaagataccccaactggagccttctgcctagggcagaacgcagagccacgtatcgtggggtgcttggtatactgcaaatccgaggcactgcattcagagatgagccaagtttgtcgctgttaatcctaaatgccacaagccagagaacagcaaagtcaaaacgctggtcagccgtggtaaagaatccatttcccccgagtgagcggtccctcccaatcgaatcccaaattcgcagtagccagccgcggcttcttctcgctgtctctctcctctgcacagcctgaccccctcccacccccgcttggagaggcactcgctctttcactccatcccgtgcccagacgctccaccgaaaccgtggcgggggattcttcggagctgcagctggggctacggtccccgcaacagccgctagctggactcgccttcctcgcccgcctcttccttctcttcccccctccttaacggtgcaaatccaaacccaattagaacgacaggcgccggagctcggtggacagccaaatccacctcgtcgggcgcgagagcgcacatcctctcgccggtcttcgcgtctgcgtctccctcccgctgttggcgcgttgcttcgggcaagtactgcaaggtgttccggggctctggattccaagcccaggtggttcactggcgtctcagggagacggagagaggaaagacacatgggtgtggtagtgatgagagtcagggtggaagcccgggttagctcgtaagaatccaaaatataagggctcttaggtgatccacccacctcggcctcccaaagtgctgggattacaggcgtgagccaccgtgcccagcccat

SEQ ID NO: 122329 - DNA, 985 bp, Homo sapiens
tcactggatccctggacatttcaacaaggtcgcgaggtcctgagttagtgtgggttgatctctcctctctgagatatttgctacttccagctcaccagactcgagcagcatgataccaccaatgtggctgaccagcatgatgttctgtgtaggtggctgggcacagaggaagctcgggctttgcggaggaacaaacacagacgatgacggggacagaggttgccggtttctagaaagtggctgttgggcacagaggaagcttgggctctcaggtgatccacccgcctcagcctcccaaagtgctgggactacaggcatgagccaccatgcccggcttaatttctttcttttttttttttttttttgcattttttagtagagacgggggggttcaccatgttggccaggctggtctcgaactcctgaccctcaggtgatccacccggctcagcctcccaaagtgctgggatttacagacgtgagccaccatgcccggccacttttatttattttgtgagacagggtctaactctgtttcccaggctggagtgcagtgacatgattttggctcactgcagcctccccctcctgggttcaagcagttctcctgcctcagcctcctcagtagctgggattacaggcacatgccaccacgcccggctaattttttgtatttttagtagagatggggttttaccatgttggccaggctggtcttggactcctgacctcaggtgatccacctgcctcggcctcccaaagtgttgggattacaggcatgagccaccatgccgggccaaccatgaagctcttaaatccacagtcagaggtaatcttttcacctcggaattcccacagcactctccttacaccactttcaagacatttaccacatcctatctcaatttctacttggtgtatacattatgctccattgcatactgtgagcatctccgcagaagaagccccatgactctttgcatgt

SEQ ID NO: 122330 - DNA, 2091 bp, Homo sapiens
ccgactcagagcacaagaaggattgccacggtttccattgcagcagccgtggcgcctctgaccctttttttatatcgcggcgacggcgggctgtcgtcacgacgacgtgcggacgcagcggcgggggccttatgtggagaagtcgctgtgaagccacctataaatccatttactgaatttatggagaaggctgtaaatgatggaagtcattcagaagaactcttttgccatcttaaaactatatcagagaaagaagatttaccacggtgtaccagtgaaagtcatctcagctgcctgaagcaggacattctaaatgaaaagactgaattggaagcaacacttaaggaagcggagttggtaactcattctgtagaattgcttttgccactatttaaggacaccattgaaaagattaattttgaaaatgcgaatctttctgcattgaatttgaagatttctgaacagaaggaaatattaataaaagaattagacaccttcaaaagtgtaaaactagctttagaacatcttcttagaaagagagactacaaacaaacaggagacaatttatccagcatgttgctagaaaatctaactgataatgaaagtgaaaatactaatcttaagaagaaggtatttgaaaaggaggcccatatccaagaactttcttgtttgtttcagagtgaaaaggcaaatactttgaaagcaaaccgtttttcccaatcagtaaaagtagtacatgaacgactacagatccaaattcataaaagggaagctgagaacgataagttgaaagaatatgtaaagagcttagaaaccaagatagccaagtggaacctgcaatcaagaatgaataagaatgaggctatagtgatgaaagaagcaagtaggcaaaaaactgtagctttaaaaaaggcatctaaagtttacaaacaaaggcttgaccattttacaggagctattgaaaagcttacttcccaaattagagatcaggaagccaagttgtctgaaacaatttcagcttccaatgcctggaaaagtcattatgagaaaattgtaatagaaaaaaccgaattggaagtacagattgaaacaatgaaaaagcaaatcattaatcttttggaagatctgaagaaaatggaagaccatggaaaaaattcatgtgaagaaattcttagaaaagttcactcaattgaacatgaaaatgaaactctgaatcttgagaatacaaaattaaagcttagattcccatgtagaattactgagtcaaagaatatgaacattttgattgttcttgatatgctttgctacatttcttctgaaaagactacacttgctgctttgaaggatgaagttgtatctgttgaaaatgaactctcagaattgcaagaagtagaaaaaaaacagaaaacccttattgaaatgtataaaactcaggtacaaaagttgcaagaagcagctgaaatagtaaaaagcagatgtgaaaatttgctacataaaaataaccaaataacaaaaaccaaaaataaaaatgtagagaagatgagaggccagatggagtctcatctgaaggagttagagcgtgtctgcgattccttgacggcggcggaacggaggcttcacgagtgtcaggagagtctgcagtgctgcaaggggaagtgtgcagaccaggaacacaccattagggagcttcagggccaggttgatggaaatcacaatcttctgacaaagctttctctggaagaggaaaactgtcttattcagctgaagtgtgaaaaccttcaacaaaaattagaacagatggacgcagaaaataaagagcttgagaagaagctggcaaaccaagaagaatgtcttaagcacagcaatcttaagtttaaagagaaatctgcagaatatacagcattggccagacaactggaagctgctttagaagaaggaagacaaaaggttgctgaagaaatagagaaaatgtcatctagagagagtgctttacaaattaaaatattagatctggaaactgagcttagaaagaaaaatgaagagcaaaatcaacttgtttgcaaaatgaacagtgatccagagactccatga

SEQ ID NO: 122331 - DNA, 2149 bp, Homo sapiens
atgatgaccaaagatgggctagtctttggtctccaacgtggatctccaatattatatgtccagggactgagcaggttcagatcattttctgtggcttcaggtgacagcaaaagaaccagacacagggaaaagttgcccttgcttgaagctggggagagagaccacaactgctatggttctccgcagatactagctttccaggcaatatgtaaaattgccaagccaggaaaggagcagtcttgctccaagcttgtggggcacacttttgaccccctattgattgaagccaggaagcctgaggagaggcaaaagctcccagatccttgtgtgaagtggggtggagtggggaattttccacccgtaaagagggttggagacatcaggatttttgtttcccagggtggcaagttctctcaggccccagagggtccagaggtgacatctgggagccaaggactagagtcaaaaaccttagaagtctacccggtattctattgtactgtggctgagctggcactcaaccacaatgtgcagccttcccactctaccctcccctttccacaggcagaggagcctcactcagtggccaccaccacaggcccatggggagtcctgccaggctgctgtcagtgttcccttaaggcccaagggctcttcagtcagcttgtcatgaacgctgcctgtactgggattcacacttcggggcagtgggctccactctggcccagcacagttccagagatgccatccaagagcagtggcctggaatcagggaccccaagaacctgctttgtgctctaccctgctgtggccaagctgttaccaaggggcactttagcttacagtggcaagggttgccaaaactcaagtgctaaccactgggatggtacacagattcattctccatgccatgcagcagctgccagggaatacggggggaagagtggcatcagtgattcaagactgtctcctaccctcttcagtgcctctttcagcaatatgaatttaaaactagattttaaagtatttaaatatggctgctttgaatgttttgaagccacagctggtgccaatgtgttgataaaaattattcgggaaagcaagtacaagaatacggatgacattgatatactttccaggcaagccactcctgtcattgcccaattggctcatgaacacagtggccatgtggcagggatggaggttgtgtttgggttcagcaatacagacttccatttaccaaggcagacctggctacagccactgtcacatgccagtctgctagcagcagagaccaacactgagtccaaaaatgacaccactccccagggtgatcagccagctacctggcgacttaactctggatatggatatgccttccctgcatgtaatgcttctgccaaaaccatccatggacttacagaagtcttatacactgtcctggttgatggaaatcacaatcttctgacaaagctttctctggaagaggaaaactgtcttattcagctgaagtgtgaaaaccttcaacaaaaattagaacagatggccgcaggaataaaagagccttaggaggaagcgggcaacccaagaagaatgtcttatgcacagcaatcttaagtttaaagagaaatctgcagaatatacagcattggccagacaacctggaagctgctttagaagaaggaagacaaaaggttgctgaagaaatagagaaaatgtcatctagagagagtgctttacaaattaaaatattagatctggaaactgagcttagaaagaaaaatggaagagcaaaatcaacttgttttcaaaaatgaacagtaaagcacaacatcaggaagtgtgtttgaaagaagtacaaaatagtcttgagaagtcggaaaatcaaaatgagagtattaagaattatttacagtttctttaaaacttcttatgtaacaatgtttgaataaattgtcaaatttattttctctaagtagtagatttttattatgagtctaaaatgtgattgggtaaaaaaataaatatactaccagttacattttatgatttatgagtggtagattagaggtttttatgtaaagatttttgaaacataatttatctaactgaaactttaaaataggatagttgttaaaaaaaaaaaaaa

SEQ ID NO: 122332 - DNA, 5106 bp, Homo sapiens
atggatgaaagcagtgtacattccagtgtgggagacagacatgtggacagagtctccacatcacaggttgctgaaaggactcgttgcaataagatgtggagaattgagaccaagtctccaagtggggacaatgagggcacagggacggtcatcgagaagaagacaaggctctcggggcaagggttttgccttcagctctcagaagggctgcagaacttgcaggcccagaggagaaaaatcaagttcagagaaatggaagaccctagttcaagacccctctgcagcagccttgacattgcgctgtgcgcttctgtcaaaccctctgcaggcttcccccagcggcccaaggtcaagcccctctgcgtcctcggctcgggggccggcaccggcgatgccgagcggagcctccagtcctccgacccgctgaagaagcagcagccgctcgcccggagcctacggggattgtgcgagcggatcgtgctcggtggaggctcgggctgcggggcgcggggactccggggggcggggggagggaccgctctgtcggtgcccggcgccagccgcggctttgaaggtatgtttgggctggaccaattcgagccccaggtcaacagcaggaacgctggccagggcgagaggaactttaacgagaccggactgagcatgaacacccactttaaggccccggctttccacactggggggccccctggccctgtggatcctgctatgagcgcgctgggcgaacccccgatcttgggcatgaacatggagccctacggcttccacgcgcgcggccactcggagttgcacgcaggggggctgcaagcgcagcctgtgcacggcttctttggcggccagcagcctcaccacggccacccgggaagtcatcatccccaccagcatcacccccactttgggggcaacttcggtggcccggaccccggggcctcgtgcctgcacgggggtcgcctgctcggctacggcggcgcagccggaggcctgggcagccagccgcccttcgccgagggctatgagcacatggcggagagccaggggcctgagagcttcggcccgcagcgaccggggaacctcccggacttccacagttcaggtgcctccagccacgccgtgccggccccatgcctgccgctggaccagagccctaaccgagccgcctccttccacggcctgccgtcctccagcggctccgattcccacagtctggagccacggagggtgacgaaccaaggagccgtcgactcgctggaatacaattacccgggcgaggcgccctcgggacattttgacatgttttcgccctctgactccgaagggcagctgcctcattatgcagcgggtcgccaggttcctgggggcgctttcccgggcgcctcggccatgcccagagctgcgggcatggtgggcttgtccaaaatgcacgcccagccaccgcagcagcagccccagcagcagcagcagccccagcagcagcagcagcagcatggtgtgttctttgagaggttcagtggggccagaaagatgcctgtgggtctggagccctcagtgggctccaggcacccgttaatgcagcctccccagcaggccccgccaccccctcagcagcagcccccgcagcagccgccacagcagcagccgccgccgccacccgggcttctagtccgacaaaattcgtgcccgcctgcgctccctcggccccagcagggcgaggcgggcacgcccagcggcggcctgcaggacggaggccccatgctgcccagccagcacgcgcaattcgagtatcccatccaccggctggagaaccggagcatgcacccttattccgagcctgttttcagcatgcagcatcctcctccgcagcaggcgcccaaccagcggctgcagcatttcgacgcgcccccctacatgaacgtggccaagaggccgcgcttcgactttccgggcagcgcgggagtggaccgctgcgcttcgtggaacggcagcatgcacaacggcgctctggataatcacctctccccttccgcctacccaggcctacccggcgagttcacaccgcctgtgcccgacagcttcccttcggggccgcccctgcagcatccggccccggaccaccagtccctgcaacagcagcagcagcagcagcagcagcagcaacagcagcagcagcagcagcaacagcaacagcaacagcagcagcagcagcagcgccaaaacgcggccctcatgattaagcagatggcgtcgcggaatcagcagcagcggctgcgccagcccaacctggctcagctaggccaccccggggacgtgggccagggcggcctggtgcatggcggcccggtgggcggcttggcccagccgaactttgagcgcgaaggcggcagcacgggcgccgggcgtctgggcaccttcgagcagcaggcgccgcacttggcgcaagagagcgcgtggttctcaggtccgcatccgccgcccggagacctgctgccccgtaggatgggcggctcgggtctgcccgctgactgtggcccgcacgaccccagcctggcgccccctcctccgcctggtggctcgggggtgctgttccggggccctctgcaggagccgatgaggatgcccggagagggccacgtgcccgcgctgccttcaccgggcctgcagttcgggggcagtctgggaggcctgggtcagctgcagtcgcccggggcgggcgtggggctccccagcgctgcttcggagcgccggcccccgccgccggactttgctacgtctgcgctcgggggccagccgggctttccgtttggtgcagccggccggcagtccacgccgcacagcggtccaggcgtgaactcgccccccagcgcgggagggggcggtggcagctctggtggcggcggtggcgggggtgcctacccgccgcagcctgatttccagcccagccagcgcacctcggccagtaaattgggcgcgctctcgctgggctccttcaacaagcccagctccaaggacaacctgttcggccagagctgcctggctgcgctctccaccgcttgccagaacatgatcgccagcctcggggcccccaacctcaacgtgaccttcaacaagaagaacccgccagagggcaagaggaaactgagccagaacgagaccgacggcgcggcagtggccggcaacccgggctcggattacttcccaggagggactgctcctggggccccaggacccggaggcccgtccgggaccagtagcagcggctccaaagcctcggggccgcccaaccctccagcccagggggacggcaccagcctctcccccaactacaccctggaatccacgtcggggaatgacggcaagccggtctccgggggcggcggccggggacggggtcgcagaaaaagggacagtggtcacgtgagccctggcaccttctttgacaagtactcggcggctccggacagcgggggcgcacctggggtgagcccagggcagcagcaagcgtcaggcgcagccgtcgggggaagctccgcaggcgagacgcgcggggcaccgacgccccacgaaaaggcgctcacgtcgccatcctgggggaagggggctgagttgctcctgggggatcagccggacctcattgggtccctggacggcggggccaagtcggacagtagttcgccaaacgtgggtgagttcgcctcggacgaggtgagcacgagctacgccaatgaggacgaggtgtcgtccagctctgacaacccccaggcactagttaaagcgagcaggagtcccctggtgaccggctcgcccaaactccctccccgtggggtaggcgccggggaacacggaccgaaggcgcccccgcccgccctcggcctgggcatcatgtctaactctacctcgacccctgacagctacggcggcggtgggggcccgggccatccgggcactccgggcctggagcaggtccgcaccccgacgagcagcagcggcgccccgccacccgacgagatccaccccctggagatccttcaggcgcagatccagctacagaggcagcagttcagcatctccgaggaccagcctctggggctgaagggtggcaagaagggtgagtgcgccgtcggggcctcaggggcgcagaatggcgacagcgagctgggcagctgctgctccgaggcggtcaagagcgccatgagcaccattgacctggactcgctgatggcagagcacagcgctgcctggtacatgcccgctgacaaggccctggtggacagcgcggacgacgacaagacgttggcgccctgggagaaggccaaaccccagaaccccaacagcaaagaaggcctttctgagcccgtgcttagaaccacttatgggcacggagatgaggagctgtatttcctaccaacagatgctggagataaaaaccaactctgtgtcttgcctcctcatggccgtcaccagctgccagccacactgcttgattatgatgatgatgatgatgatgatgatgatgatggcaatggtgatagtgacagcagcatccatggagcaattgctaagtaccaaaccctgatgatctgtcctttcagagttgaagctgagctgctgtttgctgggcaggccatgcagcccacacgggggtcctcagaggccttgcagggaacacccctctgccagagcaagatgtgtgagcacatccctgaagccagcaagcctgcagctagcggtatcattaccatcatggtagccggagccaggggtgccatctgccagcagggagagaagtatgcacatctcagagtaggggtgttagagaaacatcgccatggggctgacagccagggctcaccttatgctgaaggctttccagctgtcatctcacttaatcctcctagcagcctgcaagcccacgacctccctgcaaacaaggcctcagcatcccagcctggcagccacttgcagtgcctgtctgtccactgcacagacgacgtgggtgacgccaaggctcgagcctccgtgcccacctggcggtccctgcattctgacatctccaacagatttgggacattcgtggctgccctaacttga

SEQ ID NO: 122333 - DNA, 786 bp, Homo sapiens
atgagggccatagcaaatgacgaggacatttctgactccctaaaagtgacagcacgaatcttcatagatcaggagcatggactgagcacctactgggtgcctggcttgcaacctcctcttatgcgaacttggacaagtgacatcacctctctgagcctcaggttcaaggtgcgtgactgtgcacaactgacccctatgcaaagcccttccccggcgatgaagcagtgcgtgggaacttatgtggatgaggaaattgaggctcagaggagtcaatttcctcagaaccgacgggctgtgcttttgcataagcacgcgggcaacaccaccatcaggaggaagagcaagatgtgtgagcacatccctgaagccagcaagcctgcagctagcggtatcattaccatcatggtagccggagccaggggtgccatctgccagcagggagagaagtatgcacatctcagagtaggggtgttagagaaacatcgccatggggctgacagccagagaagaggtgagcacctagcccggagtacccagggagcccttgatatgggcagttgttgggctctgtccttcttcccgaatacccctggctttccctcagcccacgacctccctgcaaacaaggcctcagcatcccagcctggcagccacttgcagtgcctgtctgtccactgcacagacgacgtgggtgacgccaaggctcgagcctccgtgcccacctggcggtccctgcattctgacatctccaacagatttgggacattcgtggctgccctaacttga

SEQ ID NO: 122334 - DNA, 7568 bp, Homo sapiens
gcgcggaggcagggaaccggagccttggagcgacccaacccctcgtctcgctgccctcccgcgcctgcaacggtgcgcggagactccggcgaactcagacacccaacggcggagaacagaagcggcaggcggcggacgtggcccggaagctgcgcgccgaacgcagcgcacccgctgccgagcagaggagccgcgcctttccccgaccctcggctccagcccccggcgcctgccgcctcgcagcccctctgcgtcctcggctcgggggccggcaccggcgatgccgagcggacgctccagtcctccgacccgctgaagaagcagcagccgctcgcccggagcctacggggattgtgcgagcggatcgtgctcggtggaggctcgggctgcggggcgcggggactccggggggcggggggagggaccgctctgtcggtgcccggcgccagccgcggctttgaagggtctccctcccctgcccttagcagctctgccacggactccgggaggctgcgggcggcgtcctgagggctccccagcagacccaatcggacttgagaaggtgatcgctctgctctcccaacccccttccctccccattccccccacttaactttttgtctccgttcatccgcggcttcgtcccctccccggcagacccacccgcggctgtgacaaccgcccggggcatgggccccccaacacggctcctagaggccccgcggcctcgcaagatgtgagaggccctccccgggcagaatcggagcttcaggagaggagctaataccccgccccccgtccctcacatcaggcggggtggaggtgcgcgctgagcccccgcggtgctgagcgtcccggagcgcccaatcctgggctggaacgagtagctggccggaggcgcgccgcggagagccggctgtcatgccctattgatccccctctgccccccgccaagtatgtttgggctggaccaattcgagccccaggtcaacagcaggaacgctggccagggcgagaggaactttaacgagaccggactgagcatgaacacccactttaaggccccggctttccacactggggggccccctggccctgtggatcctgctatgagcgcgctggggcaacccccgatcttgggcatgaacatggagccctacggcttccacgcgcgcggccactcggagttgcacgcaggggggctgcaagcgcagcctgtgcacggcttctttggcggccagcagcctcaccacggccacccgggaagtcatcatccccaccagcatcacccccactttgggggcaacttcggtggcccggaccccggggcctcgtgcctgcacgggggtcgcctgctcggctacggcggcgcagccggaggcctgggcagccagccgcccttcgccgagggctatgagcacatggcggagagccaggggcctgagagcttcggcccgcagcgaccggggaacctcccggacttccacagttcaggtgcctccagccaccgcgtgccggccccatgcctgccgctggaccagagccctaaccgagccgcctccttccacggcctgccgtcctccagcggctccgattcccacagtctggagccacggagggtgacgaaccaaggagccgtcgactcgctggaatacaattaccgggcgaggcgccctcgggacattttgacatgttttcgccctctgactccgaagggcagctgcctcattatgcagcgggtcgccaggttcctggggggcggctttcccggggcgccctcggccatgcccagagctgcgggcatggtgggcttgtccaaaatgcacgcccagccaccgcagcagcagccccagcagcagcagcagccccagcagcagcagcagcatggtgtgttctttgagaggttcagtggggccagaaagatgcctgtgggtctggagccctcagtgggctccaggcacccgttaatgcagcctccccagcaggccccgccaccccctcagcagcagcccccgcagcagccgccacagcagcagccgccgccgccacccgggcttctagtccgacaaaattcgttgcccgcctgcgctccctcggccccagcagggcgaggcgggcacgcccagcggcggcctgcaggacggaggccccatgctgcccagccagcacgcgcaattcgagtatcccatccaccggctggagaaccggagcatgcacccttattccgagcctgttttcagcatgcagcatcctcctccgcagcaggcgcccaaccagcggctgcagcatttcgacgcgcccccctacatgaacgtggccaagaggcgcgcttcgactttccgggcagcgcgggagtggaccgctgcgcttcgtggaacggcagcatgcacaacggcgctctggataatcacctctccccttccgcctacccaggcctacccggcgagttcacaccgcctgtgcccgacagcttcccttcggggccgcccctgcagcatccggccccggaccaccagtccctgcaacagcagcagcagcagcagcagcagcagcaacagcagcagcagcagcagcaacagcaacagcaacagcagcagcagcagcagcgccaaaacgcggccctcatgattaagcagatggcgtcgcggaatcagcagcagcggctgcgccagcccaacctggctcagctaggccaccccggggacgtgggccagggcggcctggtgcatggcggcccggtgggcggcttggcccagccgaactttgagcgcgaaggcggcagcacgggcgccgggcgtctgggcaccttcgagcagcaggcgccgcacttggcgcaagagagcgcgtggttctcaggtccgcatccgccgcccggagacctgctgccccgtaggatgggcggctcgggtctgcccgctgactgtggcccgcacgaccccagcctggcgccccctcctccgcctggtggctcgggggtgctgttccggggccctctgcaggagccgatgaggatgcccggagaggccacgtgccgcgctgccttcaccggcctgcagttcgggggcagtctgggaggcctgggtcagctgcagtcgcccggggcgggcgtggggctccccagcgctgcttcggagcgccggcccccgccgccggactttgctacgtctgcgctcgggggccagccgggctttccgtttggtgcagccggccggcagtccacgccgcacagcggtccaggcgtgaactcgccccccagcgcgggagggggcggtggcagctctggtggcggcggtggcgggggtgcctacccgccgcagcctgatttccagcccagccagcgcacctcggccagtaaattgggcgcgctctcgctgggctccttcaacaagcccagctccaaggacaacctgttcggccagagctgcctggctgcgctctccaccgcttgccagaacatgatcgccagcctcggggcccccaacctcaacgtgaccttcaacaagaagaacccgccagagggcaagaggaaactgagccagaacgagaccgacggcgcggcagtggccggcaacccgggctcggattacttcccaggagggactgctcctgggggccccaggacccggaggccgtccgggaccagtagcagcggctccaaagcctcggggccgcccaaccctccagcccagggggacggcaccagcctctcccccaactacaccctggaatccacgtcggggaatgacggcaagccggtctccgggggcggcggccggggacggggtcgcagaaaaagggacagtggtcacgtgagccctggcaccttctttgacaagtactcggcggctccggacagcgggggcgcacctggggtgagcccagggcagcagcaagcgtcaggcgcagccgtcgggggaagctccgcaggcgagacgcgcggggcaccgacgccccacgaaaaggcgctcacgtcgccatcctgggggaagggggctgagttgctcctgggggatcagccggacctcattgggtccctggacggcggggccaagtcggacagtagttcgccaaacgtgggtgagttcgcctcggacgaggtgagcacgagctacgccaatgaggacgaggtgtcgtccagctctgacaacccccaggcactagttaaagcgagcaggagtcccctggtgaccggctcgcccaaactccctccccgtggggtaggcgccggggaacacggaccgaaggcgcccccgcccgccctcggcctgggcatcatgtctaactctacctcgacccctgacagctacggcggcggtgggggcccgggccatccgggcactccgggcctggagcaggtccgcaccccgacgagcagcagcggcgccccgccacccgacgagatccaccccctggagatccttcaggcgcagatccagctacagaggcagcagttcagcatctccgaggaccagcctctggggctgaagggtggcaagaagggtgagtgcgccgtcggggcctcaggggcgcagaatggcgacagcgagctgggcagctgctgctccgaggcggtcaagagcgccatgagcaccattgacctggactcgctgatggcagagcacagcgctgcctggtacatgcccgctgacaaggccctggtggacagcgcggacgacgacaagacgttggcgccctgggagaaggccaaaccccagaaccccaacagcaaagaagcccacgacctccctgcaaacaaggcctcagcatcccagcctggcagccacttgcagtgcctgtctgtccactgcacagacgacgtgggtgacgccaaggctcgagcctccgtgcccacctggcggtccctgcattctgacatctccaacagatttgggacattcgtggctgccctaacttgaatgacaagaaagatcccctcctctaccaggcccttcctctccccctgtctgtttccttccccctcaaccttaccccacccctctgttaatttgaaagggccactattgctgagtggatgagttttttttttttcctctaggttggtacctgcttagtggcatatggaccggaaagggttaatttaaagggggggaacctcaaaagtttttttaaaaaagaaacttgtctgccacagtatgttaccagtgttaacccttctgcagttagcaaacttttgcttaagcctttttcctctagatactccccatgtttcggtaatcttggcatacattttttagatgacctctttccttgttttgttttcatgctgctgtatgtccaagtattgttatttcataataagacaagagttgctttcttttttattctttttccttttcttaccccctccccttttattttctttttgctttgttcactgcttattaaaatggaaatcctggagaatagtagttctggaatattgccgggtgaaagtccaattgtcatcacaatgttatatattgacaccccagtgtcatcagtcaggcaggagccaaacaatgaatgcccctcttaggtattccgcctgggattttgttttgtctgttccctaagaaaatatattttcattcctgcaaacacagtgctcagccttcagttcccttccacttgagttctctcttctcctgctggaagccgcccctctctgcgatggacgtgaggacgtgtccagctctgctctgtgggaaggagttggaatgttcgacagcagtgttttctctccttttctgggcctcctcgcaaatgcccaggccctgcattttcacgctgtgctaagcagcctttggtctgcatgggggatggtgtgctcccagcctgcagtctttggagcaaggctgctgcccgtgccttgggtgctggagttggaggaggctgttctcagccctttcccttttctgaaagctgttcctggccgggcatcccagggaagaaggaggggactgcgtgtatctcctccacctctcccattccatccccagtccagcctgggcaaccccacccctgggagggatgaggcaccctcttgctcagcctgctcagccttctctgagcctttgcagggatctgcagactcctgagggctagaggacagagaaagagaatagaatgaaatgactttgattcctgcgccttttagttttgaactctggaattcctctgccccctccccaacatttttttggaatctcaccctgttgcaaaactagagccatgtcccaagcatctcacaaaggaataactgctctgagcagagatgagtggtggttggcaggggcaggcaactttgggtgctgctgatgcctgcaaaagccatttatggcttgtggtggggggcacatagattccccggtgggttagacaggaagtaactgatatcacttcacccaaatatataaccgtgatggttatctatttaatttcagtttttgttaacgagcgtgtcttactaaaacgctccactttgagctcccccaccccctccaggtcctcagagtttgcagatctgggctttctaaagcaagtgacctgaaggctctgggctcaccatacaacacccacgttgtttatttcaaagaacttttcagcgaagggagaggagctttcagaaaaacctcactctttcccctcccttctcccctctttccttctgccggtccttttggctggggtctgagtctgcggttctcgcctgggcagtcttgacgaggagcaaaccccgccttcagagggcagacaaagcaggtggcatgaattgatcagcgagaaaggtgtgagccgaggcagttcctgcgttctgctacaaaaggaatggaaagggaagggaatttccccccaccatgggctgtgggagagttgaccgtattctgggcaagactccatgacccctctgattctgcagtgtacagctgtttgagagcctcatcattttacttttgaaacaggaatgatttctccttaattgcttaaggccggggagcaaagtgtcttaacttctgtctttgactttcccagcgttgagtcatcaacactttgccaattagctcatggtcctggcaacctcagaaacccctgaagttttaaaaactttctcgctccccacgaccccagaatgaaacagctttaaaaatagccttaagcaaaaggatgttatttcattaaatttggtttaatggaaagaataaaagtaaatgaaaaacacaccctacacactagactccgaacactggtaatcagtactgcatagcaaactctttgggaaagaaaacgaaaatgttattgcacatgtaaaatatgaaaacttaactctgctgtgtgttaggcaatcctgtaatcttttttgactcttaaaagaaattcatttctgaaatgcttggttggaagactgtgacaatagctcatgaaattgagtgttatttttttctttcttttttaaaaaaatatgtaaagtgcagtcttctgtattcctgcatattgtatatacctgtatatgttttcctgagcagttaaataacaataaatatgacgttaatggtgaaaaaaaaaaaaaa

SEQ ID NO: 122335 - DNA, 758 bp, Homo sapiens
gagggaagatgagggccatagcaaatgacgaggacatttctgactccctaaaagtgacagcacgaatcttcatagatcaggagcatggactgagcacctactgggtgcctggcttgcaacctcctcttatgcgaacttggacaagtgacatcacctctctgagcctcagctccaaagtgcgtgactgtgcacaactgacccctatgcaaagcccttccccggcgatgaagcagtgcgtgggaactttcatagatgaggaaattgaggctcagaggagtcaatttcctcagaaccgacgggctgtgcttttgcataagcacgcgggcaacaccaccatcatctgccagagcaagatgtgtgagcacatccctgaagccagcaagcctgcagctagcggtatcattaccatcatggtagccggagccaggggtgccatctgccagcagggagagaagtatgcacatctcagagtaggggtgttagagaaacatcgccatggggctgtgacaaagggctcaccttatgctgaaggctttccagctgtcatctcacttaatcctcctagcagctccacagcccacgacctccctgcaaacaaggcctcagcatcccagcctggcagccacttgcagtgcctgtctgtccactgcacagacgacgtgggtgacgccaaggctcgagcctccgtgcccacctggcggtccctgcattctgacatctccaacagatttgggacattcgtggctgccctaacttga

SEQ ID NO: 122336 - DNA, 397 bp, Homo sapiens
aaccgtgggcgacagttatggagaagcgtctgcaggaggctcagctgtacaaggaggaagggaaccagcgctaccgggaagggaagtaccgagatgctcttgtctccttcagatggagcccgtgaactacgaacgagtgagagaatatagtcagaaagtcctggaacgacagcctgataatgccaaggccttgtatcgggccggagtggcctttttccatctgcaggactatgaccaggcccgccactacctcctggctgccgtgaataggcagcctaaagatgccaacgtccggcggtacctccagctgacacagtcagaactcagcagctaccatagaaaagagaagcagctctacctgggcatgtttggttaacaaagaagaaagatgctcctc

SEQ ID NO: 122337 - DNA, 500 bp, Homo sapiens
agccagtgtcccaggcgttctcacgcccgcaacaattcctgagtagggccttgcttgagttcttcggaaagactcatccacccccacatcgcctctttaggaagtcacttaatgctgggcttcattattcccacatccctttccttactacttgcctgcacttcttgagaaaaagactgcagaaaggagaggtggggctttcagtacaaacaagcaaaccgcaggtccctgtggggggactctccaggaagaagggtaatttcctgcctccttaaattggctgctactgtcagttattttgctcccaaccccagagcttcacttgctccttcacttcccagttccgcaagaaccgtgggcgacagttatggagaagcgtctgcaggaggctcagctgtacaaggaggaagggaaccagcgctaccgggaagggaagtaccgagatgctgtgagtaggtaccatcgagctctgcttcagctgcggggtctggatccgagtc

SEQ ID NO: 122338 - DNA, 1071 bp, Homo sapiens
ggcgttctcaccgcagacaattcctgagtagggccttgcttgagttcttcggaaagtctcatccacccccacatcgtctctttaggaagtcacttaacgttgggcttcagtattcccacatccctttccttactacttgcctgcacttcttgagaaaaagactgcagaaaggagagggggggctttcagtagaaacaagcaaaccgcaggtccctgtggggggactctccaggaagaaggttccgcaagaaccgtgggcgacagttatggagaagcgtctgcaggaggcttcagctgtaacaaggaggaagggaaccagcgctaccgggaagggtaagttaccgagatgctgtggagtaggttaccatcgagctctgcttcagctgcggggtctggatccgagtctgccctctccgttacctaatctcggacctcagggccccggccctcacgcctgaacaagaaaacatattgcataccacccagacaagactgctataacaatctagctgcttgtctccttcagatggagcccgtgaactacgaacgagtgagagaatatagtcagaaagtcctggaacgacagcctgataatgccaaggccttgtatcggggcccggagtggcctttttccatctgcaggactatgaccaggcccgccactacctccttggctgccgtgaataggcagccctaaagatgcctaacgtccggcggtaccctcccaggctgacacgagtcagaactcagcagcctacccatagaaaagagaagcagctcctaccctgggcatgtttggttaacaaagaagaaagatgctcctccagttgaacttaggtggaccgattaaacatgcatgaaggagaaatctgagcctcagcaagagaaattaaccctattacctctgacccagggtgggtttttgtttctaggttctgcacaaacttcactacttagacagtctgagtctttttctgtctatccatctgtttatttctatacctttcaatacatgttattgttgcagatatttggcttgagaaatataaaatagaaaacatacatcaaaaa

SEQ ID NO: 122339 - DNA, 602 bp, Homo sapiens
tcagggcaaatcatttctaatttcacatgctctttattgagacatacctgagactgggtaatttattaagggaagaggtttaattgactcacagttcaatatggctggggagacatcaggaaatttacaatcatggcaaaaccccgtctctacaaaaaatacaaaaattagccaggcatggtgatgcatgcctgtagttctagctatttgacaggttgaggtgggaggatagttcaagctcgggaggtcgaggctgcagtgggccaggctggtcttgaactcctagcctcaagttatcctcccaccttggcctcctgagtagctgggaccacaggcatgagccaccatgtccagctctatccagcctttaaagaagcagtttttactacagatagggaaactgtggcccagagaaagaaaggacttgtctgaggtcacccagctggacaccaatgccctccctctaagcaggcagtccctgtatcatcttggcccccagggcctcaccatcagagcatgtgttccatctaggtcatcaaatttcagtaaatcatcgaagtcgaacagctgtgatggctggaactcctcgtcctcatcttcat

SEQ ID NO: 122340 - DNA, 346 bp, Homo sapiens
cctcagtggtgtcactgtcaccccatcgttgagctatccagatcctttctggggtggcagcagggtggggcctgagcgatggaccatcttcttctccacccagcccctccggcgcaagagacaccggatcaccgggtagcagccttggattgtaaaagatcttcttctgctgcaatgtgagagaaggatacttcttcaataagtattgcataagtgccagacataggggatataaaggtgaaccagacagttatggactctgccatcaggaaatttttatattccattaggagaaataaacagactataaataagtagagaaataaatatgcatggtaataatgac

SEQ ID NO: 122341 - DNA, 1042 bp, Homo sapiens
atgcagggccccgacgcgccactgctcctgagcgcgagggagctggggcccgggcgccggggctcggcctcctggtaccgccaggagggcggcgcggtgtgcaactggctgcggaagccgcagccgctcgagccacgcaccagtttcccctcggcgcgccgctccgagttccgtccacccaggaggctgccatgggccggccctgcctccgcccagtccgaggagggtcacgcaggcggcagatgccaggcgggcagccccgcccctgcgcgccgcctcagcggcgccttcaagacgctggtcccaggcacccacgcccagggcgcctcggatacccaccccctcggccccccgcacaccccggtcctcgacccctctccgcaggatggtttcccggtcctctggcgaggatcctccaaggcgtctcacatgaaccggctcagaaacgccaaaatctacgtggagagagctgtcaagcagaagaagatctttacaatccaaggctgctacccggtgatccggtgtctcttgcgccggaggggctgggtggagaagaagatggtccatcgctcaggccccaccctgctgccaccccagaaggatctggatagctcagcgatgggtgacagtgacaccactgaggatgaggatgaagatgaggacgaggagttccagccatcacagctgttcgacttcgatgatttactgaaatttgatgacctagatggaacacatgctctgatgtcccgcatggtccagaatgagatcccctacttcatctggaccactcggcgggatgtgctcgactgtcgcttcctctccaaggatcagatgataaaccactacgcccgggctggctcctttaccacaaagaaaccggaggctaatcaggaagccacttaaactgccacaagaaattctatccagaactcagaaagccttgcaatcaattttctgactgattttttaaaatgctgttctattttacaagtagactccaatctctttttggagcaagacgagtgaaataattataatacta

SEQ ID NO: 122342 - DNA, 1101 bp, Homo sapiens
  misc_feature (1)...(1101): n = a,t,c or g
atgagcacaggggaaatgaaatttattgaaggagatgccctgcccagagaggagaaatctggcagtctggccacagcagccttgctgagctgcagtgggctccacccatttcaaacttcctggctgcctgtttacactgtgagggtaaaactgcctactcaagccttagcaatggtggatgcccctcccccgaccaagcttgagtgtcccaggttgatctcagtttgctgctatgctgggagcgagaatttcaagccagtggatcttagtttgctgagctccatagggggctctggtggggtaggcaccagagggaatctcctggtctgcgagttgcgaagaccgtgggacaagcgcagtatctgggccggagtgtgcaaggttcctcagactcagtccctcacggtttcccttagcttagctaggtctgagttcttatctcacaaccaggaagacttaggtgcacagaccctggagagtgagtggagtaaaaattattcagcaagatggaagctctcagcaaagagggagtgtggggtgtggttcccctacccaaagtggggccactgccaaacaagatttacagagatccgtagagcaactgatgttcttgtgtactttcgtggcaaaactgctggtgagtgtaacctttctgcagaaagtaaaacagtggccttgctgaggaaatgacatttatattcaagtgctatttctttacggcaccggggaacaagcatttcaaacacactgatggcccattcctgaaggatcacaagaagctaaaattcattacctgtataagggagtttaagttagattttcacccttttcatgttttcttacattttctacaatgggtaaacgatggaaataagaaaaacaatgtttatgttttgaaaatgtctcaatgggtctgccagttcatgttttccatgagcagcactgtgatgccgcgctgagatgctccaaaaatatggaacgcttcacgaatttgcgtgtcatccttgcgcaggggccatgataaacatcactgtttcgttccaattttagtatatgtgctgacgaaatggtcgggccgggaaatccggacggnnntgcatt

SEQ ID NO: 122343 - DNA, 1437 bp, Homo sapiens
aaggatgtctcgtatctcagatgacagtcgaactgcaagccagttggatgaatttcaggaatgcttgtccaagtttactccgatataattcagtacgacctttagccacattgtcatatgctagtgatctctataatggttccagtatagtctctaagtattgaatttgaccgggattgtgactattttgcgattgctggagttacaaagaagattaaagtctatgaatatgacactgtcatccaggatgcagtggatattcattaccctgagaatggaaatgacctgcaattccgaaaatcagctgtaatcagttgggagtagttaccataagaacctgttagctagcagtgattatgaaggcactgttattttatgggatggattcacaggacagaggtcaaaggtctatcaggagcatgagaagaggtgttggagtgttgactttaatttgatggatcctaaactcttggcttcaggttctgatgatgcaaaagtgaagctgtggtctaccaatctagacaactcagtggcaagcattgaggcaaaggctaatgtgtgctgtgttaaattcagcccctcttccagataccatttggctttcggcttgttcagatcacttgtgtccactactattgatcttcgtaacactaaacagccaatcatggtattcaaaggacaccgtaaagcagtctcttatgcaaagtttgtgagtggtgaggaaattgtctctgcctcaacagacagtcagctaaaactgtggaatgtagggaaacccatactgcctacgttccttcaagggtcatttcaatgaaaaaaacttttgtaggcctggcttccagtggagattatatagcttgtggaagtgaaaataactctctctacctgtactataaagcactttctaagactttgctaacttttaagtttgatacagtcaaaagtgttctcgacaaagaccgaggaagaagatgatacaaatgaatttgttagtgctgtgtgctggagggcacttacccagatgggggagtcccaatgtgctgattgctgcctaacagttcagggtaccaattaaggtgctagaattggtatgaagggttaactcaagtcaaattgtacttgatccctgctgaaatacatctgcagctgacaatgagagaagaaacagaaaatgtcatgtgatgtctctccccaaagtcatcatgggttttggatttgttttgaaaaatttttttctttttttcttttccctcctttatgagcctttgggacattgggaatacccagccaactctccaccatcaatgtaactccatggacattgctgctcttggtggtgttatctaatttttgtgatagggaaacaaattcttttgaataaaaataaataacaaaacaataaaagtttattgagccacaaaaaaaaaaaaaaaaaaa

SEQ ID NO: 122344 - DNA, 1381 bp, Homo sapiens
atgagaattaaagcaacctctgaagatggaacagttattgctcaggctgagtatggcagtgtggatataggggaagaggtgcttaagaaaggatttgcagagaaatgcagacttgcttccagaactgacatctgtgaggaaaaaaaattggatcctggtcaacttgttctcaggaacctcaaaagccccattcctttgtgggggcatagatcaaaccagtcaaccttcagcaggcccaaggggcacttaagtgagaaaatgactcttgacttgaaggatgaaaatgatgcaggcaatcttataacatttccaaaggaaagtttggctgttggtgactttaatttagggtctaacgtcagcctggaaaaaattaagcaggaccagaaactgattgaagaaaatgaaaaacttaaaacagagaaggacgctcttcttgaaagttataaggcgttagaattgaaagtagagcagattgcccaggagctgcagcaagagaaggcagctgctgtggatttgactaaccacttagaatacactctgaagacctatatagataccagaatgaaaaatctggcagctaagatggaaatactgaaagaaatgaggcatgtcgacatcagtgtccgtttcggaaaagacctttcagatgctatacaagtgttgggatgaagggtgctttactactccagcttctttgaatggattagagataatatgggcagaatacagtctggctcaggagaatattaaaacttgtgaatatgtgagtgaagggaatattttgattgcccaaagaaatgaaatgcagcagaagctgtacatgtcagtagaagattttattctggaagttgatgagtcatctcttaataaacgcttaaaaacattgcaggatttgtcagtctctttagaagcagtgtatggacaagccaaagaaggagcaaattctgatgaaatacttaaaaaattttatgactggaagtgtgataaaagagaggagttcaccagtgttagaagtgaaacagacgcttctctgcaccgtcttgtagcatggttccaaagaaccttaaaggatcaaggtgatgcagacaaggagataatttcaaatacatatagtcaagtactgcaaaagattcattcagaggaaaggctcattgccacagtacaagctaagtacaaggacagtattgagtttaaaaagcagcttattgaatatttaaagaagattcccagtgtggatcacttgctatccattaagaagacattgaaaagcttaaaagctctactcagatggaaattggttgaaaagagtaatttgggaagagtcagatgatcctgatggctctcaaattgagaaaataaaagaagaaataactcagctgcg

SEQ ID NO: 122345 - DNA, 370 bp, Homo sapiens
cgttgctgtcgcgtcaagctggccctggacatcgagatcgccacctacaggaagctgctggagggcgaggagagccggctggagtctgggatgcagaacatgagtattcatacgaagaccaccagcggctatgcaggtggtctgagctcggcctatgggggcctcacaagccccggcctcagctacagcctgggctccagctttggctctggcgcgggctccagctccttcagccgcaccagctcctccagggccgtggttgtgaagaagatcgagacacgtgatgggaagctggtgtctgagtcctctgacgtcctgcccaagtgaacagctgcggcagcccctcccagcctacccctcctgcgctgcg

SEQ ID NO: 122346 - DNA, 656 bp, Homo sapiens
atgagcagcgcccccgcgccgggcccggcgcccgccagcctcacgctctgggacgaggaggacttccagggccgtcgctgtcggctgctaagcgactgtgcgaacgtctgcgagcgcggaggcctgcccagggtgcgctcggtcaaggtggaaaacggcgtttgggtggcctttgagtaccccgacttccagggacagcagttcattctggagaagggagactatcctcgctggagcgcctggagtggcagcagcagccacaacagcaaccagctgctgtccttccggccagtgctctgcgcgaaccacaatgacagccgtgtgacactgtttgagggggacaacttccaaggctgcaagtttgacctcgttgatgactacccatccctgccctccatgggctgggccagcaaggatgtgggttccctcaaagtcagctccggagcgtgggtggcctaccagtacccaggctaccgaggctaccagtatgtgttggagcgggaccggcacagcggagagttctgtacttacggtgagctcggcacacaggcccacactgggcagctgcagtccatccggagagtccagcactaggctccacggccccagacaccttccctgaggacactcaataaaggttcctgaatcttcctgcc

SEQ ID NO: 122347 - DNA, 2016 bp, Homo sapiens
atgggtcagctgcgtgagtaccaggagctgatgttcgtcggtcctaccctggacatcgagattgccacctacaggaagctgctggagggcgaggagagccggctggaatctgggatgcagaacgtgagtatccatacgaagaccaccagcagctatgcaggattttgccgatttcgaaacaccatcaaacaggattttcgcctgctggggcaaaccagcgtggaccgcttgctgcaactctctcagggccaggcggtgaagggcaatcagctgttgcccgtctcactgaccgttcagctggatattacggcctttttaaagaccgtaaagaaaaataagcacaagttttatccggcctttattcacattcttgcccgcctgatgaatgctcatccggagttccgtatggcaatgaaagacggaaacagctatgaccatgattacgaattcgagctcggtaccccagttattggggccatgaactacatacagtcttataaaaacgagcatcctgatgatgaaactgatgaattcctcgtgccagtggaatccagcaactggattgaaaaggcactgaaagcccattggctacaaagatgccgagaaagcagggcgaattccgcacccggatatgaaaatcgaggacgggttgagcaacgtgttggttatacaattgaacaaattaatcatatgcgtgatgtgtttggtacgcgattgagacgtgttgaagatgtatttccaccggtgatcggggttgctgcccataaaggtggcgtttacaaaacctcagtttctgttcatcttgctcaggatctggctatgaaggggctacgtgttttgctcgtggaaggtaacgacccccagggcacagcctcaatgtatcacggatgggtaccagatcttcatattcatgcagaagacactctcctgcctttctatcttggggaaaaggacgatgtcacttatgcaataaagcccacttgctggccggggcttgacattattccttcctgtctggctctgcaccgtattgaaactgagttaatgggcatatttgatgaaggtaaactgcccaccgatccacacctgatgctccgtctggccattgaaactgttgctcatgactatgatgtcatagttattgacagcgcgcctaacctgggtatcggcacgattaatgtcgtatgtgctgctgatgtgctgagtgttcccacgcctgatgagttgtttgactacacctccgcactgcagtttttcgatatgcttcgtgatctgctcaagaacgttgatcttaaagggttcgagcctgatgtacgtattttgcttaccaaatacagcaatacttcagagagaataaaatacctaggaatccaacttacaagggatgtgaaggacctcttcaaggagaactacaaaccactgctcaaggaaataaaagaggacacacacaaatggaagaacattccatgctcatgggtaggaagaatcaatatcgtgaaaatggccatactgcccaaggtaatttacagattcaatgccatccccatcaagctaccaatgactttcttcacagaattggaaaaaactactttaaagttcatatggaaccaaaaaagagcccgcatcgccaagtcaatcctaagccaaaagaacaaagctggaggcatcacgctacctgacttcaaactatactacaaggctacagtaaccaaaacagcatggtactggtaccaaaacagagatatagatcaatggaacagaacagagccctcagaaataatgccgcatatctacaactatctgatctttgacaaacctgagaaaaacaagcaatggggaaaggattcactatttaataaatggtgctgggaaaactggctagccatatgtagaaagctgaaactggatcccttccttacaccttatacaaaaatcaattcaagatggattaaagatttaaacgttagacctaaaaccataaaaaccctagaagaaaacctaggcggggatctatag

SEQ ID NO: 122348 - DNA, 1429 bp, Homo sapiens
tttactggcccgaggcgctggaagaacaaatccagcccctccacttatgtcctgtggcccttggggcaagtttcttaagtgttgtgaggtctataaaagtggaccatacaaggtgcagtaggaagagatcaccatccacagtcgggctgaggctgaaagcacgtaccagatcaagtatgaggagctgcagacgctggctgggaagcatggggatgacctgcgttgtgcaaagacagatctccgagatgaaccagaacatcagcaggctccaggctgagactgagggcctcaaaggccagggggcttccctggaggccgccatcgcagatgccgagcagtggggggagctggccattaaagatgccaacaccaagctgtctgagctggaggccgccatgcagcgggccaagcaggacatggcacgcagctgggtgagtaccagaagctggccctggacatcgagatcgccacctacaggaagctgctggagggcgaggagagccgtctggagtctgggatgcagaacgtgagtatccataagaagaccaccagtggctatgcaggcgctccagcgaggatagtctcccttctccagaatgaactgctgtccctggaagtcggggtactcaaaggccacccaactggaaaaggagaagagctgggagctccatactcagagtgctcctttggactgtgccgaaggacagtgatgctcacccaggctccaagctccgtcgtgaggtccaggaacagcaggaaccacaccgtgaactctggtggatcctgcctgagtgccagcacagtggccatccctgccatcaacgacagcagtgcagccatgagtgcctgcagcaccatcagcgcccagaagagaacatgctgcacagcctgtgaacctgcgaggaagtacaaggacactgcctcccatcaagaaccagcagtctgtcagccggcctgccagctggaaactgcagaccccaaaggaggaggtgtcctggccctgccccagccaccctcgccaggcatgctctgctggccttactgccgagcccatgccaccgactactttctggctaacttcttctcagagtttccctgccactttttgcaccgagcaggggctgcccagacgcaagccactggtgacgggatggagcatgggcagagcagggagctgccaaagaggaaggcccccagggaagagtcagagacttctgaggaaaaatcccctaacaagtggggccctgtttccaagcagaagaagcagctcctggttgacattctcaccacaataatcaggcctacaagaggtaatgcttacacaggcctgagcactagaaaatggaagccaagatccgaggaaaatgctctgatgcagcccaacaagaaggacgagaaggggactcttacacagaaactggggttatag

SEQ ID NO: 122349 - DNA, 462 bp, Homo sapiens
cttatacagcatgccatactggtccactgtcagaccggtgatggccacagctccatcaccccccatgctgactctggctcctgcctggctctgcccggccaccacaacccctcgggaccattcagaggcatcactggagggtgtgtggttagtggagcagctggtcatggggaggtctcgtttctttggtggaaggcattcctgactcctctcatgaacaggtttcatattgctttgtggtgttcctggagctgcttctggctggggcgcccacatctgagcttccagtggtgcttctgaacagctgtagtaagcgtcctcccggctggctcgggagccagcccgtttcacagcgcttcctgggatccacccgctcatcctgcagccgccgcaactgcagccgccgtcatcccggccctggagcccccacacacccctgtgtatgcaatatttgttaaccat

SEQ ID NO: 122350 - DNA, 846 bp, Homo sapiens
ttaccccccttccccccccgggcgtagcgcagcacacgtatcgtgcacgctgtaccgaaccaccccgtgatggccagaccagcgctcggcagctcctccaaccgcatgggcggcctcgtagtcgccgtctgcgaggcgccgtccgagtgccgaatcgatggtcccccgcgaaccgctgtgataccgcccctctgccgcgaccagcgccgcgacgcctgcgatctcacctgcacgcgccttgggcgccggggcaccttgccctctgttccggcgacgcagtgggcctttcgggcgcaccagcgcgatacggcctccttcctccgcgggcaaggcggttctttttcccccccacgggcggcccgtttggccagtaggccgcctggcgcgatacgccactgcttctggctggggcgcccacatctgagcttccagtggtgcttctgaacagctgtagtaagcgtcctcccggctggctcgggagccagcccgtttcacagcgcttcgtgggatccacccgctcatcctgcagccgccgcaagtgcagccgccgtcatcccggccctgtaaaggagtggagacagacccccagttctctcctttcagccattgttctggtttctcattcgtggagacaacagtgtgagtttctggctgctgcgggggctcccgtgcccatcgcaggctgtaaccaccagacacaggagccttcagaaagaaaaactcaagagaaacaggaaatcctgtgtcaattttatgcagtctcaggtttctgtctccaaatactcgaatcttgtcaagcatcaccatttctgcattaggcctctgtaacttgacactcggatgcat

SEQ ID NO: 122351 - DNA, 423 bp, Homo sapiens
aggtagatgagttccgacactgtcacggctgtgttcccagcagcgtccgaagtcgagaatcgtcagctgtaagtaggagctacacagcgcagagaaaatggaaccacccatccgtgaggcctctttccggagggagccgcacacttggacttgagagtttgccagcagcgagctcggatgcatctctccaaaagccaccaaggtcggcgcgtctgaagagcgttttgcggtcatcagacttcctcatctgaaaacacagaacatactgaccctttcaagtacttagtcattttcctgaaagtgtggtctgtttcagaatgctgtggcaaccaggtaggtgtggcactggccatgtgccacgtctttgccctttgtagtctgtcagatattaaagtttctaaccctgtttttttaatctccaag

SEQ ID NO: 122352 - DNA, 397 bp, Homo sapiens
agcaatgagtttttatgttaaacacttccaactgtcagtattaccatgaaatcaacattagaaaataaggtagaaaactgagtgttttgcttaaaaaataaaaaaggattaaatagctgttgtatccaaacatcacgttctgcttccatctctacattccactttccccattcttggagattaaaaaaacagggttagaaactttaatatctgacagactacaaagggcaaagacgtggcacatggccagtgccacacctacctggttgccacagcattctgaaacagaccacactttcaggaaaatgactaagtacttgaaagggtcagtatgttctgtgttttcagatgaggaagtctgatgaccgcaaaacgctcttcagacgcgacgaccttg

SEQ ID NO: 122353 - DNA, 493 bp, Homo sapiens
  misc_feature (1)...(493): n = a,t,c or g
caccctgcttgctggaaatggncagccaccccggctcgggtcgcaacnggactctccctctgggaacagccagtcgaagtccaagcagggagacggctttccctcacaaccttgaaagacccatcagtcatcatgatgtacaacgagcaaggcataaaataaaacactgggaagcaggaagagtgacaagaaaatgaacagggagcaaggagggtgcaacccagttccccatcctggcaagtgcctaaagccccgctcagcctctgttccagctgggtgatgtttaggcaaagtcactaccccgccccactactgtgccccaagacagagtctgtggtataaactaactgtgctgactttgggcaataaaggacctagaattctaagtactgaattaaaaatacagaacctactaacactactgtattaaccagctgactcctataatcttttggagatgacagatgatactggtttttaaaatacccaatca

SEQ ID NO: 122354 - DNA, 1869 bp, Homo sapiens
atgtctgaggtaaagaactatgacaaaaaaatcaggcacagaaagggcaactgcacaatggaccgttattcaccaaaagtggtccattggttgcacccacgagcgcacaccagaaccgtcccagccgcaatccggtatccagaccgccaaacacccaacgggttgcgaggcgcaaacactatgcactcgcagatggatacactgaacggagatggacgaacgcaccttgcagggcagagagctcgttccccccgaactgcccgttcggagcgccaataccggattcatacgacaagtggaccttccggaatgtttcgtcaatacggcttaggcttctgcctcaggattccggttatgcccattgcctgggatcgccgctcatcctataccccagttcgctatcggaatcaggatgaccatgagctacaaattacacacgggaacaagattactatgtggaattgtgtgtctgacttccacattgacaggtgcttcctggacctctggaatggagaagagtcggcgcgcaactggcccaggtctggctgcgtcctggtgcaccccctgtgcctccccactgcacacctggccatccagggcctgctggctgctgcagcgctcactagagtgccctgtgattcttcagggcagagtctggcagctgcacagagcatgctagccccttttgagcttcgtgctgtgtcctgggagaagtcagagagacggtgcctgaacccctcggccccgccgctggtcaccagcagtggtgtggctcgagtgccccccaccagccacgtcgggcccgtgcagtcggggcggggcagccatgcagcagtgtgggtacaaaggagtcaaactaaatgtgatcatcaagctgccaaacataaaaagaaagataaatccacaagaaaaacgacaaagaaggaaagctctcgctgttgcccagagctgcgggtggaagtggagcagccccatcaccagctgccccgggaaggcagttcctcggagtactccagctcctcctccagccccatgggggtacaggcccgggaagagagctccgacagcgctgaggagaatgacagacgtgtggagattcacttggagagctctgacaaggagaagccggtgatgctgctgaatcacttcacttccagttccgccagacccacggcccaggttctccctgtgcagaatgaggccagctccaatccatcaggccaccaccccctgcccccgcagatgctgagcgcagcctcacacatcacacccatccgcatgctgaattccgtgcacaagccggaaagagggagcgcggacatgaagctcctctcgtcttctgtgcactcacttttgtctctagaagaaaggaataaaggatctggaccaagaagcagcatgaaagtggacaagagctttggcagcgccatgatggacgtgctgcccgcgtccgcaccccaccagcctgtgcaggtcctctctgggctttcggagagcagctccatgtcacccacagtctcctttggtccccggaccaaagtcgtgcatgcatccacgctggacagggtgctgaagacagcacagcaaccggccctggtcgtggagaccagcacggccgccacggggacgcccagcacagtcctccacgccgcccgtccgcccatcaaactgctgctgtcgtcatctgttcctgctgattctgccatttctgggcaaacttcctgtcctaataatgtgcaaataagtgtgccccctgcaataataaacccccggactgctctgtacacagccaacaccaaagttgccttttctgcaatgagcagtatgccagtgggcccaagcaagctgcataccttaggtcgactctag

SEQ ID NO: 122355 - DNA, 5950 bp, Homo sapiens
ctttgaggtcttgtggtctgattcttcaataacatcagtaaccaaatcttcctctgaagtgacggaatttatttcaaagctatgtcagctctatcctgaagagaacttggagaaactcattccttgcttagctggtccggacgcattttatgtggagcgaaaccacgtggatctggactcaggcctgaggtacctggcctcattaccttctcacgtgttgaaaaatgaccatgtcaggaggtttctcagcacttcctctcccccacagcagcttcagagtccaagtcctggcaatccctccctttctaaagtaggtaccgtgatgggcgtgtctggaaggcctgtgtgtggagtggctggtatcccgtcctcgcagagcggagcccagcaccacgggcagcacccggccggctccgccgcccccttgcctcactgctcccatgcgggcagcgcgggctcagccctggcctaccggacccagatggacacatcacctgccatcctcatgccttccagtctgcagacccctcagacccaggagcagaatgggattctagactggcttaggaaactgcgtttgcacaagtattaccccgtctttaagcagctctccatggagaagtttttgagccttactgaagaagatctgaataaatttgagtctcttaccatgggggcaaagaagaagctcaagacccagctggagctggaaaaggagaagtcagagagacggtgcctgaacccctcggccccgccgctggtcaccagcagtggtgtggctcgagtgccccccaccagccacgtcgggcccgtgcagtcggggcggggcagccatgcagcagagctgcgggtggaagtggagcagccccatcaccagctgccccgggaaggcagttcctcggagtactccagctcctcctccagccccatgggggtacaggcccgggaagagagctccgacagcgctgaggagaatgacagacgtgtggagattcacttggagagctctgacaaggagaagccggtgatgctgctgaatcacttcacttccagttccgccagacccacggcccaggttctccctgtgcagaatgaggccagctccaatccatcaggccaccaccccctgcccccgcagatgctgagcgcagcctcacacatcacacccatccgcatgctgaattccgtgcacaagccagaaagagggagcgcggacatgaagctcctctcgtcttctgtgcactcacttttgtctctagaagaaaggaataaaggatctggaccaagaagcagcatgaaagtggacaagagctttggcagcgccatgatggacgtgctgcccgcgtccgcaccccaccagcctgtgcaggtcctctctgggctttcggagagcagctccatgtcacccacagtctcctttggtccccggaccaaagtcgtgcatgcatccacgctggacagggtgctgaagacagcacagcaaccggccctggtcgtggagaccagcacggccgccacggggacgcccagcacagtcctccacgccgcccgtccgcccatcaaactgctgctgtcgtcatctgttcctgctgattctgccatttctgggcaaacttcctgtcctaataatgtgcaaataagtgtgccccctgcaataataaacccccggactgctctgtacacagccaacaccaaagttgccttttctgcaatgagcagtatgccaatgggccccctgcagggtggcttctgtgcaaacagcaacactgcctctcccagcagacacccctccacgtcctttgccaacatggccacagatgcccagctgcccagcccccagctccagcccggcgctgtcctccgtccctgaaagcagtttctatagcagcagtggcggtggcggctccacaggaaacattcctgcctcgaatccgaaccaccaccaccaccaccaccatcagcagcccccggcacccccgcagcccgccccacccccgccaggctgcattgtgtgcacgtcctgtggctgcagcggcagctgcggctcgagtggcctgactgtcagctacgccaactacttccagcacccgttctccggtccgtccgtgttcaccttccccttcttgcccttcagtcccatgtgcagcagcggctacgtcagcgcccagcagtacggcggcggctccaccttccccgtcgtgcacgccccttacagcagcagcgggaccccagaccctgtcctgagtgggcagtccacgtttgccgtgccacccatgcagaacttcatggcagggacggcaggggtgtaccagacccaaggactggtgggcagtagcaatggttccagtcacaaaaagagcgggaacctatcttgttacaactgcggggccactggtcaccgcgcccaggactgcaaacagccgtccatggacttcaaccggccaggtacttttaggttgaaatacgcccctccagcagaaagtctggactccacagattgatatttttcctctggcaaaccagaacgttatttaagccatggagacataaggaaaattaaatacaaaactgagaaggtctagttgctgttgagcttaatctttttaatccaaaggtgctttacttttcctagactggatagaaaatctagccgtagaaagtgcatcaaactcgatttattgccaaaaccctagattggagcttgggtgtcagaactcgcctagtgggcatctctgtggctggtgagatcggccacctccacttttggttgcagtgcagagacgccatgtctcccgaagagcattgccatcactggccctcctaggctcacacgtcaattccagggcagctacacgtggtctgaatcgagaaccgagcttggagttctccaagtggagttccacccgccggactcctgacacccctgggctagggaaaatgtcggactttgttttgttctgttcctaaagtgattagcactaatctctgggatttttaaggattgcactacagaagaatgtaccctgatgtaaatctctgcggttctgggagccaaactcctctgagaacagtcagtgcaagagactccaataatccatattgaaagagtcagcaccagcagaggctactcgacttaggacgcaacagaggttttagtatttccttccctcctccaagcacttgtagcagtttcaggtttttaatttttttctgcaaataaatctaaactacgttattaaatagaaatagtttactcgcaacaacttaatttctaagggtccaagtcccagagaatccatagtcgtcaaagctttgagagtatctttcttcccagccagtcagtggctttgagccctatcttccactacaaatgacctctcgaggggggacggcgacagcgcggctctgtgagtggctgtgaggatgctgcacgtcctcagcagagtttgcaagttgctttatctcccacgggctccccaagaacctccaaccccgaggcttatcgctagcggattcacacctgagacagacatttcaacaatgatacagtcctgtcatttatcagcaaaagattgggaattttctcctgtcaacttcttttgtattaggctgtgtattgatagttaattccgttaaaaattacttggaaaacagtgggaagtggtaggactctggaagaggccacacacccgagagctgcgagatctgtggcaagtctggttttggttaggtagtaataaaagtcctcactgtagatctctaaatttcaacccacggaaatgaaagccttttgtctgaaatttacggacttaaatcttcaaggttaaagggaattttctgctcaaataatactcttatcgcaaatgctaaagtcttcaatgttaaaatactgattggtaaaatcttgcagttgggattttgcagttggatatttattttaaaaaaaattataaataattcagactattcttaaaatgggacaatcagcctcatgaaaaattgatgtaaatcagaagaataccctagaatgaggccttgtgatgtgaagccgttcaatttgaagagcagttcctaacttcatagaaacctaaagccagaaagttgttacattttttttatgacaggcttttagtagaattttttagttttattttagttgaattttatttctatgcaatgcagaattaacagacctcttctcctcatggtacacagtattaccagtgttgaagtaatggtgatgcttattacaacagcctatttaggggaatgttacgttggatctcttaaattgtaaacactacaaaatgtcaaaataatgagaacctgacacaactttgccttaaagagtactagactggaccttctcatattaccgtttaaggaagacttagaagtgttcattgatgtttacgattttaatatttctgaaggccattacagtggcctggatatgtgctgaaagccaaacttttaaaattttttgggtttttttaagcaaagaaatattttaaataaatcctatttcaacactgaaattgttgaaaaccgtctcataacaaaaggaaaaaacattggaatttttgttttagtggtcagtataggggaatgaaagcgtctgttgttacccacgtaactattttgataagtattagaggttaaccttaaatccagcaaaacattaaaacagaaacttttcaacttggagcctgccattcagcgttgaggtagatgagttccgacactgtcacggctgtgtttcccagcagcgaaggcctctgcggagctgcccagttcgttcttgaaacgtggcatggggcgggcgtgtgacatctcccggggagggccgtccgaagtcgaggaattcgttcagctgttaagtagggagctacaacagccgcagaggaaaatgggacccacccattccgtgagggcctttttttccggagggagccgcacacttggacttgagagtttgccagcagcgagctcggatgcatctctccaaaagccaccaaggtcggcgcgtctgaagagcgttttgcggtcatcagacttcctcatctgaaaacacagaacatactgaccctttcaagtacttagtcattttcctgaaagtgtggtctgtttcagaatgctgtggcaaccagtgttttattttatgccttgctcgttgtacatcatgatgactgatggtcttcaaggttgtgaggaaagccgtctccctgcttgactcgactgctgtcccagaggagagtcctgtgcgacctgagcgggggtggctgccatttccagcatgcaggtgacttccaaagaatgagtcaggtggcactgaaagccatgggttctgaagaggcgaatttgttgaaaagtcccaagggtctgaatgaaagcatctttaatcaacactcaacactcgcaatattctagaaaaccatatactgtgctggttgaggccaaaggttaacatttgctccactgttcacccaaggaagggggccagtggcccatcccgccgcggccctcacgtgccgttgtaacaagcccctcatccacatgtgtgagtcctaccgtgccacaaaaagagaaggcctttggtacctgaaacttggacacccttgtgtaccccgatacccttcacagccttcctattggacatattttctttttaggaatgaaggaaaattccccccatttttgagcccaatccttttgtcaattcctacaaaattgccatgtaactttataaatatttttaaaagatatagttttgtaaatatttaatattccgctaatttgattttgaattgtaaatgtcaagtattctgtttttggggtttttatgttttattatactttgttaaaaaggacaaattgtacatttttagaatgtttttatgagtaaatttaatgtactgaaaataaaaattttaaaaaaggcaaaaaaaaa

SEQ ID NO: 122356 - DNA, 669 bp, Homo sapiens
ctactgtggaccactctgaagtgtgtgggttgctagaaaccctcctggctttgcttttgttgaatttgaagatccccgagatgcagcaggtgtggtctgagaactagatggaagaacactatgtggcccctccctcttggggtcatcgtccttgagatgattattgtaggaggggtcttccacctcgtcgcagacctccaagaaggagaaacttgtcttgtagccggagcaggtccctttattctccttggaccttgtctctctgaactgcatgcagaacttcacataactttcatctgtatttcctctcattactagttcttctacatcttttagaattcttttatgagcagtattgtgtgctgtgctccgagatatttcacagccagtcctttctggcaacaggcagcaactatcaaaagaaatcttctcaaagttctgattggtcatagcctttagtgaaacaaggctctcgtagttcatggcagggagccatatttcaggtgaagttccctgtggcccttcaccactcacagacagctggagcaaatttccaaagccttttccgccctttctggagaggcagccccatctaaccgtgtgttcatgggattcctccgcatcgagaagactgcagttagtccacactagctgcttactgtccaccat

SEQ ID NO: 122357 - DNA, 940 bp, Homo sapiens
  misc_feature (1)...(940): n = a,t,c or g
cccacgcgtccgatttcgtggacgccgggtgagtgagagagttggttggtgttgggccggaggaaagcgggaagactcatcggagcgtgtggatttgagccgccgcattttttaaccctagatctcgaaatgcatcgtgattcctgtccattgggactgtaaggtttatgtaggcaatcttggaaacaatggcaacaagacggaattggaacgggcttttggctactatggaccactccgaagtgtgtgggttgctagaaacccacccggctttgcttttgttgaatttgaagatccccgagatgcagctgatgcagtccgagagctagatggaagaacactaattgggtgtccgggtaagagaggaaactgtcgaatggtgaaaaaaagaagtaagaaatcgtggcccacctccctctttggggtcgtccgccctccgagaatgataaccgtaaggaagagtncttcccacctcgttcgcagatctccaaggaaggagaagcttctcttcgcagccggagcaggtcccttttttagagattagggagaagagagagatcgctgttttcggggagagaaaatcacaagccgtcccgatccttctctaggtctcgtagtccgatctaggtcaaatgaaaggaaatagaagaccagtttgcaagagaagtggtgtacaggaaattacttcatttgacaggagtatgtacagaaaattcaagttttgtttgagacttcataagcttggtgcatttttaagatgttttagctgttcaaatctgtttgtctcttgaaacagtgacacaaaggtgtaattctctatggtttgaaatggatcatacgaggcatgtaatacccaagaattgttactttacaatgttccctttaaccaaaattgaatttgctttgnactttagttatgcncagactgatnataaacctc

SEQ ID NO: 122358 - DNA, 1260 bp, Homo sapiens
agagatcgcggagagacgcataacgcagcccgctcctccagggccctccaggccctccggccccgggccggcgggtgaactggggggccccgggacaggccgagccctctgccctgcagataacggaggcctctgctgtggctgcccactggctgtgcccgcccactggctgtgcccagaccttgaagccgcagcgaacctctctttcccaccccacctcggtgactaatggcggccgtggcgtctcccagcccggaccccgccggcacccgggtctcccgacccaagcctcgacgaaacccccgcagagccgccgggacgcagcgcctttgggcggcgctgggcgtggtgggccgggaagtatggcggcagctcgaacgccgcgcggcggaggccattaaggcgtggacggcccgggaaggcggcctagggacgcaagcaggctcggccgcctctttaggccacggagccgcgcagatccggttcccgggtgaccactctgtcgccattgggcgagacctacctagtcctgacgacaacggacaaaggccttaaggggcctggaaggtgagcgaagtcccgaacgacgacgggtggaacggttagcggccatcgggcggttggtcttcattctaccagactttgctgtcggaagagagaaatggtagaatgacaggccacgtttggcccgttggaaatgcccaccaccctctgtgaagatttactggccgtttatggaaggcctgtgtatataatatgaaaaagctgctctcaactccaccccaaccttttaatagaaaacatttgtcacatctagcccttctatagatggaaagaggttgccgacgtatgataaaatagagttagaaagttacacatcttgtaaattctcatttgtttaaaagaaatcatagaaaatacatgtcttctggagatgacttttggaaatggagttgttaagacggcctctggaagcgatacgtccacgtttgttaagtgggttagatgacatggagctggaagacctgagaaggaagagaagaaggttctatgctagactggtcatatttagaagacattttcatattctatccattgttttgtgtgcattttattcctcactactgtgtatatagttgacaatgctaagcttttttgaaatgtctcttctttttagatgttctgaagtgcctgatatgttaaaattagaggtagcaaaatcacattttgtaaatacctttttgttcccattagatgttg

SEQ ID NO: 122359 - DNA, 183 bp, Homo sapiens
gagcaaaatgagattgattacagcggcctcagggttcaggcaatgcaaataagcagtgaaaggaagaagacgataattgttacagaaacccagaccagcgatgactagtggtgtgtataggcctcctcgggccaggttaaccacaaccaaggaaacaccacaaggccaccagaatctacagtg

SEQ ID NO: 122360 - DNA, 1536 bp, Homo sapiens
atggctgagacggaggagcggagcctggacaacttctttgccaagagggacaagaagaagaagaaggagcggagcaaccgggcggcgagtgccgcgggcgcagcgggcagcgccggcggaagcagtggagccgcgggtgcggcgggcggcggggcgggcgcggggacccggccgggtgacggcgggaccgccagcgcgggggctgcgggcccaggggccgccaccaaggctgtgacgaaggacgaagatgaatggaaagaattggagcaaaaagaggttgattacagcggcctcagggttcaggcaatgcaaataagcagtgaaaaggaagaagacgataatgaaaagagacaagatccaggtgataactgggaagaaggtggaggtggtggtggaggtatggaaaaatcttcaggtccctggaataaaacagctccagtacaagcacctcctgctccagtaattgttacagaaaccccagaaccagcgatgactagtggtgtgtataggcctcctggggccaggttaaccacaacaaggaaaacaccaccaaggaccaccagaaatctaccagtgataccacagttcccatccccttgcagtcaacttgccaaagcatgtagaaagccggaaggataaagaaatggagaagagctttgaagtagtaagacacaaaaatagaggtagggatgaggtttcaaaaaaccaggcccttaaacttcagctagacaaccaatatgctgtgcttggaaaatcagaaaagcagccactcacaatacaattaaggaatgggctttgctaacccttctgaggtaactagactgcagctaaaccaccaccaacagccattcatcatctgatctctgctggatctacagacaccgatgcaggaccactcggatttccatgaccggccctattgcacttatggaagttaaagtgtcacgaccgcccctatgccatattggatttaggggaattttccattgttacataaatgtgtgaacctagtttccaacagtgttcctttcatatttactctgcaaattccaaaaaaccaaaacctgcagcccagtgggtccatttccaaaatctttttatggttcagatactgaggcctttcataagggttgactacctcagatttgctgcactcattgtggacttcatgtggatcacaacttctggataagaagattacaactattaagtgtcgatgtgaaccttgcaaccagctctactggattcttatcagaaatcctgcataaaaagtcagccatctgggttctgatctgctgtaaaagatgaagatttaagtgaccttaattaacctgtcctgtgccctacccttaaggaatactcagtatctgaacataaaaagattttgaaatgaccactgcctgcaggttttggttttttgtatttgcagagtaaatatgaaagaccactgttgaaactagttcacacatttatgtaacaatgaaaattcccctaaatccaatatgcatagagcagtcgtgacactttaacttccat

SEQ ID NO: 122361 - DNA, 399 bp, Homo sapiens
ctgaaacttagagttcaattaatacaacatttataccaggtagtgttctacaaccagatgcatcaccttctaaaactggtacattaacctcaataccagttacaattccagaaaacacctcacagtctcaagtaataggcactgagggtggaaaaaatgcaagcacttcagcaaccagccggtcttattccagtattattttgccgggggttattgctttgattgtaataacactttcagtatttgttctggtgggattgtaccgaatgtgctggaaggcacatccgggcacaccagaaaatggaaatgatcaacctcagtctgataaagagagcgtgaaactttttaccggtaaaacaatttctcatgagtctggtgagcactctgcataagggaaaa

SEQ ID NO: 122362 - DNA, 540 bp, Homo sapiens
atgcaagcacttcagcaaccagccggtcttattccagtgagtaacagcaatgccttcattcatggcagtagatatgcagaatgtttgaatgtgaccagtaaaggagaggaatcagattatgggcagccttttctcaactttactgagcctgcaatcccattacaatcccatctaactgctgcctgctctgaaaatttcccacaagcacaccagaaaatggaaatgatcagtaaacctcagtctgataaagagagcgtgaagcttcttaccgttaagacaatttctcatgagtctgtgattcttaaccagaataaaatggatgaaattacagaaatagaattcagaatctggatggcaatgaagatcactgaaaatcagaagattgaaacccattccgaggaatctgaggaattcaacaaaaccatacaaggaatgaaatatgaaatagccattttaagaaagaacaaaactgatctgacagagctgaaaaactcaccacaagaatttcataacacattggaagtattaacagcagagtag

SEQ ID NO: 122363 - DNA, 792 bp, Homo sapiens
atggggaaggcgaaggtccccacctccaagcgcgccccgagcagccccgtggctaagccgggtcctgtcaagacgctcacttggaagaaaaacaagaagaaaaaaaggttttggaaaagcaaggcgcaggaagtaagcaagaagccaggaagcggccctggtgctgtggtgcgacctccaaaggcaccagaagacttttctcaaaactggaaggtgctgcaagagtggctgctgaaacaaaaatctcaggccccagaaaagccttttgtcatctctcagatgggttccaaaaagaagcccaaaattatccagcaaaacaaaaaagagatctcgcctcaagtgaagggagaggaaatgctggcgggaaaagaccaagaggccagcaggggctctgttccttcaggctccaagatggacaggaaggcgccagtacctcgcaccaaggccggcggagcagagcacaataagaaaggaaccaaggaaaggacaaatggggacatcaagcataagaagcagaaagctaaggaggcagaccctgccccacccaccgaggaagacatgtggtttgacgacgtggacccggcggatatcgaagctgccataggtccagaggtggccaagatagcgaggaaacagttgagtcacagtgagggcagcgtcagcctcagactcgtggaagagccggccttcggcggcctgacaagagccttagccttggactgtgagatggtgggcgtgagtcctaaaggggaggagagcgtggccgcccgtgtatccatcatgaaccagtag

SEQ ID NO: 122364 - DNA, 423 bp, Homo sapiens
gaagacatctggtttgacgacgtggacccagcggatatcgaagctgccataggtccagaggcggccaagatagcgaggaaacagttgggtcagagcgagggcagcgtcagcctcagcctcgtgaaagagcaggccttcggcgggagaagagcttgaagttgttcagaaggaagtggcagagatgctgaagggcagaattctagtggggcacgctctgcataatgacctaaaggtactatttcttgatcatccaaaaaagaagattcgggacacacagaaatataaacctttcaagagtcaagtaaagagtggaaggccgtctctgagactactttcagagaagatccttgggctccaggtccagcaggcggagcactgttcaattcaggatgcccaggcagcaatgaggctgtacgtcatggg

SEQ ID NO: 122365 - DNA, 1080 bp, Homo sapiens
atggggaaggcgaaggtccccgcctccaagcgcgccccgagcagccccgtggctaagccgggtcctgtcaagacgctcactcggaagaaaaacaagaagaaaaaaaggttttggaaaagcaaggcgcgggaagtaagcaagaagccagcaagcggccccggtgctgtggtgcgacctccaaaggcaccagaagacttttctcaaaactggaaggcgctgcaagagatgggttccaaaaagaagcccaaaattatccagcaaaacaaaaaagagacctcgcctcaagtgaagggagaggagatgccggcaggaaaagaccaggaggccagcaggggctctgttccttcaggttccaagatggacaggagggcgccagtacctcgcaccaaggccagtggaacagagcacaataagaaaggaaccaaggaaaggacaaatggtgatattgttccagaacgaggggacatcgagcataagaagcggaaagctaaggaggcagccccagccccacccaccgaggaagacatctggtttgacgacgtggacccagcggatatcgaagctgccataggtccagaggcggccaagatagcgaggaaacacctgacaagagccttagccttggactgtgagatggtgggcgtgggccctaagggggaggagagcatggccgcccgtgtgtccatcgtgaaccagtatgggaagtgcgtttatgacaagtacgtcaaaccaaccgagcccgtgacggactataggacagcggtcagtgggattcggcctgagaacctcaagcagggagaagagcttgaagttgttcagaaggaagtggcagagatgctgaagggcagaattctagtggggcacgctctgcataatgacctaaaggtactatttcttgatcatccaaaaaagaagattcgggacacacagaaatataaacctttcaagagtcaagtaaagattcaggatgcccaggcagcaatgaggctgtacgtcatggtgaagaaggagtgggagagcatggcccgagacaggcgccccctgctgactgctccagaccactgcagtgacgacgcctag

SEQ ID NO: 122366 - DNA, 640 bp, Homo sapiens
tgctgccagggcgccgggcccggggaggccggggtctcgggtggccgccggcccaggcgctggacggcagcaggatggggaaggcgaaggtccccgcctccaagcgcgccccgagcagccccgtggctaagccgggtcctgtcaagacgctcactcggaagaaaaacaagaagaaaaaaaggttttggaaaagcaaggcgcgggaagtaagcaagaagccagcaagcggccccggtgctgtggtgcgacctccaaaggcaccagaagacttttctcaaaactggaaggcgctgcaagagtggctgctgaaacaaaaatctcaggccccagaaaagcctcttgtcatctctcagatgggttccaaaaagaagcccaaaattatccagcaaaacaaaaaagagacctcgcctcaagtgaagggagaggagatgccggcaggaaaagaccaggaggccagcaggggctctgttccttcaggttccaagatggacaggagggcgccagtacctcgcaccaaggccagtggaacagagcacaataagaaaggaaccaaggaaaggacaaatggggatattgctccacaacgaggggacatcgagcataataagcggaaagctaaggaggcagccccagccccacg

SEQ ID NO: 122367 - DNA, 2173 bp, Homo sapiens
atggggaaggcgaaggtccccgcctccaagcgcgccccgagcagccccgtggctaagccgggtcctgtcaagacgctcactcggaagaaaaacaagaagaaaaaaaggttttggaaaagcaaggcgcgggaagtaagcaagaagccagcaagcggccccggtgctgtggtgcgacctccaaaggcaccagaagacttttctcaaaactggaaggcgctgcaagagatgggttccaaaaagaagcccaaaattatccagcaaaacaaaaaagagacctcgcctcaagtgaagggagaggagatgccggcaggaaaagaccaggaggccagcaggggctctgttccttcaggttccaagatggacaggagggcgccagtacctcgcaccaaggccagtggaacagagcacaataagaaaggaaccaaggaaaggacaaatggtgatattgttccagaacgaggggacatcgagcataagaagcggaaagctaaggaggcagccccagccccacccaccgaggaagacatctggtttgacgacgtggacccagcggatatcgaagctgccataggtccagaggcggccaagatagcgaggaaacagttgggtcagagcgagggcagcgtcagcctcagcctcgtgaaagagcacggccttcggcggcctgacaagagccttagccttggactgtgagatggtgggcgtgggccctaagggggaggagagcatggccgcccgtgtgtccatcgtgaaccagtatgggaagtgcgtttatgacaagtacgtcaaaccaaccgagcccgtgacggactataggacagcggtcagtgggattcggcctgagaacctcaagcagggagaagagcttgaagttgttcagaaggaagtggcagagatgctgaagggcagaattctagtggggcacgctctgcataatgacctaaaggtactatttcttgatcatccaaaaaagaagattcgggacacacagaaatataaacctttcaagagtcaagtaaagagtggaaggccgtctctgagactactttcagagaagatccttgggctccaggtccagcaggcggagcactgttcaattcaggatgcccaggcagccaattgaggctgttacgtcatggtgaaggaaggagtggggagagcatggcccgagacaggcgccccctgcttgactgcttccagaccactgcagtgacgacgccttagcagtcctgccctgcttgctgcttgcccgccccgcttacagaggcaatgttgaccagtcacaggggacagttcacatctccccagagtggcaactctggtgaaaccttttcagaatcatggcagaggggcgtggcgtggtgctactgagaaggtcctccttcctcttgactttgtggtctgaaacctggtcttactgtccatgtgtgtttgggcccggatggtcagggtggggagcagggacggccatgggcacgcctggccacgctttaccgactgctgaccccctgggccaggtgaggttggggcctgtgggccgccagtccatacggtgctgtcactgcccatcttcggtgacaccctggggtgaaggtgctcagcaccttcctctcgaggagccacattttcctcctttgtgttaggggacataacaagctctgctgggcttgagggaccccagaccaggtttctcaagtcagcttccttgagacacagcttgccggcaacaaacaggtgttacatccaggggtttcctgtggcccgtttgaactttgagccatttatcttaaattaaattggcccaagggttggctggtgggtcaccccagcagaggcttctcccccatagcacaaggaatttgttgcctggggccgggtacctgcggttattccctggaggtcggcagacatgccaaccttgggctatttgagctggagaagctatgtgatgcctacgcggtggctttatgggctaggccccgagtttgaggctcccctgggaactagagccaggaacagccagtggcactgacaaggggacggagtccaaggcgttattgggccacctgacagctggacagaaaaggggcagacaccccgaggatgcgatttaaaataaatgcagatgtttacttggaaaaaaaaaaaaaaaaaaaaaaaaaagtcgtatcga

SEQ ID NO: 122368 - DNA, 414 bp, Homo sapiens
ccgaccaggtgaggacagcaatgacctcatccgacacttcctcatcgagtcgtctgccaaaggagtgcatctcaaaggagcagatgaggagccctactttgggagcctctctgccttcgtgtgccagcattccatcatggccctggccctgccctgcaaactcaccatcccacaaagagaactgggaggtgcagatggggcctcggactctacagacagcccagcctcctgccaaaagaaatctgcgggctgccacaccctgtacctgagctcagtgagcgtggagaccctgactggagccctggccgtgcaaaaagccatctccaccacctttgagagggacatcctccccacgcccaccgtggtccacttcaaagtcacagagcagggcatcactctgactgatgtccagag

SEQ ID NO: 122369 - DNA, 624 bp, Homo sapiens
atgctgcccctctgcctcgtggccgccctgctgctgggccgccgggcccgggccgagcctgggcgacgaagccatccactgcccgccctgctccgaggagaagctagcgcgctgccgcccccccgtgggctgcgaggagctggggtggagaagcccctgcacacactgatgcacgggcaaggcgtgtgcatggagctggcggagatcgaggccatccaggaaagcctgcagccctctggtaaggtgactgatgagaatgggtggggccagggtatagactggcctgagcagtgggaattttctgtggtgggcagtggagatacatggggagcctttaagcagggcaagacattttctcctcacatcctcaaagcacctgaacctgtctttcaggagttcacagtcagtgggtggggtgaccactttaaccctttcacagctgtttgctgggtccagatccagcgttcagggcaggcgggaaagatctttgggtttgtggccaagagccagacagagcctcaggagaacgtatgccacctctttgcggagaatgacatggtccagccagcctcgcaggtcatcggcctggtgactgctctgctgcaggacgcagaaaggatgtag

SEQ ID NO: 122370 - DNA, 888 bp, Homo sapiens
atgggtgagaagcctggccccctgctcttctccagcgccaagccgaagaatccccaggaaggagaacacaaggacgagggtgaccaccccaacaacagcttcagcccctgtagcgcccatgaccgcaggtgcctgcagaagcacttcgccaaaattcgagaccggagcaccagtgggggcaagatgaaggtcaatggggcgccccgggaggatgcccggcctgtgaataaaggcacctacctggtgtccacaggtgggcagactgttgccttcactactggctcctgggaccaagacgactcagagtccagcctaggctgccaggaggactccacagccctgcatcccacctccacttcccccggcccatccgaaacagtgcctccttctctccttcctgaggccaccaagcgactcttgtccctggactttgagtccttcgggcagacccagaggaacctgtcctgcccgctgtgtcctgctggtgtctggcaggagaagacactgtgtgaatggagggatgcaggcggcaacagacaggctggggtgcctcaggcaccgtgtatgaaatctaacaatgcgctcatcgtcatcctcggcaccgtcaccctggatgctgtaggcataggcttggttatgccggtactgccgggcctcttgcgggatatcgtccattccgacagcatcgccagtcactatggcgtgctgctagcgctatatgcgttgatgcaatttctatgcgcacccgttctcggagcactgtccgaccgctttggccgccgcccagtcctgctcgcttcgctacttggagccactatcgactacgcgatcatggcgaccacacccgtcctgtggatctacccactagtcaattcaccatcttgttga

SEQ ID NO: 122371 - DNA, 399 bp, Homo sapiens
atggaatgtgaggacagcaatgacctcatccgacacttcctcatcgagtcgtctgccaaaggagtgcatctcaaaggagcagatgaggagccctactttgggagcctctctgccttcgtgtgccagcattccatcatggccctggccctgccctgcaaactcaccatcccacagagaggtgggtctgggccccaaagaggcaatgccaagccccagggctcctgccagagcgagctgcaccgggcgctggagcggctggccgcttcacagagccgcacccacgaggacctctacatcatccccatccccaactgcgaccgcaacggcaacttccaccccaagcaggtccttcctttaggtctggttgttgcaccatctgcttggttggctggcagctga

SEQ ID NO: 122372 - DNA, 2125 bp, Homo sapiens
cttcacctggactctgagtcgtcttggtcccatgagccagtagtgaaggcaacagtctgcccacctgtggacaccagatcctgggagctcctggttagcaagtgagatctctgggatgtcagtgaggctggttgaagaccagaggtaaactgcagaggtcaccacccccaccatgtcccaggtgatgtccagcccactgctggcaggaggccatgctgtcagcttggcgccttgtgatgagcccaggaggaccctgcacccagcacccagccccagcctgccaccccagtgttcttactacaccacggaaggctggggagcccaggccctgatggcccccgtgccctgcatggggccccctggccgactccagcaagccccacaggtggaggccaaagccacctgcttcctgccgtcccctggtgagaaggccttggggaccccagaggaccttgactcctacattgacttctcactggagagcctcaatcagatgatcctggaactggaccccaccttccagctgcttcccccagggactgggggctcccaggctgagctggcccagagcaccatgtcaatgagaaagaaggaggaatctgaagccttggacataaagtacatcgaggtgacctccgccagatcaaggtgccacgatggcccccagcactgctccagcccctctgtcaccccgcccttcggctcccttcgcagtggtggcctcctcctttccagagacgtcccccgagagacacgaagcagcagtgagagcctcatcttctctgggaaccagggcagggggcaccagcgccctctgcccccctcagagggtctctcccctcgacccccaaattcccccagcatctcaatcccttgcatggggagcaaggcctcgagcccccatggtttgggctccccgctggtggcttctccaagactggagaagcggctgggaggcctggccccacagcggggcagcaggatctctgtgctgtcagccagcccagtgtctgatgtcagctatatgtttggaagaacaccccactctccaccactggccaaagaacatgccagcagctgccccccatccatcaccaactccatggtggacatacccattgtgctgatcaacggctgcccagaaccagggtcttctccaccccagcggaccccaggacaccagaactccgttcaacctggagctgcttctcccagcaacccctgtccagccaccaggagcaacagccagaccctgtcagatgccccctttaccacatgcccagagggtcccgccagggacatgcagcccaccatgaagttcgtgatggacacatctaaatactggtttaagccaaacatcacccgagagcaagggtgtccaggtggggcggtgtccatctctgactcaaggattgttccagcaatcgagctgctgaggaaggaggagccaggggcttttgtcataagggacagctcttcataccgaggctccttcggcctggccctgaaggtgcaggaggttcccgcgtctgctcagagtcgaccaggtgaggacagcaatgacctcatccgacacttcctcatcgagtcgtctgccaaaggagtgcatctcaaaggagcagatgaggagccctactttgggagcctctctgccttcgtgtgccagcattccatcatggccctggccctgccctgcaaactcaccatcccacagagaggctgccacaccctgtacctgagctcagtgagcgtggagaccctgactggagccctggccgtgcagaaagccatctccaccacctttgagagggacatcctccccacgcccaccgtggtccacttcaaagtcacagagcagggcatcactctgactgatgtccagaggaaggtgtttttccggcgccattacccactcaccaccctccgcttctgtggtatggaccctgagcaacggaagtggcagaagtactgcaaaccctcctggatctttgggtttgtggccaagagccagacagagcctcaggagaacgtatgccacctctttgcggagtatgacatggtccagccagcctcgcaggtcatcggcctggtgactgctctgctgcaggacgcagaaaggatgtag

SEQ ID NO: 122373 - DNA, 912 bp, Homo sapiens
atgatctcctttgactccatgtttcacaccctggtcacgctgatgcacgaggtgggctcctacagccttgcgcagctccacccctgtggctttgcaggatacagtgccccccccggtggtttcagacaccctcacaggttttctaccatgcagcaactgaacatggaggaaaagatgtatatccagggcagtgtctttgggaaggttgtgagccttttcagcgacagcggttttcttttattacccacttgcaggcagccaactgtagggggcacaagctcaactcctagagcacaaaaggccattgtgaatcatcccagtgctgcacttatggctctgaggagaggatcaagaaaccttgtctttcgagattttacagatgaaaaagagggaccaataactaaacacatccgactaacagctgccttaatattaaaaaatattggtaaatattcagaatgtggtcgcagttggcccagggcttcccggtatcaacagggacaccaggatttatttattctgcgaagtgatcttccgtcacaggtatttattcgcgataagctcatggagcggcgtaaccgtcgcacaggaaggacagagaaagcgcggatctgggaagtgacggacagaacggtcaggacctggattggggaggcggttgccgccgctgctgctgacggtgtgacgttctctgttccggtcacaccacatacgttccgccattcctatgcgatgcacatgctgtatgccggtataccgctgaaagttctgcaaagcctgatgggacataagtccatcagttcaacggaagtctacacgaaggtttttgcgctggatgtggctgcccggcaccgggtgcagtttgcgatgccggagtctgatgcggttgcgatgctgaaacaattatcctga

SEQ ID NO: 122374 - DNA, 4422 bp, Homo sapiens
atgaatgctcatccggagttccgtatggcaatgaaagacggtgagctggtgatatgggatagtgttcacccttgttacaccgttttccatgagcaaactgaaacgttttcatcgctctggagtgaataccacgacgatttccggcagtttctacacatatattcgcaagatgtggcgtgttacggtgaaaacctggcctatttccctaaagggtttattgagaatatgtttttcgtctcagccaatccctgggtgagtttcaccagttttgatttaaacgtggccaatatggacaacttcttcgcccccgttttcaccatgggcaaatattatacgcaaggcgacaaggtgctgatgccgctggcgattcaggttcatcatgccgtttgtgatggcttccatgtcggcagaatgcttaatgaattacaacagtactgcgatgagtggcagggcggggcagcagttgtagcgcagcatgttgctccacctccaggaatagtggaaatagatagtgagaagtttgcttgtcagtggctaaatgctcattttgaagtaaatccagattgttctgtttctcgagcagaaatgtattctgaatacctctcgacttgcagtaaattagctcgtggtggaatcctaacatcaactggattttataaatgtcttagaacggtctttccaaatcatacagtgaagagagtggaggattccagtagcaatgggcaggcacatattcatgtggtaggagtaaaacggagggctataccacttcccattcagatgtactatcagcagcaaccagtttctacttctgttgttcgtgttgattctgttcctgatgtatctcctgctccttcacctgcaggaatccctcatggatcacaaaccataggaaaccattttcagaggactcctgttgccaaccaatcttcaaatctgactgcaacacaaatgtcttttcctgtacaaggtgttcatactgtggcacaaactgtttcaagaattccacaaaatccttcacctcatacccaccagcaacaaaatgctccagtgactgtcattcaaagtaaagctccaattccttgtgaagttgttaaggctacagttatccagaattccataccccagacaggagttcctgttagtattgctgttggaggaggacctccacagagttctgttgttcagaatcatagtacagggccacaacctgttacagttgtgaattctcagacattgcttcaccatccatctgtaattccacagcagtctccattacacacagtggtaccaggacagatcccttcaggcactcctgttacagtaattcaacaagctgtcccacagagtcatatgtttggcagagtacagaacataccagcatgtacttctacagtttcacagggtcaacagttaatcaccacatcaccccaacctgtgcaaacttcatctcaacagacatcagctggtagccagtcacaagatactgttatcatagcacccccacagtatgtaacaacttctgcatccaatattgtctcagcaacttcagtacagaattttcaggtagctacaggacaaatggttactattgctggtgtcccaagtccacaagcctcaagggtagggtttcagaacattgcaccaaaacctctcccttctcagcaagtttcatctacagtggtacagcagcctattcaacaaccacagcagccaacccaacaaagcgtagtgattgtaagccagccagctcaacaaggtcaaacttatgcaccagccattcaccaaattgttcttgctaatccagcagctcttccagctggtcagacagttcagctaactggacaacctaacataactccatcttcttcaccatcacctgtcccagctactaataaccaagtccctactgccatgtcgtcgtcctctacccctcaatcacagggaccacctcctactgtcagtcaaatgttatctgtgaaaaggcagcaacagcagcaacattcaccagcacccccaccacagcaggtacaagtacaagttcagcagccccaacaagtacagatgcaagttcaacctcaacagtcgaatgcaggagttggtcagcctgcctctggtgagtcgagtctgattaaacagcttctgcttccgaaacgtggtccttcaacaccaggtggtaagcttattctcccagctccacagattcctccccctaataatgcaagagctcctagccctcaggtggtctatcaggtggccagtaaccaagccgcaggttttggagtgcaggggcaaactccagctcagcagctattggttgggcagcaaaatgttcagttggtcccaagtgcaatgccaccctcagggggagtacaaactgtgcccatttcgaacttacaaatattgccaggtccactgatctcaaatagcccagcaaccattttccaagggacttctggcaaccaggtaaccataacagttgtgccaaatacgagttttgcacctgcaactgtgagtcagggaaatgcaactcagctcattgctccagcaggaattaccatgagcggaacgcagacaggagttggacttccagtacaaacgcttccagccactcaagcatctcctgctggacaatcatcatgtactactgctactcccccattcaaaggtgataaaataatttgccaaaaggaggaggaagcaaaggaagcaacaggtttacatgttcatgaacgtaaaattgaagtcatggagaacccgtcctgccgacgaggagccacaaacaccagcaatggggatacaaaggaaaatgaaatgcatgtgggaagtcttttaaatgggagaaagtacagtgactcaagtctacctccttcaaactcagggaaaattcaaagtgagactaatcagtgctcactaatcagtaatgggccatcattggaattaggtgagaatggagcatctgggaaacagaactcagaacaaatagacatgcaagatatcaaaagtgatttgagaaaaccgctagttaatggaatctgtgattttgataaaggagatggttctcatttaagcaaaaacattccaaatcataaaacttccaatcatgtaggaaatggtgagatatctccaatggaaccacaagggactttagatatcactcagcaagatactgccaaaggtgatcaactagaaagaatttctaatggacctgtattaactttgggtggttcatctgtgagcagtatacaggaggcttcaaatgcggcaacacagcaatttagtggtactgatttgcttaatggacctctagcttcaagtttgaattcagatgtgcctcagcaacgcccaagtgtagttgtctcaccacattctacaacctctgttatacagggacatcaaatcatagcagttcccgactcaggatcaaaagtatcccattctcctgccctatcatctgacgttcggtctacaaatggcacagcagaatgcaaaactgtaaagaggccagcagaggatactgatagggaaacagtcgcaggaattccaaataaagtaggagttagaattgttacaatcagtgaccccaacaatgctggctgcagcgcaacaatggttgctgtgccagcaggagcagatccaagcactgtagctaaagtagcaatagaaagtgctgttcagcaaaagcaacagcatccaccaacatatgtacagaatgtggtcccgcagaacactcctatgccaccttcaccagctgtacaagtgcagggccagcctaacagttctcagccttctccattcagtggatccagtcagcctggagatccaatgagaaaacctggacagaacttcatgtgtctgtggcagtcttgtaaaaaacagctgcccaagcccatccaccccgcgggtcgaccagtgtttacctcagaccgaggtcgaggcgctcggtccggccgcggccccacagtaggttcccaggtcccagtcactccgctgccaagttccccaacatggactccttcgtccgctttgtggtgttacagggtctctaggacactgactccgctggctcggtccggaggcggcggcgaagcagggagcgacccagcaccgcccttcgcccacactgcggatggtgcgcatgcgcagcgcgtggactttggcctctgccctcctttggcagttttacaggctgcgtcgcggaggacaatgaaagaggctttaagggaactggacaggaaggattttgcgcaggccaccctgacgcctgcccgggatgagtttcctccccactttgccgcggccccgccgaccgaccgcttcactgccgccttcctgcattctcgcagactacgttgcggcgtcccctgctcccgccctgaggacgtcgcttttctggcactttcatcctatgcattctgttga

SEQ ID NO: 122375 - DNA, 1333 bp, Homo sapiens
  misc_feature (1)...(1333): n = a,t,c or g
atccaccaacatatgttcagaatgtnggcccgcagaacactcctatgccaccttcaccatctgtacgagtgcagggccagcctaacagttctcaaccttctccattcagtggatccagtcagcctggagatccaatgagaaaacctggacagaacttcatgtgtctgtggcagtcttgtaaaaagtggtttcagacaccctcacaggttttctaccatgcagcaactgaacatggaggaaaagatgtatatccaggccagtgtctttgggaaggttgtgagccttttcagcgacagcggttttcttttattacccacttgcaggataagcactgttcaaaggatgccctacttgcaggattaaaacaagatgagccaggacaagcaggaagtcagaagtcttctaccaagcagccaactgtagggggcacaagctcaactcctagagcacaaaaggccattgtgaatcatcccagtgctgcacttatggctctgaggagaggatcaagaaaccttgtctttcgagattttacagaatgaaaaagagggaccaaataactaaacacaccccgactaacagctgcccttaatattaaaaaatatctggtaaatattcagaatgtgggtccgcagattggttaaaagagaccatggaaaataacctatccagtgcctagcccattagtaaacatggaagcctccctccaccccttgcccaaatgccctttatgaaccttaattttacagttccagagtaaggaacaagaaaaagactcagaaatgctgccagtgaaaaataattcccacttacacagtgggggactcaaagtcagccacatttcacatactgttactgaagaaagcaccaagtcttaatggaacaaagaccatagaatgaattattttatctcctcccatgatgctgagaggaagcttcgtattctgatctctgagtgaatccctttgttctctgtttaaaaaaatctaaaaagaaaaaggaaaaaaaaaaaagaactgctgtgggattgtcaaccagcttatttgcgggaggtttaaaatctgataaatcctgagggaaactggtatgatcaaaattcagtcccttccacattggaatatcctgggaattttgaaaaacctacttgaccaaatgaattaaaacctttaaatatttttatctatatccaaaagggaccccttttttatatttccaaaaccgtttaacctggttggaatatttaaaaaaagtttaagcacacttttacccccgatctcaaagggggccaccaatttctacctttggatcgggggtttggtttaaaaatcataacctg

SEQ ID NO: 122376 - DNA, 1032 bp, Homo sapiens
ctagctcgcagttgaccccccgggagaggatcggcgcatccggccgcccgccagctccagacgccgggctccgcagcgccgctgtcctagcaccagggcccggcaagcaggggaacgggaccgccgggaccgatcaaggcgcgggcgcccagcaagagccgcgcccggggtctgcgcgccgctcagcgcgctcgcctttccgcccgcgccagggctggctgcgcgcaccctgagcgcgaggagccgcgcgcaaacttggtgccccaggaactttccaggagacactgcctccggggacgagagaccgtaagtgttgctccggagatgctgtggttcattagaatacactaacagacggtgtgaaccgattaaaataccgcaatcagtgccaattctactacggcgaagtaaagggaaatctttatttttcctgcatcctgctttaatgatcaaataggcactagtcttaatgagctcgttaatgcacatggccgccttagtgttgctgaactccggtaactttcttctgctttttttctgaagaccttttaattcagggtgtgcattttcctcttgcgtgtcacaagtgctattcaggctttctctagttgaatcccttttactctgagagtttttagcagcagctttctcagccatctcccctttgtggatcccaacatccttgtgagcaggtgttgcagccctcaggtgaggaagcagccggaagaggttctctccatttttaatgaagctcacagggctgtgatcaaatgtgatgggtaatgccaaaacagaaggtatcgtcatggcaacaggagtatgactttcaggccatgataccactttgccgcaaacttgtgtgtattgtaattgagtatactgtaaattggatctgaatacctttgctggaaaggatttgaggaggttcaacaattcctgtgtggttctaggtgggtacgtggatgccttctaagtgtggtctcagaaatccaagggcagagtaaatctcaagtcattgaagctccagctttt

SEQ ID NO: 122377 - DNA, 801 bp, Homo sapiens
atggcagagggcatggcaatgctgaggtggaccaggctgggcacctggcctgacgattcttttgatgaaatggacagtacgctagctgttcagcagtatacgcaacagaacataagagtcaagattgctccaatactgacaaaaatcttgagccacctgaaggccaagatgcagattgtcatggattttaagcacccagatggcattgcagtgccagttatgttgcctcgtcggagtttgctggtgatgacaggagaatctagatacctttggacccatgggtcaaaaaattttgtgaatgctggtgctcaggccccactcctttcagagaagtccaagggagttgaattaacatctaaaagatggctgctcctgcaggtacctaagagcaagaaactgatgtcagaaaacaggttatggaaattcttgaagcccaatactccactggaatctcggatttctaagcagtggtgtgaaattggtttccaaggtgatgatcctaaaacagactttcgaggaatgggacttctgggactgtacaatttgcagtatttcgcggaaagggatgccacagcagctcagcaggtcctgtctgactctcttcatccgaaatgcagaagagacgcaagctggtgtaagtgccacatgctgtcaagccgtgacagtgacatgggaccacaatggataaaaagagacaatgagcacatgtggctgcaaaggctggactgcacgtggaataatgccttcatctacagcagctgcagctacggtggaaattcagggctcctcaggcaggcctga

SEQ ID NO: 122378 - DNA, 1227 bp, Homo sapiens
ttatttcgtggccgtctccctcccttcttggccaaactgcggcgctttgtgcaaacggggcaggtcccgcggggactccaccgggacgtggccccgtctccgcgcgttttggcaggcggggggctgcgtgtgtctgctcccctccctccccctctcccctcgctcccctctcccggtgacgattcgccgtaatgtggtggcaggaagcatgacgccgtgggccgaggctgcctctgctctcgtcgctcccggcggctgcaggcagcgggcgcgcagcgcgggcggcagccgagctacctggcgggggcagggccggagcgcggcgctgtcctcacccccgctcaggtgcagggggagtccgcgcggggcggggggccgagggcggccgcgggacccccggccctgctgtccgctgccagctggccggagcctctgccagcccgagcccacgttcgcccccctgaacggcagctggcgcttttcgtctgccccacaagaggttaatctttgttggtgttgcagcttctttgtggcttccccaggacttgtatcctcggctttgcaaacttgcccttttcccagccgctttgcaggaggctgcggagacgaagatgagcggaaagttggaaaccagcaggcatcacaggacggtccctttggcctcgtagctgtgctgagcctttgggtctcctgggccctagctgcagctccaccactcatcagcaggatacctttggccatgaccttcaccattgctgtggctccagcaaaagggctgtggcccctcctccatggattagaacctgtggctgagccacaatccagcacggaggataacagcaaggatgggtgtgcattcagggtcttcctctgcctacggtcttcctcacccacgattttccccaatttattggatgctccaaatatcctcacaccgtagcccatgtcatttgcacagcaacccttgccttcacattcaggagccagagctcttgggtcaatcaggtagaacctgagtgcaaaagctgcagcaactcccgcaagtatcgtgggcgtccgctggccatggaagcctgtgtttccttgctggggtggggggtcactcagatttcgagtggccactttgttccctacatgccaggcctgcaggaaccctgctacctggggatgggcagagtgaacccagctgcagactgctgagaagaaaagtgacttgaagccgggcat

SEQ ID NO: 122379 - DNA, 1745 bp, Homo sapiens
gactttcaagagcggttgagcatgaaagaccagctgatcgcacagagcctcctagagaaacagcagatctacctggagatggccgagatgggcggcctcgaagacctgccccagccccgaggcctattccgtggaggggacccatccgagaccctgcagggggagctaattctcaagtcggccatgagcgagatcgagggcatccagagcctgatctgcaggcggctgggcagcgccaacggccaggcggaagacggaggcagctccacaggcccgcccaggagggctgagaccttcgcgggctacgactgcacaaacagccccaccaagagtggaggcgccaggcacggaatccgaccccgtctgcccaccgtcctggagtcggagcttgtccagcggatccagacacttcccagctgctcctgaaccttcaggcggtaatcgcccaccaggacagctatgtgagacgcagcgggctgccatccaggagcgggagaagcagttccggctgcatcgacgcgtgggaacctgctgctggagcaggagcggcaacgcaacttcggaagcagcgggaggagcgcgcggccctggagaagctgcagagccagctgggcacgagcagcagcgctgggagcgcgagcgccagtggcagcaccaggactggagcgtgcgggcgcgcggctgcaggagcgcgagggcgaggcgcggcgctacgcgagcggctggagcaggagcgggccgagctggagcgccagcgcaggcctaccagcacgacctggagcggctgcgcgaggcccagcgtgccgcccagcccccaagccacctcccagcttcaacggggaagggctggagggccctcgtgtgagcatgctgcatccggcgtggggccagagtacgcagagcgccccgaggtggctcgccggacagcgcccccaccgagaaccggctggccaagagcgatgtgcccatccgctgctcagcgccaccaaccagttccagaggcaggcggccgtgcagcagagatccccaccaagctggcggcctccaccaagggtggcaaggacaagggggcaagagcaggggctctcagcgctgggagagctcaggtgagccggcccaccccttcgcctgggcctggaaggtgcaactggtcaggctctagcggctgctgggagccaggaaattcgggacacctgtgccatcctctggagaggaaaccagaaggcacagctggcatcgtggctgaggccaccccacacagggcctgtttggtctccaggcccaaaactgagatgatccaccctgcatcttctcacctcaaccctcaaaacagtgggatggggaccaggagccttagaaagggcacgggcaagaaggcagagatccctggccacgtgggatcagcacagccggacagggacagcgtccttcgacctgaagcagcagctgctgctcaacaagctatggggaaagatgagagcacctcacggaaccgccgctcgctgagccctacctgccccggcagacacagtcctgcgcccccaccagaccctggcttccccgcccgagcccaccgccagctgacagcccctccgagggcttctctctcaaggcgggggcacagccctcctgcccgggcccccagctccctcgccactgccggcacaccactcagcgccaaggaggacgccagcaaagaagacgtcatcttctctaaaagggccgtgactcaagcaaaccactga

SEQ ID NO: 122380 - DNA, 1161 bp, Homo sapiens
tggtgaactgggccacctgctccaggccaggcctcaaggacacgaagatgaattacaacaagtcccctggctttgaggtgtccataagcccagggggagaaagtatccaaacaaatgatcatgttactctgtgaccagtgctctgatgggcacaggaggggtcagggagaaacacccaccagcagtacaagatccttgatgtcatgctcaaggggctctttaaggtgtgtgcaggcagggggcagctcatggcaggtccagtctttgatctaggcactgatgggtaaacaggagttcagctgaaggatggtatggtctgccctgccccgccctgtcctccgcaccacccgatcttctctagctgctccttctctcctgttctttactttgaccacaactccaactggaacctcctcatccgctggggtatcagtttctgcaaccagacaggcgtcttcaaccaggggccccactcgcccatcctcagcctggtaaggactggggtggaggtggcccgggagccctctgtcgggtagtggactaggatcctcacatctgccttcatgagctgccagggcctatgcctgtgtctgctttgcctctgctgggccataggacaccgaggcctgcaggggcggaaggagatccgaaaaggcccaaggatctccagatcccagtctgagttatagccctggagcagctcagggctcagggggccacaaggaggcaggtcgggaggaagaagaggtggaggtgtggttgtggtggagagcaccagctagccccttccagaaggggaggccacatttgcccggccccctggagctgggtctgagccccagctgaagggactgagcctcagatggctggattttctctcaggggcctccttctgaaagggcctttcaaaggattttatgctggaaatatgaccctgtgcagactgctgggggaggcaggaggatgcctgcctggaccctgttggtggctgaagacctctggccagctggcttccgcccttggtggggaagcagcagaactaggttctgagccacgggtcagggtgccaccctgctgctggccccactgtgtcacagagctgcctggcacaggtcccagcccctctgcagagacacaataaaagccaacagaccctttaaa

SEQ ID NO: 122381 - DNA, 339 bp, Homo sapiens
tcactggatccctggacatttcaacaaggtcgcgaggtcctgagttagtgtgggttgatctctcctctctgagatatttgctacttccagctcaccagactcgagcagcatgataccaccaatgtggctgaccagcatgatgttctgtgtaggtggctgggcacagaggaagctcgggctttgcggaggaacaaacacagacgatgacggggacagaggttgccggtttctagaaagtggctgttgggcacagaggaagcttgggctctcaggtgatccacccgcctcagcctcccaaagtgctgggattacaggcatgagccaccatgcccggcccat

SEQ ID NO: 122382 - DNA, 510 bp, Homo sapiens
tcactggcgatggttctgtaggctgtacaggacgtataatgacttctgctctggggaggtctcagggaacttacaatcatggtggaagatgagggagaacagatgtcgatctgggttcttgacaaagaccttggtgctccccatctggtactggtcggctccatgttgaccgcccgaagcaggtgctggacgccctggcgttcgtcccacgccaccgcggccacgtctgagggcgagggctggggtgtgggagtgctcatagcagacaggcctggctgggcgtctgatgaaggggatggcgagggcgggggtggagggctcctcacctctgcggaatttggcgaactggcggcggtaggcgaagccggctctgcgcaccctatgttctccttcaggcccaggtattccacctggtgcttgactcatattggccagggtggtcttgaactcctgaccttgtgatccacccgctcggcctcccaaagtgctggggttacaggcatgagccat

SEQ ID NO: 122383 - DNA, 820 bp, Homo sapiens
gctcactgcaacctctgccttccaaatttaagtgattctcttgcctcagccaactgagtagctgggattacaagtgtgcaccgccatacctggctaatttttttattttttatttatttatttttttgagacggagtctcgctctgtcaccctggctggagtgcagtggtacgatctctgctcactgcaacctctgcctccgaggttaaaacgattctcctgcctcagcctcccgagtagctgggattacaggcacccaccaccacatccagctaatttttgtagttttttagtagttacgggatttcaccatcttggccaggctggtcttgaactcctgacctcgtgatccacccgtcctcggcctcccaaagtgctgggattacaggcgtgagccaccatgcccggcccggaccactgtctctagcaaacaatccgagaagccaaacaaggacctctgcaacagtctgcccagaacagctaggacttgattagtttccctcatttttgtccccacttctaacttcagaccaaccagagagaaagccaaatatgctcccctagccgatcacagtggatgagctgcttccccttagccagccgccagcttccctaagcgaacagcctccagtcagggcaggcttgaagctttcccattttcctctataaaacttgcccactcctctgcctgcctggactatctgccagaatttgagtgaggtggctggctcccttgctataaaagctctgaataagtagcctttaccggttctcatttggttggtcatttatttccacatgtgtaacaaaccactctgaa

SEQ ID NO: 122384 - DNA, 422 bp, Homo sapiens
cgcactcagcggcgagaaggccctcatcgaggaggtcttccccgagaccggagacgtcatgtgcaaactccgtcaacgccggctggaaccaggaccccacgcacgtcatccgcttcccgctcaatggctactgccggctcaactcggtacaggtgagggctgcacgctgccccctccccgccgcacccccggcgtccgcggagccctccaggggcagagtgagctggagggaggcgcgatccctgaaacggtgaagccccccgtgccatcctacaaaaaaggcaacaatgtgtcgatgcataatttatgtccctctcataattaaatgatggcgcctgggggatggacttaaaaaaatcgatctgtactttttttttttttttccaaaaggatgttctataaaaatggcccagagtattttc

SEQ ID NO: 122385 - DNA, 684 bp, Homo sapiens
ctagtccaggggttcctgcttgattcgaacagcagtgggggtgggctgcggccgccgctcctcccggcaaagcacatactcgctgaactgggaggagtccacaccgcccccacaggacgcagccacgctgaaacccctctggaacagccgctccaggacctgtaccgagttgagccggcagtagccattgagcgggaagcggatgacgtgcgtggggtcctggttccagccggcgttgacggagttgcacatgacgtctccggtctcggggaagacctcctcgatgagggccttctcgccgctgagtgcgatccgctcgcccaagtcgggcgtgacgcgcaccaccaggcagtcacaggcccggctgcggcgccgctgctcctgctcctgctgccagcgctccagctcgcgcaccatgggctggagctgatagtagcgcgcctcctcgtacagcagactgaagtcttccaactcgagtctgttgttccctctctgctttgcacactgggtctgagagcggggatctgggtccaggcacacaaatcgaggggaagcagaattattctgtgactgtatggtttcttgcacggtgagagtttcttgctcacggccatcatgtctgggggttgccagcatcgtgcctgcgtgtgatctcatcatgaagctcagacttcctcccagcat

SEQ ID NO: 122386 - DNA, 1088 bp, Homo sapiens
  misc_feature (1)...(1088): n = a,t,c or g
ctagtccaggggttcctgcttgattcgaacagcagtgggggtgggctgcggccgccgctcctcccggcaaagcacatactcgctgagaactgggaggagtccacaccgcccccacaggacgcagccacgctgaaacccctctggaacagccgctccaggacctgtaccgagttgagccggcagtagccattgagcgggaagcggatgacgtgcgtggggtcctggttccagccggcgttgacggagttgcacatgacgtctccggtctcggggaagacctcctcgatgagggccttctcgccgctgagtgcgatccgctcgcccaagtcggggcgtgacgcgcaccaccaggcaagtcacaggcccggctgcggcgccgctgctcctgctcctgctgccagcgctccagctcgcgcaccatgggctggagctgatagtaagcgcgcctcctcgtacagcagacttgaagtccttaaagtcatcccggaagcagcagcttggacgtccgcaggaagcttcaggacgtagcggaaaatctccccatcccggtcaatgaaataatgttgctttcaaactgtccaggacggatgggttcagtgccattgaagaggcggcttatccttggagtcagggtacttggtgagcgtgggccaggctgcatggtgtacatgtgggccgcccacatcgatgtgcacaggtgcattggacttggtgagctgggctggcagggggatgccctgggcaagccagcggagacacaaggcgaccgggtgagagacaagccggggacatgtttccttccctccgcggtgccggtgctgccgtgtgtgtgaagcgaggacccgctcggccgctccttgcggtgaggcatctaggcttccatccctgcccagagtatcgttggaagccccaggctataagccttaaaatgaatctccaaggtttctcccaacaagcgcatccgtgcgggaccacgaccctctttccgagaccactcggagccggcagatcgggctcgggcgcagcaaccacccccannngctgccggtctcgggcgccgggcgcagcttcgccgcctatgctcgctg

SEQ ID NO: 122387 - DNA, 345 bp, Homo sapiens
ctgcacccaggtgaaataaacagctttactgctctcacacaaagcctgtttggtggtctcttcacacggacgcgcatgaaatttggtgctgtgactcggattgggggacctcccttgggagatcaatcccctgtcctcctgttctttgctccatgagaaagatccacctacgacctcaggtcctcagaccgaccagcccaagaaacatctcaccaatttcaaatccgccactcccagagcccctggaactctggcccaaggctctctgactgactccttcccagatcttctcggcttagcggctgaagactgacaccggccgatcgcctcggaagccccctagac

SEQ ID NO: 122388 - DNA, 1278 bp, Homo sapiens
atggtctgggggcttctgaggcgatcgggcagtgtcagtcttcagccgccaagccgagaagatctgggaaggagtcagtcagagagccttgggccagagttccatgggctctgggagtggctgccagaaaatgtgctcagcttcatccacatcacagttatctgtcagcacacgcagagaatgagcttcccaaaaaagatggctatattgagcatttatgtagcaccttccccctcaacaattgaaaaaccttccataggggagagatttgccatctttattacattgctgatgagaaatggagatctaggagaagccagctgtgatgctgtaaaggcactcaggcagccctggggaaaggcccaggtggagaagaaccaactttctcagaccaaatgtccagccatgtggcattttgaaagtcagaacccagctttgctgatagtccgggaatgtctggagggctggaaggcttatccccaaagcactaaagaggagagacttctccatccagaagagggagctgggttcacaagttcaagccaagaaaaatatgtcagagtcagagggcaaaggctatggcccaccccatttttctctcttcagatgattgacagaaaagaaagacatttaataccaccaaatgttataataaagaaaaggggagttggccaagatggccgactggaagcagttagtgtgcacagctctcatggagaggaatggaagggacaagtaaatacagaaccttcaactgaaacatccaggtcaggagatcccatcatgaacccactccaccagggccttaagtctgacatgcagagctacatggagtctcagcagagcagcccctcagccacacatgaagcccagggagccttagatactcaggcttcctggaagaagcagcagcaactccggaaaagcaggagggcaataagcagccctcaggcagatggtgtacagcatgggcatgaggcaagacactgtcatgacgtactcaagagagaccgacagaccagctggccctgcaagatgagcagtctagcagaagaggtggtagcagcagacacctggctgcttgacaatgggacaatgcaggctactggaagggctgctcaagtcagagagcaaggcaagggcatggatttagggcagtacatttcctgttatctcatgacactcagtagggcaataaaacaaaaggaaaacaagaaagtttgctttcagcgcctggggaagccaagggtcaagacagcttcagttcagaagaagtga

SEQ ID NO: 122389 - DNA, 1317 bp, Homo sapiens
ctatatttccagacatctgttatcacttaacccattacaagcccgctgccgcagatattcccgtggcgagcgataacccagcgcactatgcggatgccattcgttataatgctcgaacgcctctgcaaggttctttgctgccgttaacccgtctggtttgggcatgatactgatgtagtcacgctttatcgttttcacgaagctctctgctattccgttactctccggactccgcaccgccgtgttcttcggttcaagtcccaacatccgggcgaactggcgtgtttcattagcccggtagcatgaaccattatccgtcagccactccactggagacgacggaagatcgttgccgaagcggcgttccaccgctcccagcatgacgtcctgtactgtttcactgttgaagccgccggtagtgaccgcccagtgcagtgcctcacgatcacagcagtccagcgcgaacgtgacacgcagtctctctccgttatcacagcagaactcgaacccgtcagagcaccatcgctgattgctttctttcacggccactctgcctgtatgtgcccgtttcgatggcggtacagcaggttttcgctcaagcaacagcgcattctggcgcatgatccggtaaacacgtttggcattgatcgcaggcataccatcaagttctgcctgtctgcgaagcagcgcccatacccgacgataaccatacgttggcagctctccgataacatggtgtatacggagaagcacatccgtatcatcagtgtgacgactgcggcggccatccatccagtcatcggttcgttccccatccccgggcaataagggcgcgtgcgctatccacttttttgcccgtccatattcaacggcttctttgaggagttcattttccatcgttttcttgccgagcaggcgctggagttctttaatctgcttcatggcggcagcaagttcagaggcaggaacaacctgttctccggcggcgacagcagtaagacttccttcctggtattgcttacgccagagaaataactggctggctgctacaccatgttgccgggcaacgagggagaccgtcatccccggttcaaagctctgctgaacaattgcgatcttttcctgtgtggtacgccgtctgcgtttctccggccctaagacatcaatcatctgttctccaatgactagtctggcagccactcccagagcccctggaactctggcccaaggctctctgactgactccttcccagatcttctcagcttagcggctgaagactgatgctgcccgatcgccttggaagccccatagaccat

SEQ ID NO: 122390 - DNA, 882 bp, Homo sapiens
tcatccctctccttcccctggccttaaacacaggagctccttaggatctgttctcgaatccactgctcctaccatccggctcattttctctgctgccagctggacattcccatggggacggcccgtcagcatctcaaatgcactagtttcaaaaccaaactcatcctgtcccctgaccagacccagcttcacttccagccgtccaatcacatcagtgacacactgtgacacaccttgagcctgacatacaacagccccgtgccctggctccaggcaatctttcagctttatcgggtaagtagggttcaggggactatcttggccacgatccttgaagtcacctacaatttggaagtggcaaggctgattcccagctgtgggtgtgaaacagaggaaatctactgatgaaaggaggctcacctgggcaccaaggagcttcatcaagaaaagagccagaaaaacatctgagacccactgattgcagaacacgcctaaaaacgcatggtgggaagtgaacacaggaagtagctttataccacaaggaagagtactctgaagctggccctcttcttcagggacctttgaaggaaggataagaggccatggaaccgtggaagggagtcccacttggaagggtaaatacagaacaaatagccccattttctgaggcagaggggccaagagagattcattagggttcgaggaaagtaagaaaggctgcccaaggcttgaatgaaggaccgagggagctgttctggcagccactcccagagcccctggaactctggcccaaggctctctgactgactccttcccagatcttcttggcttagcggctgaagactgacacagcccgatcgcctcggaagccccatagaccat

SEQ ID NO: 122391 - DNA, 513 bp, Homo sapiens
tcagggatcaagaggggtcagatcactaagggccttcaagtccatgatagggactctggattttattctgagtgagacaaaaaggcattggagagtttccactggagaagggattgttgtaaaaggatctagcttttctagatctgtttcagtttctagaactgttgggagatctagccttttcacctggagaggataggaatgtcttggttctgccaggtctagagaatcctggaaggagagtctttctgttaccacaaagcaggcccccatcagacattgaatctgctggtgccttgattttggatttcccagcctccggaactgtgagaaataaatttctggcagccactcccagagcccctggaactctggcccaaggctctttgactccttcccagatcttcttggcttagcggctgaagactgacgctgcctgattgcctcggaacccccctggaccatcacagacgccgagcttcgggtaactctcacagtggagggtaagtccat

SEQ ID NO: 122392 - DNA, 410 bp, Homo sapiens; identical to SEQ ID NO: 114507

SEQ ID NO: 122393 - DNA, 741 bp, Homo sapiens
ctaatgatcagtgatgttgagcttttttctcctatgattgttggctgcatctatatcttcttttgtaaagtgtctgttcatgtcttttgcccactttttaatggtgttgtttgtatttttcttataaacttgcttaagttccttagagatgctagattttagacctttgtcagatacatagtttgcaaatattttttcccattctataggatgtctgttttctctgttgatagttttctttgctgtgcagtagcaccttagtttaattagaaccaacttgccaatttttgcttttgttgcaattgcttttgccatcttcatcatgaaatctttgccagttcctgtgtcttgaatggtattgcctagattgtcttccaggacttttatagttttgggttttacatttaagtctctagtccatctggcagccacttccagagcccctggaactctggcccaaggctctctgactgactccttcccagatctcggcttagcagctgaagactgatactgccgaatcgcctgtggcttgtttttggtttggtttctatgctccatagctactgagactgacatctcttctcttgttgcaactttaatctgtccaaccaatatgcaggttagtctctccccacctgagagtttaggtaccaagtttcccaaggccttgccaattgctagcttctccctatatacctccagactcccaggagctatcccccatagatggccagacat

SEQ ID NO: 122394 - DNA, 615 bp, Homo sapiens
atgagaaaaagtttgctgtccactgctctagagaatggaatggctagatccagccagaaaagcatctctgggctttccttagctcatgggcagaagggaggacaagatgtatctgcccttttgctggtggtgtcccttaagaagcaggttcttctggcgcacaatccttttataaccattgctagggtcatcgtgccaaacctcttcacacggacacgtgtaacatttggtgccaaagacctgggacagaaggactccttcgggagaccggtcccctgtcttcgccctcactccgtgaggagatccacctatgacctcaggtcctcagaccagcccaaggaacatctcactgatttcaaatcgggatcttgcttcaagtgccggaaatctggccactggaccaaggaatgccagcagcccaggattcctcctaagccatgtcccatctgtgcaggtccccactggaaatcggactgtccatcttgcccagcagccactcccagagcccctggaactctggcccaagactctctgactgactccttccccaccgatcccaaaggctctctgattgactacttcccagatcttctctgcttagtggctgaagactga

SEQ ID NO: 122395 - DNA, 729 bp, Homo sapiens; identical to SEQ ID NO: 114505

SEQ ID NO: 122396 - DNA, 330 bp, Homo sapiens
atgggggctgtctgtgaggccttgcggcagtacggcccagaaggggacagacttaccttccactgtgagagttacccgaagctcggtgtccatgatggtttagggggcttccgaggagatccggcagtgtcagtcttcagccgtgaagctgagaagatctgggaaggagtcaatcagagagccttgggccagagttccaggggctctgggagtggccgccagaaaatgaaaggaaatgaaattaagagaagggagagattgaagggtggcaccaagattgaaaggagaaagtggttgagggatagtgagagaggttggagaagagagtaa

SEQ ID NO: 122397 - DNA, 990 bp, Homo sapiens
atgggcaaagactttatgactaaaacaccaaaagcaattgcaacaaaagccaaaattgacaaatgggatctaatcaaactaaagagcttctgcacaacaacagaagctatcatcagggctcaggaaacaaatccaggatgtgaaaggaagctctgcccttcgctggactgtagtgagaagcggatgggtgcggaggaggaaggcaagtgggagggtcaggcttcaaccagagaggagcagggggcttccgaggcaatcaggcagtgtcagtcttcagctgctaagctgagacgatctgggaaggagtcagtcagagagccttgggccagagttccaggggctctgggagtggctgccagactgccttcagaaaagctgcagctgatcccagcacatgactcacacagcatctacctgtcacattccaagtgcctcgctgtgtcgtgggcatcaagtggcaaaatgaacaaagatcgaatgtcaggaggccctatccagggtcacatgcttggccgcacttcccctttcaagagctggtgggagaaagattttgagcagggtcaccgaagacaggttaagccatctcctattggcctacacaagcatcccacccagtttcctggcttttatcctagatcagtacaacccattctctatatgcagctagagggcccagagggcagagctgagagtcacagcagtgaacaaggagctcttgttgggggaaggaggcttcgttgggcgatgggaacagaggggtggtggcagcgcttcaccacttcactggggcagcagccaggcagcactcaggtagccctttggaacgtgggccacaccctcaactgtgatcacccaggtcctgagtggagggacactggctggaaatcctcaggcctgaagctgagtcctgcctcagaagcagccccaccagccagccagatgctggcagctgctctcccactggctgcccagacctgccctcctatgtaa

SEQ ID NO: 122398 - DNA, 588 bp, Homo sapiens; identical to SEQ ID NO: 116089

SEQ ID NO: 122399 - DNA, 678 bp, Homo sapiens
tcaacaagtggcctgacccttgaagggtttcttcaccgtgtctggtaaagtttccaaattagttacaggaaactcaatacctcgcacataagcccattccttcttctttgtttggtttattccataggcaatggagcccccaatttgtttttcaactggcacagagtcgatgctcatggaatgatacgtgatggggagagtgagtaagtgaatgaatgaatgaatgctattcctgtagcgagcccatgcatggtttgttctctgatcgtgcatgtgcttggctctagacccatgtaaccatggtgaaggccaccaaccagatttcagtggagtgaagttcaggaggcatggagctgacaaccatgaggcctcggcagccaccgccaccaccgccgccgccaccaccgtagcagcagcagcagcagcagcagcagcagcagcagcagcaagagtaactctgactggcagccactcccagagcccctggaactctggcccaaggctctctgactccttcccagatcttctcagcttagcggctgaagactgacgctgccggatcgcctcggaagcccccagaccatcacggatgccgagcttcgggtaactctcacagtggagggtaagtccgtccccttctgggctgtactgccgcaaagcttcacagacagcccccat

SEQ ID NO: 122400 - DNA, 411 bp, Homo sapiens; identical to SEQ ID NO: 114508

SEQ ID NO: 122401 - DNA, 534 bp, Homo sapiens
atgagggtgagaaacagggaagaaggaaatgtggggaaatggggtgaacgtcaggtggatcagagagatgcagtcatgagggtcaggtgtggtatctggaataatgtgggagaccggattgaagtccgggccgagaacaatggtaattgtgggactcaacaaagagtgggtacaactgaaggagccgggggagcagaaagtataagtgtcaggcttccgaggcgatcgggcagcgtcagtcttcagctgctaagccgagaagatctgggaaggagtcagtcggagagccttgggccagagttccaggggctctggaagtggctgccagatgaatcctctgtctggccggccccaggttgtctgcttctttactgcacacatgttgacaaagaaaagggaagaaggagcctccatgttgaacatgccttgcttccagtgaaaggaagagatgatccaagcaaatttaggaccaatagcagactcttcacactgcctggggatagagggaccaccctgggctcctcttactcctgg

SEQ ID NO: 122402 - DNA, 774 bp, Homo sapiens; identical to SEQ ID NO: 116096

SEQ ID NO: 122403 - DNA, 825 bp, Homo sapiens
atgactgatacacaagtaaacgagcagacaatagaaactgccaatccatctgaccttgcccctcctccccaggctgctcctcaccaggccaagccaggtcccaattcttcctcaacctccactctcccaccctataatgcttctatcacctcacctcttcacacccagtctggcttacagtttctttctacccagagggaccagaaggccatcttattctcaatatgtattttattacccaatccactcccaacattagaaaaagctccaaaaattagattccgccctcaaaccccacaacaggacttaattaaccttgccttcaaggtgtacaataatagagaagaggcagccaagcggcaatgtatttctggattgcaattacttgcctccgctctgagagaaaccccagccacatctccagcacacaagaacttcaaaacgcctaaaccacagtggccaggcattcctccaggacctcctcccccaggatcttgcttcaagtgccggaaatctggccactgggccaaggaatgcccgcagcccaggattcctcctaagccgtgtcctatctgtgcaggtccccactcgaaatcggactgtccagcttgcccaaaagccactcccagagcccctggaactctggcacaaggctctctgattgactccttcccagatcttcttggcttagcggctgaagactgatgctgccggatcgcctcggaagcctgggctgtactgcctcaaggcttcacagacagccgccattacttcagtcaagcccaaatttcttcctcatctgttacctatcttggcgtaattctc

SEQ ID NO: 122404 - DNA, 1802 bp, Homo sapiens
atgcccgggcaccaaaaagcacctctgagacccgcagtttccaaaaaggtagtcaatgttggagaaaggcaaaatcaagtaattattgaaaccggaggggattttgccgatttcggaaccaccatcaaacaggattttcgcctgctggggcaaaccagcgtggaccgcttgctgcaactctctcagggccaggcggtgaagggcaatcagctgttgcccgtctcactggtgaaaagaaaaaccaccctggcgcccaatacgcaaaccgcctctccccgcgcgttggccgattcattaatgcagctggcacgacaggtttcccgactggaaagcgggcaggggcttccgaggcgatcgggcagtgtcagtcttcagccactaagccgagaagatctgagaaggagtcagtcagagagctttgggccagagttccaggggctctgggagtggctgccagaaaataccagaaaatgaaaggaattgaaattaagagaagggagagattgaagtgtggcgccaagattgaaaggagaaagaggttgaaggatagggaggttggagaagagagtaaaaagaggccacttactggatttgaaattgaaccacccaaagtcactgtgatgcccaagaatcagtctttcacaggagggtctgaggtctccatcatgtgttctgcaacaggttatcccaaaccaaagattgcctggaccgttaacgatatgtttatcgtgggttcacacaggtataggatgacctcagatggtaccttatttatcaaaaatgcagctcccaaagatgcagggatctatggttgcctagcaaaagcccctaagttgatggtagttcagagtgagctcttggttgcccttggggatataaccgttatggaatgcaaaacctctggtattcctccacctcaagttaaatggttcaaaggagatcttgagttgaggccctcaacattcctcattattgaccctctcttgggacttttgaagattcaagaaacacaagatctggatgctggcgattatacctgtgtagccatcaatgaggctggaagagcaactggcaagataactctggatgttggctcacctccagttttcatacaagaacctgctgatgtgtctatggaaattggctcaaatgtgacattaccttgttatgttcagggttatccagaaccaacaatcaaatggcgaagattagacaacatgccaattttctcaagacctttttcagttagttccatcagccaactaagaacaggagctctctttattttaaacttatgggcaagtgataaaggaacctatatttgtgaagctgaaaaccagtttggaaagatccagtcagagacaacagtaacagtgaccggacttgttgctccacttattggaatcagcccttcagtggccaatgttattgaaggacagcagcttactttgccctgtactctgttagctggaaatcccattccagaacgtcggtggattaagaattcagctatgttgctccaaaatccttacatcactgtgcgcagtgatgggagcctccatattgaaagagttcagcttcaggatggtggtgaatatacttgtgtggccagtaacgttgctgggaccaataacaaaactacctctgtggttgtgcatgttctgccaaccattcagcatgggcagcagatactcagtacaattgaaggcattccagtaactttaccatgcaaagcaagtggaaatcccaaaccgtctgtcatctggtccaaggtaaatgatacatctagttatatttcctga

SEQ ID NO: 122405 - DNA, 988 bp, Homo sapiens
agtgtggtggaattcgagttggggagttttaagaggtttagaagcctggcccgtcaatacccacaacaggttatggaggcaagggaaacaggcccttgaaaagaaggtaatgtggcgtgggtagcctccgtattgattaagaaggggacgggcttaccttccactgtgagagttacccatagctcggcatccgtgaatggtctagggggcttccgaggcgatcgtgcagtgtcagtcttcagctgctaagccgagaagatctgggaaggagtcagtcagagagccttgggctagagttccaggggctctgggagtggctgccagttctttggcccaggcccccagccacgatttcgacttggaacttggctctctgcatgaagctgaaggaattcctcacagccctgctgatggcctagatgtctcagagctgaattattcagtcagcaactcaacaaatatttatccagtgtgttcagcatgccaggccctgtgccaggacctggagacaccatcctgtcctcgaggggctgccgtacccgttggggagatgcagagcctagctacggccacacagcaggaaaggaccaggccatgggtactggcgtgggctgagatccccagcttcaggctggttctgggcacataccagggagaaatgtttgtccaggagaacgtatctgctggaggggcaccccagattagatccaagcactcccacgtactaaccaccactggagaaagaagtagcacaaggaagggacttaatacatgcttccggatgcctatggagctaaattccactggaggcccttcagggaccccagggctgcccccaattttcccaagtctgctgtatcccagttattccgacagtggagatgaaacagggcaggcagcaattggcatcggatttccaggaccagcaggacttggaattttacgagatcttgagttggaagccaggaatcctgataataccacctag

SEQ ID NO: 122406 - DNA, 1671 bp, Homo sapiens
atggaactggtcccggaggaagccactgctgtgtctgcccgggcatatacagggcggtggcccctggatgctgctgcaagaaccatccttgtgactgctcctggagtggggcataccaacattgttttatgtggacaagcatccctagatgcttacattaaaagtatttgtctaaaaaaagaaggaaggaaggaaggaaagaagaaaggaaggaaagaaagaaagagagataaatatggaaagaaagagaaaaaaaggaagaaaggaagaaagaaaggaagaagaaagaaagaaaagaagaagaaagaaagagagaaagaaagaaggaaagaagagaaagaaggaaagaagagaaagaaagaaaaagaaagaaagaaagagaaagaaagaaagaaactgtctattgggaagggcgttgtttactgcttatccagcaatacccagaaaaagcaagtgagtcagaccaagatccgggtcatctcaaccatcctgttcatcttggccggctgcattgtgtttgtgacgatccctgctgtcatctttaagtacatcgagggctggacggccttggagtccatttactttgtggtggtcactctgaccacggtgggctttggtgattttgtggcagcgcaccctagtgaccatctttgctgggtaatagtgacttgcaaaggtaaatatttactcccagatagcccacaggagaaagctacagatttctctggcgtagcacagaaacgaaatgaacctcaaaaaccacttactggtgcgggaactcagatcgtatcctacagctctaatgatgcaggagagagttgtctgaaaggaaaaaccaaaagcagctgcaccaaaccgaagggggcttggcacagagaagttggaattctaacgttaagaagtggcagcagctgtcgagcctcatgctgtcctcagtatgatcggagattggctacgggttctgtccaaaaagacaaaagaagaggatgccgtccccctctctttaagtcaccatctccaaatctgaggcttcttggggttgcccaccacgtgggtgaaatcaaggcccatgcggcagagtggaaggccaatgtcacggctgagttccgggagacacggcgaaggctcagcgtggagatccacgataagctgcagcgggcggccaccatccgcagcatggagcgccggcggctgggcctggaccagcgggcccactcactggacatgctgtcccccgagaagcgctctgtctttgctgccctggacaccggccgcttcaaggcctcatcccaggagagcatcaacaaccggcccaacaacctgcgcctgaaggggccggagcagctgaacaagcatgggcagggtgcgtccgaggacaacatcatcaacaagttcgggtccacctccagactcaccaagaggaaaaacaaggacctcaaaaagaccttgcccgaggacgttcagaaaatctacaagaccttccggaattactccctggacgaggagaagaaagaggaggagacggaaaagatgtgtaactcagacaactccagcacagccatgctgacggactgtatccagcagcacgctgagttggagaacggaatgatacccacggacaccaaagaccgggagccggagaacaactcattacttgaagacagaaactaa

SEQ ID NO: 122407 - DNA, 418 bp, Homo sapiens
tttcgtctcgccatggcgcaggtgctgatcgtgggcgcctggatgacaggaagcttgtgcgctgcgctgctgaggaggcagacgtccggtcccttgtaccttgctgtgtgggacaaggctgacgactcaagtgcagaagtctacttcagacatcgtgtgacacagatcaacctaagagatgacaaatgggaagtatccaaacaaacaggctcccctgagcagtttgatcttattgttctcacaatgccagttcctgagattctgcagcttcaaggtgacatcaccaccttaattagtgaatgccaaaggcagcaactggaggctgtgagctactcctctcgatatgctctgggcctcttttatgaagctggtacgaagattgatgtcccttgggctgggcagtacatcaccagtaatt

SEQ ID NO: 122408 - DNA, 1209 bp, Homo sapiens
ctaaggcacggtattaataataattctcacagtgcggctttgaactgaatcttcagcatcacctagaaacttgtaaaaaatgcaaattgtccatgcatacctcgatacaaccagaaactcagactgtggcccagtaatctttttttctttttccttctttctttcatttaggtcatcatctttcaatctttctttctctttctttctttctctctctctctctttctgtctgtctctcaagccatgctgaggagcccaagtacctacattgctggtgggagtgttaactgttacaatctcgacggtgcaaaatttggcaatatctcttttggggaaggcaaagtaaggggaagggattttatcagtctctggaagaatgtatagagtactgtaaggcgaaaagagagggccattctgtggagaggtgtcacgagttcccaaggccactttcaggcttgatgattcatgagaagaacttacaggcttcagaaaagctgttaaattcacagggtatcgtttacctaggcttccaggattatctcttctctcaccaaccattctttcatggactctttcttctcttttcagcccataagtgttggtatttctcagggttctgtgataagctatcttctcttctaattctacccataatccatcaggaatctcatccactcccatagtttctagtctgtattccaataactctgcgccatggcgagagggagcagcgatccgcgctgagtctctgcggcggggccgttcggcccgggctttctggaaaggcggccgaaccggcgctagcgctctttggttccgtgctccctgggccgacctgggccctgagctttcctccggccggcctggatcaaatcctggctccaaggcctttaaggcaagtgactttatctccaaattgatatcctcatttacaaaatggtaataataacgtcccttcctcatgggcctcttgtgaaaagcgaatgggtagatactcatacagcactcagaactgcacatatgggatgatctggacatggttttgagccccatgatcaccacattcttttcagaccataacactgaacttgtatttttatcatcaaaattgagcaagagagtaccaagagacaccgaattacttgactggtgaacatatttcctgccctcattctgtagcagcagccgaacctgtgcctgatgatccat

SEQ ID NO: 122409 - DNA, 687 bp, Homo sapiens
atgcaaaactggatacagagcataaaagtggaaaatttgcagcctgatgatgcgatagaaaacaacccattttctggggagaaactcaagctagctggagctgtgagaagagggccaccatcttctagatcccagaatggtagatccaatggcagcttgcaccatgcagctggaaaagctgcagacactcaatgccagcctgtgaaagcagctgggaggagggctgtatcttgcaaaaccacaagggtagagctgcccaagactgtcagaaccaagccaaaggagcacaaagtactctctgccttttggcattctacctccttggctgcgtgtctactgctggtcccagtaattagtgaatgccaaaggcagcaactggaggctgtgagctactcctctcgatatgctctgggcctcttttatgaagctggtacgaagattgatgtcccttgggctgggcagtacatcaccagtaatccctgcatacgcttcgtctccattgataataagaagcgcaatataggagtggaaaatatcaaggatgatttcggatttttgcccaaaaaagctaggagattggtggctccattttcaaaaatgggaaagatgggggaggaaaaagttcagaataatgaaagtaggcaatcaagagccagtgatgaacgttttactgacaatactatatag

SEQ ID NO: 122410 - DNA, 1543 bp, Homo sapiens
ggggctttgataatgtgattattctttattcagaattgaaattttcataaggataatcaagtttttggcatacaaactgttattgtgatttaatgtaatttttttgagagagtcgtttgttattttttaagtaccacttttcctccaacaaggagtagtcatagcaattcagaaaagtagggaaggtgcaaggtgtgaggaatttccattctagcatgggttgtaactattaaaaattccaaaattgattttatactccacatgaaaaatgataataagtgaagaacaattttccagtaatttttcttagcaaaatagaaaacaaaataatcaataacagaaaattgtgaaaataaaaaccccataccacatgtagagaataaggatataggcactaaatataattctttaaagcttccagaacacataagggcagaagtgatgcagccatcaaagttggactgagtaaatccatcccctccacatgcaaggaaaggtttgtgatgcagagtcatttggccaggacagttggcagcagcatttgtaacctgtgaatgtctccatttttggcatttggtagcaattggctgaggcaaacccggcaaaatgttttccagctgctggaagactaactcttgcacatcctcaatgctgtgttccaagtatgtaactccaaatgggacagtggtgtgaatcacgagggaaggcccaatttctgatgactctatattgcgcttcttattatcaatggagacgaagcgtatgcagggattactggtgatgtactgcccagcccaagggacatcaatcttcgtaccagcttcataaaagaggcccagagcatatcgagaggagtagctcacagcctccagttgctgcctttggcattcactaattaaggtggtgatgtcaccttgaagctgcagaatctcaggaactggcattgtgagaacaataagatcaaactgctcaggggagcctgtttgtttggatacttcccatttgtcatctcttaggttgatctgtgtcacacggatgtctgaagtagacttctgcacctgattctttcaagtaatgcttaataagtgaagaaattccttgaggtgccacaaagttacagtctccttctttcatcaccattccttcaataggcgagcttagaggcctcaaaacgccataggctaacaggttcatcataaataagttggtgttttttggcataatgaggagtagcaggtaatgtagtgagcagccaagtcagctgtgcactgcggattatgaggactgcaggctgtagtcattcttccccatgagttgtcacccatgtctcaagcagcaaggtacaagggaccggacgtctgcctcctcagcagcgcagcgcacaagcttcctgtcatccagagcgcccacgatcagcacgtgcgccatggcgagagggagcagcgatccgcgctgagtctgtgcggcggggccgttcggcccggcctttctgtaaaggcggccgaacgggcgctagcgatctttggttccgtgctccctgggc

SEQ ID NO: 122411 - DNA, 416 bp, Homo sapiens
ttcagggttccgctatggaagtgatatagttcctttctctaaagtggatgaggaacaaatgaaatataagtcggaggggaagtgcttctctgttttgggattttgtaaatcttctcaggttcagagaagattcttcatgggaaatcaagttctaaaggcctttcatggaagacttgcggcaatacatgttttcatccttgaaaaacagtaaaaaatatgctcccaccgaggcacagctgaatgctgctgatgctttgattgactccatgagcttggccaagaaagatgagaagacagacacccttgaagacttgtttccaaccaccaaaatcccaaatcctcgatttcagagattatttcagtgtctgctgcacagagctttacatcccctggagcctctaccctcaattcagcag

SEQ ID NO: 122412 - DNA, 2133 bp, Homo sapiens
atggggcacaggaaaaagaagaggaaagagtcacgcccagaatccatcatcatctaccgctcagacaatgagaaacagatgagagcccggagaatcagaagccacttggcctgtttgccctttgctcccatttttccttgtttgcttctttgtctgaaaatttatgctgtcctgctgcctccgctgggcttcgtttccacctttgctggaggagatttagctgacaacctcacagatcttccccgccccttctgccgagctgatctttctcttggaaatcttacccgcagggaagggcgagtgtccgtgcctgcctgcctgcctgctgcagcccgcgcaaagctgagcggccagggcgctgctgttcctttaaacgtttcaggcggctcaaacaccacacgctcccgactacggcggaatggagagaatgtgcgcatgctcggcgggaatctgcgcatgctcggcgggaatctgcgcatgctcggagagaatctgcgcatgctcggccggaatctgcgcgagctcggcgggaatctgcgcaagctcggcgggaatctgcgcatgctcagagttccggggcacggtttccccgcccctttcaggcctagcaggaaacgaagcggctctttccgctatctgccgcttgtccaccggaagcgagttgcgacacggcaggttcccgcccggaagaagcgaccaaagcgcctgaggaccggcaacatggtgcggtcggggaataaggcagctgttgtgctgtgtatggacgtgggctttaccatgagtaactccattcctggtatagaatccccatttgaacaagcaaagaaggtgataaccatgtttgtacagcgacaggtgtttgctgagaacaaggatgagattgctttagtcctgtttggtacagatggcactgacaatcccctttctggtggggatcagtatcagaacatcacagtgcacagacatctgatgctaccagattttgatttgctggaggacattgaaagcaaaatccaaccaggaaagaagtttgagaagaggcatattgaaatattcactgacctcagcagccgattcagcaaaagtcagctggatattataattcatagcttgaagaaatgtgacatctccctgcaattcttcttgcctttctcacttggcaaggaagatggaagtggggacagaggagatggcccctttcgcttaggtggccatgggccttcctttccactaaaaggaattaccgaacagcaaaaagaaggtcttgagatagtgaaaatggtgatgatatctttagaaggtgaagatgggttggatgaaatttattcattcagctcatactgggggaaccgggcccatggttgggatccatgggtcgctctagtctcccgttctgtggtcgcacacaccttgagggcacccacacagtttgttcatctcctgcaaaaacgcaagcgtacccttatccccacgcattctggagctgcaagagcaggtgtttacaacctcaccaaatctttagctttggaatgggcctgcagtggaatacggatcaattgtgttgcccctggagttatttattcccagactgctgtggagaactatggttcctggggacaaagcttctttgaagggtcttttcagaaaatccccgctaaacgaattggtgttcctgaggaggtaaggtctcctctgtggtctgcttcctactgtctcctgcagcttccttcatcactggacagtcgggtggatgtggatgggggccggagtctctatactcactcgtatgaggtaccagcttcagagcccgctggctcaggggaacaacttagaggacccagatccattttctcagaacagaggagcaattacatctggagcctgccacttgtcgactggccgtcctgtggcccattggtctccttaaagagcaatgccacttcagggctcagcaatgatctgtgttgcaggaaggttggacatgcaggggcagtgacagctccgttgaccttggttaacagggagtccatgctaatgggccgtctacagcctgcctccatcactgtgcctgtcacaccagttctgggctggccggtgatgaagtccagctatcaactggctgagttttcttga

SEQ ID NO: 122413 - DNA, 1155 bp, Homo sapiens
atggatgtgattcaacatgaaacaataggaaagaagtttgagaagaggcatattgaaatattcactgacctcagcagccgattcagcaaaagtcagctggatattataattcatagcttgaagaaatgtgacatctccctgcaattcttgtggccatgggcttcctttccactaaaaggaattaccgaacagcaaaaagaaggtcttgagatagtgaaaatggtgatgatatctttagaaggtgaagatgggttggatgaaatttattcattcagtgagagtctgagaaaactgtgcgtcttcaagaaaattgagaggcattccattcactggccctgccgactgaccattggctccaatttgtctataaggattgcagcctataaatcgattctacaggagagagttaaaaagacttggacagttgtggatgcaaaaaccctaaaaaaagaagatatacaaaaagaaacagtttattgcttaaatgatgatgatgaaactgaagttttaaaagaggatattattcaagggttccgctatggaagtgatatagttcctttctctaaagtggatgaggaacaaatgaaatataaatcggaggggaagtgcttctctgttttgggattttgtaaatcttctcaggttcagagaagattcttcatgggaaatcaagttctaaaggtctttgcagcaagagatgatgaggcagctgcagttgcactttcctccctgattcatgctttggatgacttagacatggtggccatagttcgatatgcttatgacaaaagagctaatcctcaagtcggcgtggcttttcctcatatcaagcataactatgagtgtttagtgtatgtgcagctgcctttcatggaagacttgcggcaatacatgttttcatccttgaaaaacagtaagaaatatgctcccaccgaggcacagttgaatgctgttgatgctttgattgactccatgagcttggcaaagaaagatgagaagacagacacccttgaagacttgtttccaaccaccaaaatcccaaatcctcgatttcagagattatttcagctctttgcaaatgcaacatctgctactctcgctctaggagagttccaaagaaatggaatccctgggttgaaggacatgtatatttaa

SEQ ID NO: 122414 - DNA, 374 bp, Homo sapiens
tttaaaggaacagcagcgccctggccgctcagctttgcgcgggctgcagcaggcaggcaggcaggcacggacactcgcccttccctgcgggtaagatttccaagagaaagatcagctcggcagaaggggcggggaagatctgtgaggttgtcagctaaatctcctccagcaaaggtggaaacgaagcccagcggaggcagcaggacagcataaattttcagacaaagaagcaaacaaggaaaaatgggagcaaagggcaaacaggccaagtggcttctgattctccgggctctcatctgtttctcattgtctgagcggtagatgatgatggattctgggcgtgactctttcctcttctttttcctgtgccccat

SEQ ID NO: 122415 - DNA, 1231 bp, Homo sapiens
atggtatgcgagctgtgcgtgtcggcgacgcaggcggccgtggttaagcgcgcttgtggggcggataaggaggtgacagtcgtggtgggcatgagggcacgccagtatttgccgccggaaggagcggccttcggtgcagacggtagttgcgagggctctgtccgcggcggtgcagttggggcgatggttagcgccacggtgctacacgcggatgtagagggcacggactgtttagtgtatgtgcagctgcctttcatggaagacttgcggcaatacatgttttcatccttgaaaaacagtaagaaatatgctcccaccgtccacatccctcagccccgccgagactcctgctcccgtctccagttaccccaggtcaccacagccacctctctgaaccagcgccccgttcacgtacccagctccaagagctcccttcacgatggctttcccgatgcccttgcccccgccgttgacaatgcccacttggccctgcagcaaaccaggcgccagttagctcctgcccttagccaaggaggccatcctgccagcggccgcatcctcccggagcagaaccgctccccgccggctgtccgcaacctccgccagcgtcggtccctgggcaggtgtgggtggaatgcatccttgggacatctttgcatagccccatctaggaagaagttctgtgatgtgtgaaactgtgagtttactcaaacaagtccaactctttaataagacataggtaagacgtcaggtctggaatggaaagagccaacagcagtagaaggcccaggtcccagcttcccaaagcccccaccagggctctctcaggaaggctgtggctgctgccctggcgctggatggggaatccacaatggggcacaggaaaaagaagaggaaagagtcacgcccagaatccatcatcatctaccgctcagacaatgagaaaacagatgaggagcccggagaatcagaaggtggagatcagcctaaagaggaggagggagatgatttcctagactatcctgtggatgatgatgatacagaaatctccaccctttcagaattcctaatgaaatggaagaggctgatttatacgcaaaaactggtaacacaagcagactatgctaactacttaatcctcagtagcactaatggagaagttcgggtgatagcaggagaaagctggagaagagaagctggattcaggatgcaatctgaacttgctgattga

SEQ ID NO: 122416 - DNA, 3357 bp, Homo sapiens
ggcgggcgaccaaagcgcctgaggaccggcaacatggtgcggtcggggaataaggcagctgttgtgctgtgtatggacgtgggctttaccatgagtaactccattcctggtatagaatccccatttgaacaagcaaagaaggtgataaccatgtttgtacagcgacaggtgtttgctgagaacaaggatgagattgctttagtcctgtttggtacagatggcactgacaatcccctttctggtggggatcagtatcagaacatcacagtgcacagacatctgatgctaccagattttgatttgctggaggacattgaaagcaaaatccaaccaggttctcaacaggctgacttcctggatgcactaatcgtgagcatggatgtgattcaacatgaaacaataggaaagaagtttgagaagaggcatattgaaatattcactgacctcagcagccgattcagcaaaagtcagctggatattataattcatagcttgaagaaatgtgacatctccctgcaattcttcttgcctttctcacttggcaaggaagatggaagtggggacagaggagatggcccctttcgcttaggtggccatgggccttcctttccactaaaaggaattaccgaacagcaaaaagaaggtcttgagatagtgaaaatggtgatgatatctttagaaggtgaagatgggttggatgaaatttattcattcagtgagagtctgagaaaactgtgcgtcttcaagaaaattgagaggcattccattcactggccctgccgactgaccattggctccaatttgtctataaggattgcagcctataaatcgattctacaggagagagttaaaaagacttggacagttgtggatgcaaaaaccctaaaaaaagaagatatacaaaaagaaacagtttattgcttaaatgatgatgatgaaactgaagttttaaaagaggatattattcaagggttccgctatggaagtgatatagttcctttctctaaagtggatgaggaacaaatgaaatataaatcggaggggaagtgcttctctgttttgggattttgtaaatcttctcaggttcagagaagattcttcatgggaaatcaagttctaaaggtctttgcagcaagagatgatgaggcagctgcagttgcactttcctccctgattcatgctttggatgacttagacatggtggccatagttcgatatgcttatgacaaaagagctaatcctcaagtcggcgtggcttttcctcatatcaagcataactatgagtgtttagtgtatgtgcagctgcctttcatggaagacttgcggcaataccatgttttcatccttgaaaaacagtaagaaatatgctcccacccgagggcacagttgaatgctgttgatgctttgattgactccatgagcttgggcaaagaaagatgaggaaggacagacacccttgaaggacttgtttccaaccaccaaaatcccaaatccttcgattttcagaggattatttcagtgtctgctggcacaggagcttttacatccccggggaggccttttaccccccaatttcaggcaggcatatttgggaatatgctggaatccttcccgctgagggtggacaacggaaaagttcaggatttcctctctcttaaaattaaaggaccctttttttcctctgatttgaagccaaggaaaaagggttcaagtggactgctcagggaattttccaaggacaaccttggaaggtgggacctacagctaaaaaattaaagactggagcaaggggggagcccactttcagcgtctccagtctggctgaaggcagtgtcacctctgttggaagtgtgaatcctgctgaaaacttccgtgttctagtgaaacagaagaaggccagctttgaggaagcgagtaaccagctcataaatcacatcgaacagtttttggatactaatgaaacaccgtattttatgaagagcatagactgcatccgagccttccgggaagaagccattaagttttcagaagagcagcgctttaacaacttcctgaaagcccttcaagagaaagtggaaattaaacaattaaatcatttctgggaaattgttgtccaggatggaattactctgatcaccaaagaggaagcctctggaagttctgtcacagctgaggaagccaaaaagtttctggcccccaaagacaaaccaagtggagacacagcagctgtatttgaagaaggtggtgatgtggacgatttattggacatgatataggtcgtggatgtatggggaatctaagagagctgccatcgctgtgatgctgggagttctaacaaaacaagttggatgcggccattcaaggggagccaaaatctcaagaaattcccagcaggttacctgcaggcggatcatctaattctctgtggaatgaatacacacatatatattacaagggataatttagaccccatacaagtttataaagagtcattgttattttctggttggtgtattattttttctgtggtcttactgatctttgtatattacatacatgctttgaagtttctggaaagtagatcttttcttgacctagtatatcagtgacagttgcagcccttgtgatgtgattagtgtctcatgtggaaccatggcatggttattgatgagtttcttaaccctttccagagtcctcctttgcctgatcctccaacagctgtcacaacttgtgttgagcaagcagtagcatttgcttcctcccaacaagcagctgggttaggaaaaccatgggtaaggacggactcacttctctttttagttgaggccttctagttaccacattactctgcctctgtatataggtggttttctttaagtggggtgggaaggggagcacaatttcccttcatactccttttaagcagtgagttatggtggtggtctcatgaagaaaagaccttttggcccaatctctgccatatcagtgaacctttagaaactcaaaaactgagaaatttactacagtagttagaattatatcacttcactgttctctacttgcaagcctcaaagagagaaagtttcgttatattaaaacacttaggtaacttttcgatctttcccatttctacctaagtcagctttcatctttgtggatggtgtctcctttactaaataagaaaataacaaagcccttattctctttttttcttgtcctcattcttgccttgagttccagttcctctttggtgtacagacttcttggtacccagtcacctctgtcttcagcaccctcataagtcgtcactaatacacagttttgtacatgtaacattaaaggcataaatgactcaaa

SEQ ID NO: 122417 - DNA, 2589 bp, Homo sapiens
tcatcttgaatcatattcccataattcccatgtgttgtgggagggacccagtggaagataatttgaatcatgggggcagtttcccccatactgttcttgtggtagtgaataagtttcatgagctctgatggttttatcaggggtttctgcttctgggtcttcctcattttctcttgccgctgtctgcaccagaaaacccaatgatgcgacggaattatcaacattatcatcctgaaacaattgctgagctcccagaggggccatttttctctttgaagaggccttcaagtttctcaccacatggctaccttttctcactggcaagaagtgaattaagtcatcagtaatctcagtcgggtccattaaaatcgcctgagcaattacatagattttgaaaaccagtgaagctgacctattaataacacagtcaattctccatttttcccaggccctctcagaggccacacactttatgctattatcttccctctggtcattccgttgtccattatcacctatccagtgtggcatatgaattgcctcatgtgtggtttggaaagcttgctgctgatcaaggttgggtttaccagccaatatttgtctgacaaacctgctcagagtaaggcagaaaggtggtggttgtacttccccctccactgggtaatcaatccactcctgggggaatttgcctctcagcacagctgcccctctaacgtgactagtgatctgccagcgctcggtgctcatccccgggatcttgaacttcgcctccctcttactttctgccagacccgcgagggccaggaagggctctgcaaaggttctcgaggtctccttccagccctggtggtaatcccgctcagcgccgcgccctcccccagatccaaacttttgctgggtcctccgggtggcggcggcggcgacggcggcggctgctggagccaagccggagctgcggcatcgtcttcccccgtcctccgccaccaccgcctccagggttcgggcatgccactttctcttggcttcggccgccgcgacccccgccttctctcctcctccgcctccccctctccgcttcgccaagccaacgaaccccaaaagaagtacagcgagcggggaaggcggcagaaagctgccccgcggcgccggagctcctcggatttggaggatcccgggactcggcgggagagctaggcgggctctcctccgacgcgtgtgtgcggacagctcggagccgggcgtgcggcggcccgcgcggagacgcacgctggcacacgcgctcacacacgcgagcacacacacgcgcacactacccggttcgtgcgcgcgggtcgctgttcctgttgcattatgcaaaggtggatttacatagcccatcttctccccacagtatgtgactaatacgtatcccggggaggagggagcgcggctgggggtgctaatcggaagggaacagacagtgagtgccatcttgctgggaggttccagaagcaaagcgccaacgacgacagtagcggtggcctcagctccaccagtaactgccgctggcaggagcaccacacgcttcgatccggattccgcctcgtatgctctccaagccttcgccacctccgcaggcgctctagaaaggcgtgatggccccagctcagtgcccgccagcccgaagaggacaagcagggctggaagggacttggttttggaaaaagccccacccgcccccaccaactgacggctgcgtcttctccttgcaatgggctcatccgaatccgacagggtcagggaggtggaaagggaagacgctggcgcggcagcagcggggatcccggggcatggtattgttttaggggtcgccgccgaggtccctcctgcccatcgttgagaactgccaccctgatcccagggctcggtggacacggcggcgggagcggagatgccgcctcgccgctgctgggcaccagggacggaggaccagaggcgcacctcggaaaggagtagctcagcgccttggcgcggagatttgcgggcactgatgatatctcgagcgctcgttcctccgcggtgacaatggataatgccaaacgcgcaagtgacggcgacaggtttcgaacgtacaactaacgtcacacccaaatgagccaggacgtcgctcagagcgcaaactgagatccacacagggacatcttcaaccgaatctttcttctgtctccattccggattgttattttccttgcttccatggaaggtttctgatatggtttggctttgtgtctccacccaaatctcatctcgaattgtaatctccagcgtgtcgaaggacggacctctaacccccacaagtggagaaaagtaggcgattggatcatgggggtggtttcccccatgctgttctagtgattgtgagtgagttctcacgagatctgatggttttataaggggctctgcgtgcttcgctggcacttctctctctcctgctgccttgtgaagaaggcgtctgcttccccttctgccatgattgtaagtttcctgaggcttcattgaccacagaagacttttatccaatgacacttcataacaagtctgagaattcat

SEQ ID NO: 122418 - DNA, 357 bp, Homo sapiens
atgtagatgaggcagcgcaggggctgctgcttcgccacgaaggatttcccgtgccgtgggagcgggttcaggaccgctggtcggacctgagagtcccagctgtgggaagctcagctgtgtaatttgtagtaacgaagcagaagttacaacgaaaagacaagttttcctgtgcttggcagggcccccctcccccccaccaaggcctgcagtggatagagcctagcagatcctggacaatactatcctaaaagctacatctctgacagtgatttccagcgactttgtcaacacggtccgcccccagcaagtataagaggaaaaacaacaaatgtctttactgccttgtctttccccctt

SEQ ID NO: 122419 - DNA, 543 bp, Homo sapiens
atgttagaagccctgggagcactgaacaaaccagaaagctcccgacccttgatccctgagctccacctagcaagtacagcggcagctaacctgggagaacaccccaaccaacagagactgaaattcgcctcccaagagacaccagaggaaagcgcgaacgcagtcccccactaccacaaattatgcaatcgagtttcccacgtttggggaaatcgcagaggtcagcacatccggaacacaatggataaccctcgccctgagaaaaaccaccttcgtttagataatagtatctcccctgccagccctcctagccctgacacacagctgggactctcaggtccgaccagcggtcctgaacccactcccacggcacgggaactccttagtggcgaagcagcagcccctgcgctgcctcatctacatagaaatcgccctatccgtgatgtcactaacagcgcctttcccagtccccgtctgctcttccgccccaccctccgccgactcagccgatcaacccgctgccggagctggcgaaggaagtga

SEQ ID NO: 122420 - DNA, 1429 bp, Homo sapiens
tttcgtgtagcctcagaaagtgcatggtaaagggaaaccagatcatgctgggcacactaccatgcagaatcctcaaaacaccagaaagctaagttgaaagacagtcgaaaagccagaaggagtatcgagctcatcgggcctgggagcagtcagaaggggggggacatttgttctctcatccacttgagcagcaaactgggcatattgtgctactcaaaaacagggaacatgggaggttgggagggagggatgcagctgagagttagctctgaaaactccatgggcaagtccagcagggagagggctgctgctgaccttccccagggtagctgctggcatgagcttccaggaaggctcataaacacaaggatctcgctcaagccccggcacgtctggaatctcagctcggtgctttgccaggtggtgaagaaggtgaagtccatgcagatgttccacatgcccatcacttcagccatgcaaggagaccggctgggcatctgcgtcacccagtttgaccctaagctgctggagcgcgggttggtgtgtgcccccgagtccctgcacactgtccatgcggccctcatctctgtggaaaagataccgtatttccgggggcccctgcaaaccaaggccaagttccacattacagtgggccatgaaacagtcatgggccggttgatgttcttcagtcctgctccagataactttgaccaggagcctatactggactctttcaacttctctcaagaataccttttccaggagcagtacctgtccaaggatttgacaccagcagtgacagacaatgatgaggccgacaagaaggccggccaggccacagagggccattgtcctcggcagcagtgggccctggtggagtttgagaagcccgtcacctgccctcggctgtgcctggtgattggctccaggctagatgcggacattcacaccaacacgtgccggctagcctttcatgggcaatcctgctccacgggctagaggacaggaactacgccgacagcttcctgcccaggctgaaggtgtacaagctgaagcacaagcatgggccttgtggagcgggcgatggatgactacagtgtgatcggccgctccctgttcaaaaaggaaaccaacatccagctcttcgtggggctcaaggtgcacttgtccactggggaactgggcatcatcgacagtgccttcggccagagcggcaagttcaagatccacatcccaggtggcctcagccccgagtccaaaaaagatcctgacaccccgccctcaaaaacgggcccgggctggccggtgggaggccaaccaggcaggaggagatccccgagcggagcgaacccccacaagatggggtggctaacccgacctttcaagcgttatgtcttcgacacccacaagcgcatggttcagtctccct

SEQ ID NO: 122421 - DNA, 344 bp, Homo sapiens
ccagatcgccgcgcgagggtggtgggcatcgaggtcccagcagcggaggagggaggtgccgccgtcgcccaggatgggctgggaatgaagcgatgtagccttttaagagatttgctctgacccatctgaagtccatatggctctgtatgatgaagacctcctgaaaaatcctttctatctggctctgcaaaagtgccgccctgacttgtgcagcaaagtggcccaaatccatggcattgtcttagtaccctgcaaaggaagcctgtcgagcagcatccagtctacttgtcagtttgagtcctacattttgattacctgtggaagagcattttccagacctttaa

SEQ ID NO: 122422 - DNA, 1349 bp, Homo sapiens
tcagcttcgccacgcacacggcagggccacagccgccagcagcacggcgccgaaaaggatggcggccagggcttcctggggtcgcaaccccccccgcgctcctgtgcgcaccagcgccgccgcggcgcgtgcagcgggaacgcggcgcccagctccagcgcgcgtcgcatgtccgcttccagcaggtccaggcagcccgagaaggccacccagagccgctcgaactcggcgcgctcgtcggcggccaggccccggtcgcgcagcacagcagtcagccgggcgcaggtggacaccgccagctcctgcgccttctggcgcgtcttttgcagctcctgccgcaggttctgcgagtccgccgagccaccgacggtcagcaccaggtggtggtagcacgcagtcgtccttgttgagcccgtccagcagcgccttgcactcctccccgccatcccggccttgggccgcgcggcacgaacgctcttcatggtcgtgactcgctcggcgctaccgccaacgtccacggagcccgcccgggacctcgacgtgcgcctgttctgggcacgcgcagttgcgggcgtggggcgggccagctggagtaggaagcgtagggagccgcctgagccccgcccccgctgggctggactccatgattgctctgcgtacacgtcactctgggaaacgcggtttctcattgggtcagctgtggcgcggctccgccccacggcggagtaggggtgggctatagggccagatcgccgcgcgagggtggtgggcatcgagtcccagcagcggacgagggaggtgccgccgtcgcccaggatgggctggaatgaagcgatgtagccttttaagtaagtgtcctcgcgctggcctcctctgcgcctcccctcccgcgggatggctgcgcctcggggcgcggcggccggcggggcccggagagttgaagggtgggaaggggcatccctgctctccggatccgctcccgggtccgccaggtggccccgcgccgccccagcccccgcgtcccaggtgggtgcccggtgcgcagccggcgcgccctgcccactccgccctcgggtctggaggaggggagcggtcggcgcggagaatgcaccctccgagctcgctgcgtcgacaccggcgggtgtggccggggtgccgggtccggcagttcggatctggcggggcgcggggcggtcgccgcgcggtttcccggaggctagggtcaagacagctgctgggtctttgttagtgatgtttctgttcccagttaaggtttctgtggcatctgccctgctggggctcttcctgtcgtcatttgccagcattaggttggtgtccaatgactccat

SEQ ID NO: 122423 - DNA, 1130 bp, Homo sapiens
ctctagactttcagcatcacaattacaaggccatgaggaagctgatgaagcaggtacaagagcaatgccccaacatcacccgcatctacagcattgggaagagctaccagggcctgaagctgtatgtgatggaaatgtcggacaagcctggggagcatgagctgggtactggcatggggagtggggagaggtaggcacagggcagggccccaggcatgaacccgctgcaagcccccatgtgtccccaggggagcctgaggtgcgctacgtggctggcatgcatgggaacgaggccctggggcgggagttgcttctgctcctgatgcagttcctgtgccatgagttcctgcgagggaacccacgggtgacccggctgctctctgagatgcgcattcacctgctgccctccatgaaccctgatggctatgagatcgcctaccaccggggttcagagctggtgggctgggccgagggccgctggaacaaccagagcatcgatcttaaccataattttgctgacctcaacacaccactgtgggaagcacaggacgatgggaaggtgccccacatcgtccccaaccatcacctgccattgcccacttactacaccctgcccaatgccaccgtgagtattttgagggcggcagtggaggtcttgtggggggcggacccttgtctctgtctcctgcccctcctgacctgccccatccaggtggctcctgaaacgcgggcagtaatcaagtggatgaagcggatcccctttgtgctaagtgccaacctccacgggggtgagctcgtggtgtcctacccattcgacatgactcgcaccccgtgggctgcccgcgagctcacgcccacaccagatgatgctgtgtttcgctggctcagcactgtctatgctggcagtaatctggccatgcaggacaccagccgccgaccctgccacagccaggacttctccgtgcacggcaacatcatcaacggggctgactggcacacggtccccgggagcatgaatgacttcagctacctacacaccaactgctttgaggtcactggtggagctgttctgtgacatgttccctcacgagaatgaattgccccatgagtgggagaacaacacagacgcg

SEQ ID NO: 122424 - DNA, 2356 bp, Homo sapiens
atgtgggggctcctgctcgccctggccgccttcgcgccggccgtcggcccggctctgggggcgcccaggaactcggtgctgggcctcgcgcagcccgggaccaccaaggtcccaggctcgaccccggccctgcatagcagcccggcacagccgccggcggagacagctaacgggacctcagaacagcatgtccggattcgagtcatcaagaagaaaaaggtcattatgaagaagcggaagaagctaactctaactcgccccaccccactggtgactgccgggccccttgtgacccccactccagcagggaccctcgaccccgctgagaaacaagaaacaggctgtcctcctttgggtctggagtccctgcgagtttcagatagccggcttgaggcatccagcagccagtcctttggtcttggaccacaccgaggacggctcaacattcagtcaggcctggaggacggcgatctatatgatggagcctggtgtgctgaggagcaggacgccgatccatggtttcaggtggacgctgggcaccccacccgcttctcgggtgttatcacacagggcaggaactctgtctggaggtatgactgggtcacatcatacaaggtccagttcagcaatgacagtcggacctggtggggaagtaggaaccacagcagtgggatggacgcagtatttcctgccaattcagacccagaaactccagtgctgaacctcctgccggagccccaggtggcccgcttcattcgcctgctgccccagacctggctccagggaggcgcgccttgcctccgggcagagatcctggcctgcccagtctcagaccccaatgacctattccttgaggcccctgcgtcgggatcctctgaccctctagactttcagcatcacaattacaaggccatgaggaagctgatgaagcaggtacaagagcaatgccccaacatcacccgcatctatctgcattggtaagagctaccagggcctgaaggtgtatgtggtggaaatgtcggacaagcctggggagcatgagctgggggagcctgaggtgcgctacgtggctggcatgcatgggaacgaggccctggggcgggagttgcttctgctcctgatgcagttcctgtgccatgagttcctgcgagcggaacccacgggtgacccggctgctctctgagatgcgtatttttctgctgccctccatgaaccctgatgggtatgagatcgccctacaccagaagttcatagctggtgggcttgtccgagggccgctggaacaaccagagcatcgatcttaaccataattttgctgacctcaacacaccactgtgggaagcacaggacgatgggaaggtgccccacatcgtccccaaccatcacctgccattgcccacttactacaccctgcccaatgccaccgtggctcctgaaacgcgggcagtaatcaagtggatgaagcggatcccctttgtgctaagtgccaacctccacgggggtgagctcgtggtgtcctacccattcgacatgactcgcaccccgtgggctgcccgcgagctcacgcccacaccagatgatgctgtgtttcgctggctcagcactgtctatgctggcagtaatctggccatgcaggacaccagccgccgaccctgccacagccaggacttctccgttgaacggcaacatcatcaacggggcttgactggcacacggtccccgggaagcatgaatgacttcagctacctacacaccaactgctttgaggtcactgtggagctgtcctgtgacaagttccctccagaagaatgaatttgccccaaggagtgggaagaacaacaaagacgccctcctcacctacctggagcaggtgcgcatgggcattgcaggagtggtgagggacaaggacacggagcttgggattgctgacgctgtcattgccgtggatgggattaaccatgacgtgaccacggccttggggccggggattatttggcgtcttgcttgacccccaggggacttacatggttgacttgccaagttccgagggctaccattcagtgacacggaactgtcgggtcacctttgaaagagggccccttcccctgcaatttcgtgctcaccaagactccccaaacagaggctgcgcgagctgctggcagctggggccaaggtgcccccggaccttcgcaggcgcctggagccgcttaaggggacagaaggattgatacctgcggtttaagagccctagggcaggctggacctgtcaagacgggaaggggaaaagtagagagggagggacaaagtgaggaaaaggtgctcattaaagctaccgggccccttaaaaaaaaaaaaa

SEQ ID NO: 122425 - DNA, 1124 bp, Homo sapiens
atggaagccacctggcgagctcagggcgccagtcccgctcagcccgggcacatcctccggctgcccgcgcacctctccacgccggccccgttccgcggcatcgccatcggatgcgctcggctcccgcgggcgctcggccccgagcccctcctccccctacccgccggccggacagggaggagccaatggctgggcctgccatccacaccgctcccatgctgttcctcgtcctcctgctgcccctggagctgagcctggcaggcgcccttgcacctgggacccctgcccggaacctccctgagaatcacattgacctcccaggcccagcgctgtggacgcctcaggccagccaccaccgccggcggggcccgggcaagaaggagtggggcccaggcttgcccagccaggcccaaggatggggctgttggtcaccgccaccaggcaggcctccaggctgccagaggctgaggggctgctgcctgagcagagtcctgcaggcctgctgcaggacaaggacctgctcctgggactggcattgccctaccccgagaaggagaaccgacctccaggttgggagaggaccaggaaacgcagcagggagcacaagagacgcagggacaggttgaggctgcaccaaggccgagccttggtccgaggtcccagctccctgatgaagaaggcagagctctccgaagcccaggtgctggatgcagccatggaggaatcctccaccagcctggcgcccaccatgttctttctcaccacctttgaggcagcacctgccacagaagagtccctgatcctgcccgtcacctccctgcggccccagcaggcacagcccaggtctgacggggaggtgatgcccacgctggacatggccttgttcgactggaccgattatgaagacttaaaacctgatggttggccctctgcaaagaagaaagagaaacaccgcggtaaactctccagtgatggtaacgaaacatcaccagccgaaggggaaccatgcgaccatcaccaagactgcctgccagggacttgctgcgacctgcgggagcatctctgcacaccccacaaccgaggcctcaacaacaaatgcttcgatgactgcatgtgtgtggaag

SEQ ID NO: 122426 - DNA, 517 bp, Homo sapiens; identical to SEQ ID NO: 116822

SEQ ID NO: 122427 - DNA, 2116 bp, Homo sapiens
ttattgtctcattctcatcacatatgatgatgattcttgaagttcttgagtcactggcatgctacaagtgacacttttgtgcgtgtgccctatgagcaaatcctgcaggtagagaaaccctcttaacttcagtgaatgttcaataactttttccagcatcaaagactggaggaaaaaattatcgaaattctgactgctgccctggagaaaatagaatgtaactccctggtaataatcctccacgtctaaagtaagaattgaagcaaaataactacttgattccagattttttccttcactttcttcacctttgattccagatttcttccaaacacaagaaggtttcttttttgtgggaagtagttgactagacactaagggctgaagccagaataaaataggaaagaagggaccagatggtgcggaagtaagaattagtcctaggtcttgtgctttcgtgtgcatttcagacatcagcagggaggaaagaagaaagagccagtatacatgcaaagccaccagtccagtgtcaaggaaaacgagaaatactgagaatgccacgcagaagaaatcagtttgaggatgtagcctcttgttcccaagaataactgtatttggatcatcaggggattctaattttaaaatgactatggccaggctcaggagattccctcgggtcaccagggccctgggtttcaagcacaaaaccgggcagccatttgggcaggcactgagccagctgctggagtttttttttcataacccagtggcacctggaacgccagcgagacagaactgttcactcccctggaaagggggcctgaagccagggagccaagtggtctagctcagtggatcccacccccaaggagcccagcaagccaagatccactgggttgaaattcttgctgccagcacagcagtctgaagtcgacctgggatgcttgagggtgtaaacaaagcctccgggaagttcgaacactgcaactcggcaaagcctctggagccacactatgtctctagattcctcctctctgggcagggcatctgcagcagagctccggctggcatctggcaggtgcccctctgtgacgaagcttccagaggaaggaacaggcagcaatctttgctgttctgcagcctctgctggtgatacccaggcaaacagggtctggagtggacctccagcaaactccagcagacctgcagaagaggagcctgactgttagaaggaaaactaacaaacagaaagcaataacatcaacattaacaaaaagcacgcccatgcaaaaaacctatccaaagtgcacaaaactgaacagagaagagtatgacgaattgacagaagtaggcagaaggtgggtaataataacaaactcctttgagctaaaggagcatgttctaccctattgcgaggaagctaaaaaccttgaaaaaaaggttagacaaatggctaactagaataaaccagtgtagagaagaccttaaatggcctgatggagctgaaaaccaaggctcgagaactacgtgaagaatgcagaagccttaggagctgatgcgatcaactggaagaaagggtgtcagcaatggaagatgaaatgaatgaaatgaagtgagaagggaagtttagagaaaaaagaataaaaagaaatgagcaaagcctccaagaaatatgggactatgtgaaaagaccaaatctacctctgactggtgtacctgaaagtgatggggagaatggaaccaagttggaaaacactctgcaggatattatccaggagaacttccgccaatcttagcaaggcaggccaacattcaaattcaggaaatacagagaacaccacaaagatactcctcgagaagagcaaccccaatacagcaagcgcttagtaaacgtcttctgaaggaatactcgtaaccggatagaatggagacgaggaaccaatttaaaataaaagtacctgcctgtgattcccagcgtgtttcccaaggccatggtttcccattctatatccagaactttccagggacaggactattctcagagcaaagagtcattttctctagcttctttgcagtgatgaataaaagccactgtggaactcaaaaaaaaaaaaaa

SEQ ID NO: 122428 - DNA, 2661 bp, Homo sapiens; identical to SEQ ID NO: 114992

SEQ ID NO: 122429 - DNA, 3258 bp, Homo sapiens
atgaaactcatggaaacacttaaccagtgcataaacgctggtcatgaaatgacgaaggctatcgccattgcacagtttaatgatgacagcccggaagcgaggaaaataacccggcgctggagaataggtgaagcagcggatttagttggggtttcttctcaggctatcagagatgccgagaaagcagggcgactaccgcacccggatatggaaattcgaggacgggttgagcaacgtgttggttatacaattgaacaaattaatcatatgcgtgatgtgtttggtacgcgattgcgacgtgctgaagacgtatttccaccggtgatcggggttgctgcccataaaggtggcgtttacaaaacctcagtttctgttcatcttgctcaggatctggctctgaaggggctacgtgttttgctcgtggaaggtaacgacccccagggaacagcctcaatgtatcacggatgggtaccagatcttcatattcatgcagaagacactctcctgcctttctatcttggggaaaaggacgatgtcacttatgcaataaagcccacttgctggccggggcttgacattattccttcctgtctggctctgcaccgtattgaaactgagttaatgggcaaatttgatgaaggtaaactgcccaccgatccacacctgatgctccgactggccattgaaactgttgctcatgactatgatgtcatagttattgacagcgcgcctaacctgggtatcggcacgattaatgtcgtatgtgctgctgatgtgctgattgttcccacgcctgctgagttgtttgactacacctccgcactgcagtttttcgatatgcttcgtgatctgctcaagaacgttgatcttaaagggttcgagcctgatattggctgcaatgccgtcagctgggcccctgctgttgtacctgtaagcctcatagaccacccatcggggcagaaacccaattacatcaagaggtttgcatcaggtggctgtgacaacctcatcaagctgtggaaggaaggaggaaggacggccagtggaagggaggagcagaagctagaggcgcacagtgactgggtttcgagatgtgggcctgggccccctccatcggcctgcccaccagcaccatcgccagctgctccagtgctcacaggccaccattccaagatgactgggaatcctgccaaaaccaatgctgaccccagcagcccaggcttcacgggactcactgggatccctgctgagacatggaatgccttctgtctgtcaccagtccccttgtccttccccactaagggttccaatcccttcttcgagggtttggagggctccctgaggtccaaaccactcagtcagtgtcccctggatgagacctctgccttcttggccctggacactgagtcctgtctcgtggcctctgcctttggagtgtgcacagttcactgggccttggtgtctacctccctggcctttgctcacagtgatcaccagaatgcctttccctcacctcttgctcacaacctcctccacaggatgaatgcccttctccttgggcataggatgcttcttgctctgggggagctgtgtgaaggggggcacttgcaggctgaggaggaagataacagagggggagagggggccagggtgaggcttcctgagggtgaagggagctgggtctgtgaggagcgtgaagagtggcgtgtccctgtgtggtctggctgtgctgggcccactgggagttgtggaggactgaggaagtggagggaggcatcgcaggcactgacgtggccagaaggcctcagacttcatcctgacagacgcaattttcagcagcatcgtcaaggcagtgatggcaagcctgcaaagaaggggcagccgggagctctagctcccagcagctggggtgtggaagctgcagaccgatttctgagctcagagcatcctgaagagggcatagaatgcaaatcaataaaaccagtattagctaagtatttggtgtggaccaggctgtttgtcgggctccttgctgagctcagagatgaatcagctccagaaacaactcctgctgggaggcggaggcagccccaggtctggagcggtgcccggcaaacctgtggacagagaacagagaggttggctgggggcctgggagagatgcaggcatgttctgggaatctaggggcagaaaaggagaaacagagcaagaaacttgctggtggctggcctatgagcccaacatctcttcatgctttgggccctaagttggttcctgccaaaagccagagacaccgtgcagaacacatgtccacatggcaggtaggcgttgtcagctcatcctattttaccggcaaccttgtcggtacattgctgacagggtatgtcattaagcgcattggctttaaccgcagctattatctggcctccttcatttttgccgctggctgtgccggccttggcctgatgattggattctggagctggttggcttggcgttttgtcgcgggcgtcggctgtgccatgatttgggtggttgttgagagcgcgctgatgtgcagtgggacgtcacgtaaccgtgggcgtttgcttgctgcgtatatgatggtttattacgtgggaacgtttttaggccagttactggtcagcaaagtttcaaccgagctgatgtccgtattgccgtgggttacaggtttgacgttggcagggatcttaccgctgttgtttacgcgtgtgctgaatcagcaggctgaaaaccatgattcgacgtcaattacgtcaatgctaaaactccgtcaagcgcggcttggcgtgaatggctgcattatctcaggaatcgttctgggatctctatatggcctgatgccgctgtacctcaattacaaagggggcaagtcttcacccaccccggctgttcggcctgcccggcataactccttaccgggaccagaagcaaaaaaataccgacccggatttatcatcggattgaccagctgtatagcgttcagtgttcaggccgcaaatgttgatgagtacattactcaactccccgctggtgccaaccttgccctgatggtgcaaaaagtcggcgcgtcggcccccgctattgattaccacagtcagcagatggcgctgcctgccagtacccagaaagtgattactgcgctggcggcgttgattcaactcggccccgattttcgttttaccacgacgcttgaaaccaaaggcaatgtggaaaacggcgtacttaaagggtga

SEQ ID NO: 122430 - DNA, 471 bp, Homo sapiens
atgactgggaatcctgccaaaaccaatgctgaccccagcagcccaggcttcacgggactcactgggatccctgctgagacatggaatgccttctgtctgtccccagtccccttgtccttccccactaagggatcagtggaccatcccctgcccggatcctctctctccacagactatggcagctggcagatggtaacgggctgtggcagtattcaggagcgggctgtcctgcacacagactcctctctccctttcagcttcccggatgagctccctaacagttgtctactgcaaattcttgaagagcaacatctgcagcggattgacccttgtgtcccagccagagacctagcggagtgtaccgtcagcatggaatcaacatcagaccagtgccatcattgtctcagtgccagtcctcagtggctgcaggcctgggccgccccttcttcctgtgactgttcctatctgtag

SEQ ID NO: 122431 - DNA, 423 bp, Homo sapiens
tcccggaagacagactcttccttcatggatgcatactgtgtccacgtaaggcagtgactccgtatggccatgtttctttcccgaggattgagccatgactcctcttctaattggatattaggtactttcaaaatgctcaccttccttaaaatttctggaaccacgttctgacagattgcaatcctctttctgtagatgacccctgttgattcatctcttttttcctccatgatttttactgagatgacatttttatccatggggttggggtactttcggagaaagctggcgaccacctgctcgaaggggtacttgtacacctggtgcacatccccgcgcaccggccacgcctccgcgagctcagagctgcccagggctccgcagaggcccggaggcgcccacactcggacagccacatgggcg

SEQ ID NO: 122432 - DNA, 683 bp, Homo sapiens
gggaaatacccttgggaagtttagaggtaattttcaaaagcaaaaagtaagagataagagaatgtaaagccgttcacaaggtaataataataagatgctggggggcaggtagaattaaactaatgtcacagctgtgagggacatcataaaatgaagataccttccttaaaatttctggaaccacgttctgacagattgcaatcctctttctgtagatgacccctgttgattcatctcttttctcctccatgatttttactgagatgacatttttatccatggggtgggggtactgggaagacaggaggcagatggccaggtttttctggacactttttcaaacacaatccagtatgactgcagaattgatcaagctgaatcaggatcacacccatcaaagacttaactgagcagctactgtgttcacgcagggtgctatcctagagaagctgccatgcgcatgatctcattcagtccttctcaaagcgtggaaacctttcggagaaagctggcgaccacctgctcgaaggggtacttgtacacctggtgcacatccaccgagacccccatccccgcgcgccgcgggccccgcgcaccggccacgcctccgcgagctcagagctgcccagggctccgcagaggcccggacgaaatcgtcgacccggaaattccgggccggtaca

SEQ ID NO: 122433 - DNA, 1698 bp, Homo sapiens
tcagtgatgaaccggaaagctccacacgtcggtcatctgcaactccacggagctcacgagctgggattcccggaggctcttcctaaaaggaaagcctcttctttcagctggggcaggtgtgaacgtgatgccaagcacggccccttttcccgctccctgtaaagggagtcttcgaggaaatccctctcgacccacacatccctgaagcaaagcccgcagctggaaagagacactggcggtgccagcttccgcgtggatgaaggagaggagagaggggcaagcagcggaggcagcgcgggatacggaaggtggaagcggggcggtacctttcggagaaagctggcgaccacctgctcgaaggggtacttgtacacctggtgcacatccaccgagacccccatccccgcgcgccgcgggccccgcgcaccggccacgcctccgcgagctcagagctgcccagggctccgcagaggcccggaggcgcccacactcggacagccacatgggcgtggcctttttcctccgcttttcaaactttcgaaactttattggccactcggagaaacgcgcagtcggccacgcccacgcccctactgccagagtccggggcctggggttacagagcgcgggaggcgctggagcgctcccagagcacccggggccccgcggtctccacgctggcggcgccagagcggccctggtgccctcccgcggccgcgcgttaatccgtgtattcagcacggttctgaggcctcctatgccccagcgctgtagtgggcactgcggattccgcagggaggaaacaccagctctgctgatgagccggctgatttcacacccaatcaacaagcagaccaaatgccttgccttcactcttgttcctgtgggtgaactgtcagcactttgttttagcaccagtgtctccatttgtccactgaatccttcttctgacttcccttcacctgcccaaggcaggactctaatctttcctggcttttctgattgatttctcattccagagagtgtcccaccccataccgtggctgttggcaggattcccttcccagcaggcagctgactgagggcctcagttccttgctggctgttggttggaagccaccttctgctccttgccacgtggacctctccataaggcaccacccctaggaaggaggaacaaaagggaaaatggtgtttcagcgagcccacaaccagagccagtaaagcagctactggtggaagcaagcagccggccagcattcctagctgctgctgctgctcctgcagctgccctaacaggaagccagcgggcacggggggtccggaaagtgtagtttgcacgtctcctgccccagcagcaagggggcggggggttgaaagggagtgcggagggcggtagcagaaagcaggctctatccacagcaggccctcactcagagtaaaacccgagttctcatcgtggcatctcagggcccgataggactccttaaatctgttggccagcatcgagaacttgctgccgtggcacagagagcaggtggcactgcccgaccctcggcagtgaaaacagctgtcctcgggaatatccccttccaatccacctctactagctccatgaccaagaagaggggcctgatcttttactgcagactccaaggcttgtagagccctgaagatggtaaccagtgccaattgaga

SEQ ID NO: 122434 - DNA, 3135 bp, Homo sapiens
atgaagggggcacgctggaggagggtcccctgggtgtccctgagctgcctgtgtctctgcctccttccgcatgtggtcccaggaaccacagaggacacattaataactggaagtaaaactcctgccccagtcacctcaacaggctcaacaacagcgacactagagggacaatcaactgcagcttcttcaaggacctctaatcaggacatatcagcttcatctcagaaccaccagactaagagcacggagaccaccagcaaagctcaaaccgacaccctcacgcagatgatgacatcaactcttttttcttccccaagtgtacacaatgtgatggagactgttacgcaggagacagctcctccagatgaaatgaccacatcatttccctccagtgtcaccaacacactcatgatgacatcaaagactataacaatgacaacctccacagactccactcttggaaacacagaagagacatcaacagcaggaactgaaagttctaccccagtgacctcagcagtctcaataacagctggacaggaaggacaatcacgaacaacttcctggaggacctctatccaagacacatcagcttcttctcagaaccactggactcggagcacgcagaccaccagggaatctcaaaccagcaccctaacacacagaaccacttcaactccttctttctctccaagtgtacacaatgtgacagggactgtttctcagaagacatctccttcaggtgaaacagctacctcatccctctgtagtgtcacaaacacatccatgatgacatcagagaagataacagtgacaacctccacaggctccactcttggaaacccaggggagacatcatcagtacctgttactggaagtcttatgccagtcacctcagcagccttagtaacagttgatccagaaggacaatcaccagcaactttctcaaggacttctactcaggacacaacagctttttctaagaaccaccagactcagagcgtggagaccaccagagtatctcaaatcaacaccctcaacaccctcacaccggttacaacatcaactgttttatcctcaccaagtggattcaacccaagtggaacagtttctcaggagacattcccttctggtgaaacaaccatctcatccccttccagtgtcagcaatacattcctggtaacatcaaaggtgttcagaatgccaatctccagagactctactcttggaaacacagaggagacatcactatctgtaagtggaaccatttctgcaatcacttccaaagtttcaaccatatggtggtcagacactctgtcaacagcactctcccccagttctttacctccaaaaatatccacagctttccacacccagcagagtgaaggtgcagagaccacaggacggcctcatgagaggagctcattctctccaggtgtgtctcaagaaatatttactctacatgaaacaacaacatggccttcctcattctccagcaaaggccacacaacttggtcacaaacagaactgccctcaacatcaacaggtgctgccactaggcttgtcacaggaaatccatctacaggggcagctggcactattccaagggtcccctctaaggtctcagcaataggggaaccaggagagcccaccacatactcctcccacagcacaactctcccaaaaacaacaggggcaggcgcccagacacaatggacacaagaaacggggaccactggagaggctcttctcagcagcccaagctacagtgtgactcagatgataaaaacggccacatccccatcttcttcacctatgctggatagacacacatcacaacaaattacaacggcaccatcaacaaatcattcaacaatacattccacaagcacctctcctcaggaatcaccagctgtttcccaaaggggtcacactcaagccccgcagaccacacaagaatcacaaaccacgaggtccgtctcccccatgactgacaccaagacagtcaccaccccaggttcttccttcacagccagtgggcactcgccctcagaaattgttcctcaggacgcacccaccataagtgcagcaacaacctttgccccagctcccaccggggatggtcacacaacccaggccccgaccacagcactgcaggcaacacccagcagccatgatgccaccctggggccctcaggaggcacgtcactttccaaaacaggtgcccttactctggccaactctgtagtgtcaacaccagggggcccagaaggacaatggacatcagcctctgccagcacctcacctgacacagcagcagccatgacccatacccaccaggctgagagcacagaggcctctggacaaacacagaccagcgaaccggcctcctcagggtcacgaaccacctcagcgggcacagctaccccttcctcatccggggcgagtggcacaacaccttcaggaagcgaaggaatatccacctcaggagagacgacaaggttttcatcaaacccctccagggacagtcacacaacccagtcaacaaccgaattgctgtccgcctcagccagtcatggtgccatcccagtaagcacaggaatggcgtcttcgatcgtccccggcacctttcatcccaccctctctgaggcctccactgcagggagaccgacaggacagtcaagcccaacttctcccagtgcctctcctcaggagacagccgccatttcccggatggcccagactcagaggacaagaaccagcagagggtctgacactatcagcctggcgtcccaggcaaccgacaccttctcaacagtcccacccacacctccatcgatcacatccagtgggcttacatctccacaaacccagacccacactctgtcaccttcaggatctggtaaaaccttcaccacggccctcatcagcaacgccacccctcttcctgtcacctacgcttcctcggcatccacaggtcacaccacccctcttcatgtcaccgatgcttcctcagtatccacaggtcacgccacccctcttcctgtcaccagcccttcctcagtatccacaggtcacaccacccctcttcctgtcaccgacgcttcctcagtatccacaggccaccccacccca

SEQ ID NO: 122435 - DNA, 3875 bp, Homo sapiens
cctctgaagatggaaacatcaggaatgacaacaccgtcactgaagacagacggtgggagacgcacagccacatcaccaccccccacaacctcccagaccatcatttccaccattcccagcactgccatgcacacccgctccacagctgcccccatccccatcctgcctgagagaggagtttccctcttcccctatggggcagacgccggggacctggagttcgtcaggaggaccgtggacttcacctccccactcttcaagccggcgactggcttcccccttggctcctctctccgtgattccctctacttcacagacaatggccagatcatcttcccagagtcagactaccagattttctcctaccccaacccactcccaacaggcttcacaggccgggaccctgtggccctggtggctccgttctgggacgatgctgacttctccactggtcgggggaccacattttatcaggaatacgagacgttctatggtgaacacagcctgctagtccagcaggccgagtcttggattagaaagatcacaaacaacgggggctacaaggccaggtgggccctaaaggtcacgtgggtcaatgcccacgcctatcctgcccagtggaccctcgggagcaacacctaccaagccatcctctccacggacgggagcaggtcctatgccctgtttctctaccagagcggtgggatgcagtgggacgtggcccagcgctcaggcaacccggtgctcatgggcttctctagtggagatggctatttcgaaaacagcccactgatgtcccagccagtgtgggagaggtatcgccctgatagattcctgaattccaactcaggcctccaagggctgcagttctacaggctacaccgggaagaaaggcccaactaccgtctcgagtgcctgcagtggctgaagagccagcctcggtggcccagctggggctggaaccaggtctcctgcccttgttcctggcagcagggacgacgggacttacgattccaacccgtcagcataggtcgctggggcctcggcagtaggcagctgtgcagcttcacctcttggcgaggaggcgtgtgctgcagctacgggccctggggagagtttcagtgaaggctggcacgagcagcgtccttggcagttggcccaggaactggagccacagagctggtgctgccgctggaaggacaagccctacctctgtgccctgtaccagcagaggcggccccacgtgggctgttgctacatacaggcccccacagcccgcctggatgttcggggacccccacatcaccaccttggatggtgtcagttacaccttcaatgggctgggggacttcctgctggtcggggcccaagacgggaactcctccttcctgcttcagggccgcaccgcccagactggctcagcccaggccaccaacttcatcgcctttgcggctcagtaccgctccagcagcctgggccccgtcacggtccaatggctccttgagcctcacgacgcaatccgtgtcctgctggataaccagactgtgacatttcagcctgaccatgaagacggcggaggccaggagacgttcaacgccaccggagtcctcctgagccgcaacggctctgaggtctcggccagcttcgacggctgggccaccgtctcggtgatcgcgctctccaacatcctccacgcctccgccagcctcccgcccgagtaccagaaccgcacggaggggctcctgggggtctggaataacaatccagaggacgacttcaggatgcccaatggctccaccattcccccagggagccctgaggagatgcttttccactttggaatgacctggcagatcaacgggacaggcctccttggcaagaggaatgaccagctgccttccaacttcacccctgttttctactcacaactgcaaaaaaacagctcctgggctgaacatttgatctccaactgtgacggagatagctcatgcatctatgacaccctggccctgcgcaacgcaagcatcggacttcacacgagggaagtcagtaaaaactacgagcaggcgaacgccaccctcaatcagtacccgccctccatcaatggtggtcgtgtgattgaagcctacaaggggcagaccacgctgattcagtacaccagcaatgctgaggatgccaacttcacgctcagagacagctgcaccgacttggagctctttgagaatgggacgttgctgtggacacccaagtcgctggagccattcactctggagattctagcaagaagtgccaagattggcttggcatctgcactccagcccaggactgtggtctgccattgcaatgcagagagccagtgtttgtacaatcagaccagcagggtgggcaactcctccctggaggtggctggctgcaagtgtgacgggggcaccttcggccgctactgcgagggctccgaggatgcctgtgaggagccgtgcttcccgagtgtccactgcgttcctgggaagggctgcgaggcctgccctccaaacctgactggggatgggcggcactgtgcggctctggggagctctttcctgtgtcagaaccagtcctgccctgtgaattactgctacaatcaaggccactgctacatctcccagactctgggctgtcagcccatgtgcacctgccccccagccttcactgacagccgctgcttcctggctgggaacaacttcagtccaactgtcaacctagaacttcccttaagagtcatccagctcttgctcagtgaagaggaaaatgcctccatggcagaggtcaacgcctcggtggcatacagactggggaccctggacatgcgggcctttctccgcaacagccaagtggaacgaatcgattctgcagcaccggcctcgggaagccccatccaacactggatggtcatctcggagttccagtaccgccctcggggcccggtcattgacttcctgaacaaccagctgctggccgcggtggtggaggcgttcttataccacgttccacggaggagtgaggagcccaggaacgacgtggtcttccagcccatctccgaggaagacgtgcgcgatgtgacagccctgaacgtgagcacgctgaaggcttacttcagatgcgatggctacaagggctacgacctggtctacagcccccagagcggcttcacctgcgtgtccccgtgcagtaggggctactgtgaccatggaggccagtgccaacacctgcccagtgggccccgctgcagctgtgtgtccttctccatctacacggcctggggcgagcactgtgagcacctgagcatgaaactcgacgcgttcttcggcatcttctttggggccctgggcggcctcttgctgctgggggtcgggacgttcgtggtcctgcgcttctggggttgctccggggccaggttctcctatttcctgaactcagctgaggccttgccttgaaggggcagctgtggcctaggctacctcaagactcacctcatccttaccgcacatttaaggcgccattgcttttgggagactggaaaagggaaggtgactgaaggctgtcaggattcttcaaggagaatgaatactgggaatcaagacaggactataccttatccataggcgcaggtgcacagggggaggccataaagatcaaacatgcatggatgggtcctcacgcagacacacccacagaaggacactagcctggcgcgcgtgcacacacacacacacacacacgagttcataatgtggtgatggccctaagttaagcaaaatgcttctgcacacaaaactctctggtttacttcaaattaactctatttaaataaagtctctctgactttttgtgtctcc

SEQ ID NO: 122436 - DNA, 3334 bp, Homo sapiens
  misc_feature (1)...(3334): n = a,t,c or g
atggtttggggttttacatgctcaacaacagcgacactagagggacaatcaactgcagcttcttcaaggacctctaatcaggacatatcagcttcatctcagaaccaccagactaagagcacggagaccaccagcaaagctcaaaccgacaccctcacgcagatgatgacatcaactcttttttcttccccaagtgtacacaatgtgatggagactgttacgcaggagacagctcctccagatgaaatgaccacatcatttccctccagtgtcaccaacacactcatgatgacatcaaagactataacaatgacaacctccacagactccactcttggaaacacagaagagacatcaacagcaggaactgaaagttctaccccagtgacctcagcagtctcaataacagctggacaggaaggacaatcacgaacaacttcctggaggacctctatccaagacacatcagcttcttctcagaaccactggactcggagcacgcagaccaccagggaatctcaaaccagcaccctaacacacagaaccacttcaactccttctttctctccaagtgtacacaatgtgacagggactgtttctcagaagacatctccttcaggtgaaacagctacctcatccctctgtagtgtcacaaacacatccatgatgacatcagagaagataacagtgacaacctccacaggctccactcttggaaacccaggggagacatcatcagtacctgttactggaagtcttatgccagtcacctcagcagccttagtaacagttgatccagaaggacaatcaccagcaactttctcaaggacttctactcaggacacaacagctttttctaagaaccaccagactcagagcgtggagaccaccagagtatctcaaatcaacaccctcaacaccctcacaccggttacaacatcaactgttttatcctcaccaagtggattcaacccaagtggaacagtttctcaggagacattcccttctggccagcggcggctgtgggaggctgtgaagaggaggaaggccttgtgcaaacgcaagtcgtggatgagtaaggtgggtgaggaggtggaccaagttggaggtgcgtcctccttttgccagacctcctcttgtgcctcttgctgtatgcagagcgtcgtgatgacaacctcagtgctcctagatagttggcaagatgatactcagagagacaaagtctcagggaagaattcagcttcaagtccactttctggaattgactgtaattcgccaccttctcttacttcagacagtaacttagactctcaatttccacagttcccagaccgtcagctgtgccctccccactcccagcacgttgagagcagcagtacttggctctccaccctcaagacaggaaatttgcttagctcctaccatgcgccctgctgcacagtggccccaatgcctgcaaaagagacagcaccctattcactgcccaaggtcatgagaagggccatgctggattccaaagccatgctcttgccaccaacaccgccctgccctaccaagctctccaccaacaccgccctgccctgccaagctctccaccaacaccgccctgccctgccaagctctcaaccaacaccaccctgccctgccaagcttctccaggtcctcaacctccccgactcactgctgttctccgcagcccaggaactggagccacagagctggtgctgccgctggaatgacaagccctacctctgtgccctgtaccagcagaggcggccccacgtgggctgtgctacatacaggcccccacagcccgcctggatgttcggggacccccacatcaccaccttggatggtgtcagttacaccttcaatgggctgggggacttcctgctggtcggggcccaagacgggaactcctccttcctgcttcagggccgcaccgcccagactggctcagcccaggccaccaacttcatcgcctttgcggctcagtaccgctccagcagcctgggccccgtcacggtccaatggctccttgagcctcacgacgcaatccgtgtcctgctggataaccagactgtgacatttcagcctgaccatgaagacggcggaggtggtccctgtgtgctgtgtgctggttgcgagtgggccgtggttgcggtgggcgtgtgcatggggccctggttgcgtgtgcgtgttgcagtggccgtggttgctgttgcgtgttgcaggggccctggttgctgttgctgtgtgcagttggccgagtgcgttgtggtgccgggcccggtggctggctgcaagtgtgacgggggcaccttcggccgctactgcgagggctccgaggatgcctgtgaggagccgtgcttcccgagtgtccactgcgttcctgggaagggctgcgaggcctgccctccaaacctgactggggatgggcggcactgtgcggctctggggagctctttcctgtgtcagaaccagtcctgccctgtgaattactgctacaatcaaggccactgctacatctcccagactctgggctgtcagcccatgtgcacctgccccccagccttcactgacagccgctgcttcctggctgggaacaacttcagtccaactgtcaacctagaacttcccttaagagtcatccagctcttgctcagtgaagaggaaaatgcctccatggcagaggtcaacgcctcggtcagtgctgcaggccgcgctctggtgaacgtgagcacgctgaaggcttacttcagatgcgatggctacaagggctacgacctggtctacagcccccagagcggcttcacctgcgtgtccccgtgcagtaggggctactgtgaccatggaggccagtgccagcacctgcccagtgggccccgctgcaggtgcatagggctgtggccaggaggtggaggacagtgctggggaacccaagctgggcaagacactgcaaggggtccaggaattaggatggctcgagagatcagagaccagggaagagaggacagtggaaaaggagagttgtgagtgcctgctctgtgtggagaataaaggcgctatattacaaactctgaaacccaaaagagccataggggggcttagaactatttcgaagatgagaaaactgcagcttagagatgacaaggaacctgccccaggacgcagtaggttaagcagcagggcatggtttccaaagccnnnnnnnnnnnnnnnnnnnnnnnnnnnnnnnnnnnnnnnnnnnnnnnnnnnnnnnnnnnnnnnnnnnnnnnnnnnnnnnnnnnnnnnnnnnnnnnnnnnnnnnnnngaattccgccactctgaatag

SEQ ID NO: 122437 - DNA, 468 bp, Homo sapiens
catcttcaccacctctcggccatcctcgacccatttcccagagctgccccaggccggcagtgagctgttcccgtggccccagcgcccttctctgcagacccctccttgggccagaagacgccccacttgagggtcgtcttggccaggggacctctttggggacccagatatccaagtgtgagtgtgggtaacggacactggagtggggctggggtcgctgacgagcagcagcaccgagccgtcctgcaggcgcgcgtcgcgcaccgtctggtggtcgtccagccgccgcgcgttgtagtagaaggcgcgcttccaggagctcacgccctggcccaccagctgggcgcgcaggtcgctgagcgtgtcccgcggccgcacggtcagcggtagcagcagcgcctcgtccgccaggtgcaccttgatgtggtagcgcttccagcgcgacagcccccgccgcagcccctccat

SEQ ID NO: 122438 - DNA, 1777 bp, Homo sapiens
cagacagcagcagactctgctctaggaggagctccagggggcacacagtgggtctctggggacaaagtcctgggttaggcaccaaggggagaggtggagggggataggaagacccccctccaggcacacccaggggccagcaagacccaagtcattctgcaaagcagctccagcaggtctgcctgccggagtgaagtggggtccttctctcttcccctccttctccccctcctctcagccaagcgggaattgcagggtagatgcccgaagtttggcagatgctctgaagggaggcgagcaggagaccccgggccaagtgctgtccccgagctaagcaaacgcacagtctgggcacggctgtccccgtggtggtgatttactatccacctgtccatgctctgagtcctgcagccaacaggactcttaactaaaacattatttcttcccagcctctgggcactccgcccatggtgcctggagagtgtacacggccctcgaggacatgcgtagcctcggcaccccctccccaaagaccctccccaggggctgcgcaacgatgacgtggctgcaggtcagaggtgcaacggaggcccggcacactgccctgagggtctccacccggaattcccacaacggactccctgcaatgcccccgcgatgacctcccacagctaggcccagttccccaacccccaagatcctcgtcctcttggccagagttcttcagaaccccttccccgctgccccaagaccctatgcaagacgaggcatccggatttaaggggaagggggaaacagcccagggggtgggcacaggtgcctcctggggaggtatttgggggtggaaatggggcacagttggaggcctgagaaggagctaggatgtccgcatctcctcgcttagtcattggagagttcggacacgactgcttcaccccccagccagggcctgttcactgcacaaaagggcctgtgggggccccaaagaaggctaggtgctctctggctgggaaggagggaatctgagaagacttcctggaggagactgcaatcccaggtgtattggagctgcagagaagaggttgaaaagtgctccaggcagggggcacggcttgggcaaaggcgtggctgggagaatgtcctgggcaagagcggaagtgcctctgagtgcctctcctgccccttctgtgcttctcttcttgcgatgccctctggctgcccatgggagctttccaaggtggcacagtgctttccactgaagacagggcacccagggccccaagaggggagcaacaacctcaaagtcacacagcagagctgaaaggctcaaggctccctcccgataggctgggcaggagcaaaaatgtcctaggtccttgtcagggactggggctccagcaggagtgtctgaagcagtgtgcatcagctggtcaggccagggtttcatggtccacctggggagcccagaccctgggagttgagatcttaggcttcccagggaggcaggagaaagttgcctttccaaaagtgccctctaccccagcctattccttcagccagtacccaggtccccttggtcatggctctgcctcctccaacccagactacctggggtcgctgacgagcagcagcaccgagccgtcctgcaggcgcgcgtcgcgcaccgtctggtggtcgtccagccgccgcgcgttgtagtagaaggcgcgcttccaggagctcacgccctggccacaccagctgggcgcgcaggtcgctgagcgtgtcccgcggccgc

SEQ ID NO: 122439 - DNA, 904 bp, Homo sapiens
cactcactcattcactcactcacccactcactcccatctcctccagttcaatccccagcatggctgcgtccactatgtctgtctgctccagcgacctgagctacggcagccgcgtctgccttcctggttcctgtgactcttgctccgactcctggcaggtggacgactgcccagagagctgctgcgagcccccctgctgtgcccccagctgctgcgccccggccccctgcctgaccctggtctgcaccccagtgagctgtgtgtccagcccctgctgccaggcggcctgtgagcccagcccctgccagtcaggctgcaccagctcctgcacgccctcgtgctgccagcagtctagctgccagccagcttgctgcacatcctccccctgccagcaagcctgctgcgtgcctgtctgctgcaagccagtctgctgtgtgcccgtctgctgcaagcctgtctgctgcaagcccatctgctgtgtgcccgtctgctctggggcttcctcttcatgctgccagcagtctagccgccagccggcttgctgcaccacctcctgctgcagaccctcctcctccgtgtccctcctctgccgccccgtgtgcaggtccacctgctgtgtgcccatcccctcctgctgtgcccctgcctccacctgccagcccagctgctgccgcccggcctcctgcgtgtccctcctctgccgccccacgtgctcccgcctctcttccgcgtgctgcggcctctcctcaggccagaagtccagctgctgacgggcaggtcccgtttctccagagttgttccagggccatctctgacttccgaaaatccttgcagccctgagccctgtctgagtctcctctgcccatagccactgcacctccagccagcaatgctgagctttcat

SEQ ID NO: 122440 - DNA, 453 bp, Homo sapiens
gcccagtccttgggaagggccaggccctggagaggagcttcttcagggcgcgtcccagactctgcgtctcgagtgaacgcctactgtgtgcctggctctgagcacgggattgtcgctgccacggcatctttaggaaccttcccactaacccagtgggaagggcacaatggctgttaccagcgatcgctcttccctccccagtcaatgccaactcccccctgccccgcctcagagaccccgctgtctttagatacaggccaccgccaagccctgggtcttccccaagatcaattactgcgcacccggttcccctggggtccttcagttaatcctcctcaccccgaagtctggaacctgccttgcacatggaagcggttagctacttcgcttcagcaaaagttcactttcggacccaagttgggaattactaatgtagacagtgattccttatcg

SEQ ID NO: 122441 - DNA, 803 bp, Homo sapiens
atgacggcctgcaagattgaaacgactgaccttgttgaattgggacctggcgttttggaggctctgataggcaagaaggccagagcaggcaaggaaactgtgaagccaatgactggccagtttctacagctctcgccagagcctagaggtgcaaccggaaagaacaagtcccctggaaacgaccccgctgctgccatcgccactgctggtgctgctgctacggcaggccctggctctccatgcagtctccagaatgccctcatctactcccattcatttcttgagcaccacctgaaggctgaacacccagcacacaggacagaccctggtactcagcaggtgctgcataagcgtctgttaaatgcaggactggagcagtgcagaaacagctcttactctgaaatcgcaggcgcttcccggggagtcccgcaccggcgcagacggcggatccagggcgtggagggggccggggaacgggttcagagtgccatctaccggcagttcgtcggactggcaggaaaggccttggccctgcggcgggatggagccccccagactgcgctgtttgctacgctgctccggatccattcactctccaaccgctctgcaatcacttcgcaatcaccagtaaactttgccgcctacttgagaagagaaagttcccccctggggcagagggaggaggaaaatgctttttatattatggtagtggccatgtggaaaagacatatttccctcaacattcgattccgaatgaaaacgcacgtttgtaaagcatatgtgaaacatgtcatgcacgaaag

SEQ ID NO: 122442 - DNA, 2673 bp, Homo sapiens
atgacgagagcgggccccccgcgacagaccaccacggcccgcaccgcccttctggcggccccccagcgacccgccgcggcgctgctaccgccccgcccaggcccagggaccgcgcccagcgaggcgcgcgcccgctgtgggagcggggatagagagggggggcgatgtaccgtgcaccgcgcgccgtcgcgcgctccggacacgcacgcgcgagcgagccatcgccggcatccagccgcccccctcggggcaagtggaggatcagagttctccaactttagcgtgtgtgagaatgatctgaagaaaacaacagtgagattccacttcgcacctactgagacggctatacactcagcttctcctgatgggtcactcatctcatgcctgagatttgccttctctgaacctccattatcccatatgcctaacgaggacgagaacatctctggaaagggttgctgtgaggacagcgtaggagacagcgctcagcgttcaggctcactggagctccctgcagaggcccgggccagccctgacgcctggctgcggtggacgccctcagagctagggcacccatcttccagagaagagcctagaggtgcaaccggaaagaacaagtcccctggaaacgaccccgctgctgccatcgccactgctggtgctgctgctacggcaggccctggctctccatgcagtctccagaatgccctcatctactcccattcatttcttgagcaccacctgaaggctgaacacccagcacacaggacagaccctggtactcagcaggtgctgcataagcgtctgttaaatgcaggactggagcagtgcagaaacagctcttactctgaaatcgcaggcgcttcccggggagtcccgcaccggcgcagacggcggatccagggcgtggagggggccggggaacgggttcagagtgccatctaccggcagttcgtcggactggcaggaaaggccttggccctgcggcgggatggagccccccagactgcgctgtttgctacgctgctccggatccattcactctccaaccgctctgcaatcacttcgcaatcaccagtaaactttgccgcctacttgagaagagaaagaatgagcatagctttgtcattggaaaaaaataaaaaacctttaacagaagaagaagcaatagcagcagcagcagctggacatgagcccccgcagaaccaaataacagaaatcaccatgaaggagccaaagtctacacatagcgagccagacgcctacacctcggccccccggggctcgggcccgacttattgtgccggggccggcaactcgcgggccggcgggggcctcaccaagtacaactctgctcacagcagctcccgggtgcccaggcccagactgcctagccagcgccgcggggcctcctgcggcctcgggcctggcccgcaccagcccgcaccccggacgcgaggtctgacccatgaccccggggacgcccagagcccagtccttgggaagggccaggcccctggagaggagcttcttcagggcgcgtcccagactgcgtctcgagtgaacgcctactgtgtgcctggctctgagcacgggactgtcgctgccacggcatctttaggaaccttcccactaacccaatacaggccaccgccaagccctggtctggcccaagatcaattactgcgcacccggttcccctggggtccttcagttaatcctcctcaacccgaagtctggaactgcttgccatggaacgacagacaactcaaaagagccaagacaaaattgaaagagaagaacagaattgaaggactggcagtacccaacttcaagacttactacagagctgcagcaatcaagacagtaaggacttcttccatggagaagcccctcaccgtcctgcgagtgagcctgtaccatcccacgctgggcccatctgcctttgccaatgtcccaccacggctgcagcatgataccagccctctgcttctcggacgggggcaggacgcccacctccagctgcagctccctcgcctctcccgccgtcacctgtccctggagccctacctggagaaaggcagtgccctgctggccttctgcctcaaggccctgagccgcaagggctgtgtgtgggtcaatgggctgacgctgaggtacctggagcaggtccccctgagcaccgtcaacagggtctccttctcaggcatccagatgctggttcgcgtagaagaaggcacatccctggaggcttttgtctgctatttccatgtcagcccttcacccctgatttacagacctgaggctgaggaaactgacgaatgggaaggcatctcccaggggcagcctccccctggttcaggctgtcaacaatttctgttttctgcccaaaaggatgatcgttttgcacccagggcaagctacaaggaggtccaacttcactcacaggccctgagcatcttctccatcaggaaaacagagctggaaccgtcaggctggcttcagggcctggtcttcgcacttgatatcactatccctcacctgctcagacagccagagcaggcgggtattttaaccctcgcattcctctgcttttccaagaatgtgaatcttgccaagctgtccgtgagagacacgggctcccctcgagggagacttgcaaatgctccataa

SEQ ID NO: 122443 - DNA, 504 bp, Homo sapiens
ggggtttaaaccaccagtgacccttatcatcctgctccagagattggcttgggatagtcacccaatgcgggccaatgcaaggtgacttgccaggggcttctgggaaagaagtttcctttctctgaggaaatgtgaatgaggacatccataactcaggttgtgtctggcagccatcttgtgatcatctggcaagacagcccaagaataaagccgtcaccatggagactaagaagagacagaaagacactgggtcttcattgttttcgtccagctgttcatgaggccttatctgaagcccacgtgacctccggactactcacttacatgagagaataaagctcttttttgtttagaccaaataaatacataatacaattacataatcccttgattcctttttatgactgagctcagagactatattttgtcattttaaatcacctttgtcttacagtttatttaactgaaacaaataaacaaaccaaaacacgccaaaaaaaaaaa

SEQ ID NO: 122444 - DNA, 879 bp, Homo sapiens
atgagtatggccagcaatgtcaatgccacaaaaggccacgtgggcctttcggattccattctcctggccccagaggaggaagttacatttcagacctgtcaggacaggagtcgccagaggccggtggtggatttcctccccgcatctcagctctccgtccaaagtcaaattgctcttttctccgcccacgcgggcgtggcagctgatatccggccgctgggcgtccccgcgcccccgggggccccgccctgcagctatctccgcggcccacccggcggcgcctccctgcagggctgctccccagcccaaaccgccgcggcgcgacgtggagccagccccgcaaagctgcatccaccccccgaggaccagcccctcgaaggcaaggccaggacctccccgggcggctgcagccataaatttaagaacggtgtgagttcctgccagctgctgatgacaggttttccagaagggaatgatattgccggcaaggcagtgattaagtgtgatgacaactaccaatttagtgaagggagaaagaattgtgccatgaaaaatggaaaactcctgagaagctgttccagcgtcaggagagcagcagacaagctggactggggaagattcttcctggtcccatacttcctagccatgctgttggcagggattaacatcattgcaattctctgggtagaccttgggaggtttaaaccaaccagtgacccctatcatcctagctccagagattggcttagggatagtcacccaatgcaggccaatgcaaggaaatacctctgtacactcaccagacactggctgctggttgtcacggtgctaagagctgtgggaaacatgaagagcaatgagaccaggtccctgctctga

SEQ ID NO: 122445 - DNA, 1288 bp, Homo sapiens
ctaaattccactgttccattgtatgaaaataaaataatcttcctctcctccaccaccaaagtgcatgtgggtcacgtccagcctggggagactgtaaacgatgccacctacgcgcttccttgcgcatctccctgaccaggcgtacgtgtgcttctgctgcgtggagggcaaggagcgaaacctcagccgcagcaaacacacctctccacattccagcacacctgcccacctgctgtccaagcccccgaggagctcagaggttgtgtatcacagccaggtgcttccaggaactccccgccccacgtcgcagctgcacctggagctggtgcttccggtttttgcccgtctacctggacataggggaattgaaagagaacagtcctcaccctacagtgcagggggcaccacaggggctacacagaggaggactgagtcaactcctgatgagatggtgtggaaccatatggaaaagtggcagctgccgcaggacctcaacgtgggagaggctactgttgcccctggagaagacaacggcacggacgccatcggcacggccacccatcgctctgcagagaagacaacggcacggacgccatcggcacggccacccatcgctctgcagagaagacaacggcacggacgccatcgccacggccacccatcgctctgcagagaagacaacggcacggacgccatcggccacggccacccatcgctctgcagagaagacaacggcacggacgccatcgccacggccacccatcgctctgcagagaagacaacggcacggacgccatcgccacggccacccatcgctctgcagagaagacaacggcacggacgccatcgccacggccacccatcgctctgcagagaagacaacggcacggacgccatcggccacggccacccatcgctctgcagagaagacaacggcacggacgccatcggccacggccacccatcgctctgcagagaagacaacggcatggacgccatcggccatggccacccatcgctctgcagagaagacaacggcatggacgccatcggccatggccacccattactctgcagagaacataacggcacagatgccatcgccacggccacccattgctctgcagagaacataacagcacggatgccatcggccatggccacccattgctctgcagagaacataacagcatggacgccattggccatggccacccatcgctctacaaagaagataacggcatggacgccatcgccacggccacccattgctctgcagagaacataa

SEQ ID NO: 122446 - DNA, 588 bp, Homo sapiens
  misc_feature (1)...(588): n = a,t,c or g
cccagcatcgacactatcagatagatcactagtccgagnggaggaattcctcacctgcacctccctgctagacctcctgctgcccactggcttggagccactggactcagaggagcctagtgagaccatgggcctgggagctgggctgggagcccctggctcatgcttccccagcgaagagaatgaagagtctcggattctgcagccaccacagtacttctgggaagaggaggaagagctgaatgactcaagtctggacctgggacccactgcagattatgtttttcctgacttaactgagaaggcaggttccattgaagacaccagccaggctcaagagctgccaaacctcccctctcccttgcccaagatgaatctaggtgagcctccctggcatatgcctcccagagaggaggaagaagaggaagaggaagaggaggagagggagaaggangaggtanagaaacaaaggaggaggaagcanagagaaaaataaaacaaagcaagacaggggcanaaaaagaaggaggagatctgaatctcgtcttttcagganganatcgagctggaaataaagagagactgtga

SEQ ID NO: 122447 - DNA, 1357 bp, Homo sapiens
ctacaggtgtgctaggtgccccaccagtgtaagcaagtgtgcgtttcttcccggcactcctgtatcagcaatctgtttacaaggtgtcgatgacacgtggctgaacacatctgggtcaggaggaccctgagcttggattcggatctgcgtagaatcccagggtatcctggattgagcttcagctgcctgcccttctaggagctgctggttgaagatcttcttgtcccaaggtagcagaggaaggtgtcagttccatgtctccaggggccagtggggaagaggctgaggttctagagccaaggggatcttcatctgggtgctcggccccactgggagctgtggtttgagggaatgaaggcaaggccggcacctcctcgtgctggccagacaaaccagctgctcctgcagtggcttcctcgcttgcttcctgaggagcctcgaactctaccccaagccctgcagctggcagcactgtggcctctgcctcttggctggtggagtcctggtcccccggagtcactgtagttggggtgactgaaggcagcagcaagctgggccccatgctgctctccacctccacacctgatgaggcctggtccccggagtcttcatgcctgcttttggtggcccctggggtctggctgctgcctgaggctggctttcttcttgggatccattcacagggagcagctcctccctctccctcctcctcttgtttctctacctcttccttctccctctcctcctcttcctcttcctcttcttcctcctctcttccgatggccactccatgtgatttgggcttctcaaagtgtggcagtaggctctcgcctcctgccaaggctctgctagaagatgctctgactcccagaggtggcgcctgagcctggatgagggacagagccagcatcggggctgaccctgtgtggctctgcccttccctcccgtcatctttcctttgcttttctttgaaagctgtgtgcacatccagcgctctccctgctacaccactggcttcctttctccaacgcagaaaaccaagccgtctaagcagggccttggggtttgctcttcccaggtcagtaggcatccagcgctggggcagctgcttcaggacatcgccgaggacaagtctcctccccattctggttccaccatctgtagcctgtggctttcatcctcaagggctccatgcgaccgctgcacatccaggcccagttccaaggtgcaaggctacttgtgccagcaagatagcagaagcaggacaagagctggctggaagacacctaccgtggtgggaagacatgtacccgtgaagatcgagaaagagtccatccggccagcaaacttcggctga

SEQ ID NO: 122448 - DNA, 498 bp, Homo sapiens
  misc_feature (1)...(498): n = a,t,c or g
actgggctgtctattgatctcatttttgcccttctttaacttttacttcctcattctttttctgaggtatnnnnnnnnnnnnnnnnnnnnnnnnnnnnnnngatcaggctgaatttattgacttgggcccactaagtagggactctgcatttaatgttgcagcttgaggagttaaaaaagcannnnnnnnnnnnnnnnnnnnnnnnnnnnnnnnaataaatttttcnnnnnnnnnnnnnnnnnnnnnnnnnnnnnnnnnnnnnnnnnnnnnnnnnnnnnnnnnnnnnnnnnnnnnnnnnnnnnnnnnnnnnnnnnnnnnnnnnnnnnnnnnnnnnnnnnnnnnnnnnnnnnnnnnnnnnnnnnnnnnnnnnnnnnnnnnnnnnnnnnnnnnnnnnnnnnnnnnnnnnnnnnnnnnnnnnnnnnnnnnnnnnnnnnnnnnnnnnnnnnnnnnnnnnnnnnnnnnnnagcaggtcccaggntccagttgnnggacccgcg

SEQ ID NO: 122449 - DNA, 1075 bp, Homo sapiens
gactctatctcaaggtgtgctacatttgaaaagaactgtttgagttctctaatttatataaacacccatctggagaagaggtatgggagcggatattaagggtataggataatggtggaaggaacataagagttgtatcaggctgaatttattgatttgggcccagtaagtagggactctgcttttaatgttgcagctcaaggagttaaaaaaggttctaataggttatttccttggttagctgaaatatggattacaagatggcccactgtgagcgagctggaaatgcctgatctcccttggtttaatgtagaggaagggatcaaaaggcttagagagattgggatggtggagtggattagtcactttagatgtactcatcccagctggaagggtccagaagatatacccttgaccaatgccttgcaaaatagattcgtgagggcagcacctgcatctctgaagagccttgtaattgctctttctctgtatgtcagatgcaacagcgggaactgcagtcactcaattacaaaatttaaatacaatgggaataattggatcccgaggtgtcagggaccaagtggtagcactcaaccatcaaaggcaggtgggtgtagcgaaccggcaaggcacgccacggcaaggggcaccaaaaagcggacacggtaacccggacaggctaaaagaccaggtccaaaggaacgaggaacccgcagccacgcgtacgcacacacatccgtcacaacacctaagaacaacagacacgacacgcgaccatcacaaagaacaccacaacaaaagagagacgcacaacaccaaacggagacaccaaacacaacaccaaacacgtcgcgcccgccgtcacatgtctcctttttccggagtaaaaaaagaagaagaagaccacaacacgaagaacgcaacaaaagaacaagaacagaagaagaagcaagagagaggaacagagcgaacaaagacgacacaaaacgacaaccaccaaagaaaaccagagagaacagacgacaactgtggagtgagtttttatcttgggagtgagctcctgatgaaagaatga

SEQ ID NO: 122450 - DNA, 398 bp, Homo sapiens
cctgatgctggatctttagaatatcggaagatagccagaggttccatttgtaagtaagtggctagatagaacttccacctcgtagcatttcctcaaccatcatgacccctgttcggcttttttgcaaatttaattttaattttttggttcagctttaaaattggaaactttctggctgcgtgtggtggccaaaggattttgtagtgccaatgggatcacagtctcagcagaccagaagtatgtttatgtagctgatgtagcagttaagaacattcacataatggaaaaacatgataactgggatttaactcaactgaaggtgatacagttgggcaccttagtggataacctgactgtcgatcctgccacaggagacattttggcaggatgccatccta

SEQ ID NO: 122451 - DNA, 475 bp, Homo sapiens
  misc_feature (1)...(475): n = a,t,c or g
ggccccccgagaccatggggaagctcgtggcgctggtcctgctgggggtcggcctgtccttattcggggagatgttcctggcgtttagagaaagggtgaatgcctctcgagaagtggagccagtagaacctgaaaactgccaccttattgaggaacttgaaagtggctctgaagatattgatatacttcctagtgggctggcttttatctccagtnnnnnnnnnnnnnnnnnnnnnnnnnnnnnnnnnnnnnnnnnnnnnnnnnnnnnnnnnnnnnnnnnnnnnnnnggcaaatattgctgcctgatttttcttctggaagcttcatcccagaggggcatccgcctgtatgagggattaaaatatccaggcatgccaaactttgcgccagatgaaccaggaaaaatcttcttgatggatctgaatgaancaaaacccagggcacaagcactagaaatcagtggtggacttgacaa

SEQ ID NO: 122452 - DNA, 1273 bp, Homo sapiens
gcaggaaccgcccgccgcgcccccgagagctctcggcgccgcgcagtcgccgctgggcaccccgagaccatggggaagctcgtggcgctggtcctgctgggggtcggcctgtccttagtcggggagatgttcctggcgtttagagaaagggtgaatgcctctcgagaagtggagccagtagcaacctgaaaactgccaccttattgaggaacttgaaagtggctctgaagatattgatatacttcctagtgggctggcttttatctccagtggattaaaatatccaggcatgccaaactttgcgccagatgaaccaggaaaaatcttcttgatggatctgaatgaacaaaacccaagggcacaagcactagaaatcagtggtggatttgacaaagaattatttaatccacatggggatcagtattttcatcgacaaagacaatactgtgtatctttatgttgtgaatcatccccacatggaagtccactgtgggaggatattttaaattttgagggaacaacaacgttcttctgggtattacctggaaaactattaaaacatggaacttcttcaaaagtgtgaatgacattgtggttcttggaccagaaacagttctatgccaccagagaccactattttaccaactccctcctgtcattttttgagatgatcttgggatcttcgctggacttatgttcttttctacaggcgcaagggaggttaaaagtggtggccaaaggattttgtagtgcccaatgggatccacagtcctcagccagacccagaagtatgtcctatgtaagctgatgtagcagcctaagaacattcacataatggaaaaacatgataactgggatttaactcaactgaaggtgatacagttgggcaccttagtggataacctgactgtcgatcctgcccacaggagacattgttggcaggatgccatcctaatcctatgaagctactgaactataaccctgaggaccctcccaggatcagaagtacttcgcatccagaaatgttttgtctgaaagcccaagggtgagcaccggttatgccaacaatggctcttgtgcttcagggcaccttgtgggcttctgtgtaccatgggaaaattctcataggcaccgtatttcacaaaactctgtactgtgagctctagactctagatagtaaaaaaaaaaaaaaaaaagtctacatattttgtaaaagtaaactgataattgtatgataagtggcactgtaagtaaatagcaaaccccaaaaaaa

SEQ ID NO: 122453 - DNA, 2352 bp, Homo sapiens
  misc_feature (1)...(2352): n = a,t,c or g
cgtgggtctgacggcttgagtagcgctagggagaatccctgcaggtaatatttgactttgggttcatattaatctgaggggaaaataaaagggccctcttctcctctcgcttccctgccgggcaggcgccatggcggaaacatcaggcgacgggcgcctgcggagaggcgatggcagcggcggaaggctcctcgggcccggcgggcttgactctgggccggagcttctcgaactaccggcccttcgagccccaggcgtttggggcctcaagcccgagcttggccggcttgacggggctttctccggcaatgaaagggctgaaggctgcaaggtcccgcaagaagggcgcttgctcaaactcctggccgggactgacgcggccgggacgtgcggccccccgctgggcngggggcctggtgggtggccaggaagaggcgtcccaggaagccggcctgccggcaggagcgggccccagccccacctttccagccctgggcatcgggatggactcctgcgtcatccccctgaggcacgggggcctgtcactggtgcagaccacggacttcttttaccccttggtagaagatccctacatgatggggcgcatagcttgtgccaacgtgctgagtgacctctacgccatggggattactgagtgtgacaacatgttgatgttactcagcgtcagccagagtatgagtgaggaggaacgcgaaaaggtaacgccactcatggtcaaaggctttcgggatgcggctgaggaaggagggacggcagtgaccgttgggcaaacggtggtcaacccttgggatttattaatcggtggagttgccacttgtagtattgccaaccaatttgagttcataattgccggacagcgccgtcgttggggacgtgctgggtgttaaccaaaccgtttaggaacccaggtttgctgttcaatgcccaccaatggcttggataattccttgaaagatgggattaaagttaaagatggtggttttccagagaagaaggtggagctgggcctatcaggaagcccatgttcaatatggctaccctcaaccagaactgctgcagggtttaaatgcacacatttaatgcccatgcggccacagatatcacatggctttgggcattctaggacactcccagaaccttggcaaaacaacaaagaaatgaagtgtcctttgttattcataatctgccaataattgccaagatggctgccgtcagcaaaagggccagtgggacggtttggggcttctttcaaggaacctcagcctgaaacctctggggggattactggattttgtctgccaagaggaacagggcgggctcgctttttgttcttgaaattcaaatccttcccaagtacgggagagggtcacccaaagcgtgggatcgttggcattgtggaaaagggaaaccgaacggccccggatccattgacaagcccgcgagttattgaagttcctgcctcgtgggggccacagctgctgttcttgctccctgacagttcaaatgccctcctcttgagcctagctcgtgagattgaaagaacagaagttgtttggaccttagagccattgtccacaatcacggatggttctcaagagttgattgtaaagaaatttccaaagaaggctgcctgcatagtggttccggctgccctttctaggtgattggaatcagccccttttaaagcagtctttataatgcattcccgaggccagagtaacattttgaactttggggggatatttggtccatcacttgggtagaagaggagccaaaaatacctctggtttctcttgcccaaagtaagatgaagctattcccaggttggggggattttttctttgccacgggggttgattaatttctgccacaggggagtgagattattaaaggtaacacacacaccaaaggaaattgcaaaatgaaaaaaattaagaagcaaaatgagttttggacccaatattggttgataaatcctaaattgttaagagagatcttataatgccaacatcaaattcctttattcaaattttacctgaaagtactggcctctttccctgcctctggacaagaattgagcaacttgtcctgatgactgggaaaggaggacctgcaacccatcctgacttggtctctgttaatgacgtctctccctctaaaccccattaaggactgggagaggcagagcaagcctcagagcccaggcctcagtggtcattaagatgttaagtcttttgcggcagattcctggtgatttgatcgaataaagagtaatttcttgctaaataaataaaagaagccttgttgaaaaactaaaaaaaaaaacccaaa

SEQ ID NO: 122454 - DNA, 2600 bp, Homo sapiens
  misc_feature (1)...(2600): n = a,t,c or g
ggggtgctgcttcgtgacgtcagggctgagctagggggcgcccgctcctggctgcccgctcctcccggccctgcggcccccgcctgccctttaaaagagcggggcctgcgccggccgcgccacaccgcggggaccaggaggcacgctggttttccggggccgctccatcgcgccttcctcctgcgcctcgcttctccggtccagccgccatcttcctttccgcacaggggccgccgagcggggccatgcagccaacgctgcttctcagcctcctgggagccgtggggctggcggctgtcaattccatgccagtggataacaggaaccacaatgaaggaatggtgactcgctgcatcattgaggtcctctcaaatgccttgtcgaagtccagcgctccacccatcacccctgagtgccgccaagtcctgaagacgagtagaaaagacgtcaaagacaaagagacaactgaaaatgaaaacacaaagtttgaagtaagattgttaagagacccagctgatgcctcggaagcccacgagtcctccagcaggggagaggcaggagccccaggggaggaggacatccaaggcccaacaaaggcagacacagagaaatgggcagagggaggcgggcacagccgagagcgagcggatgagccccagtggagcctctatccctccgacagccaagtctctgaagaagtgaagacacgccattctgagaagagccagagagaggatgaggaggaggaggagggagagaactatcaaaaaggggagcgaggggaagatagcagtgaagagaaacaccttgaagagccaggagagacacaaaacgcttttctcaatgaaagaaagcaggcttcagctataaaaaaagaggagttagtggccagatcggaaacacatgctgccgggcattctcaggagaagacacatagccgagagaagagtagccattttcagctgnttaggaggcagggagccaggagaatcggccccaggagtctaaaggccaaccccgaagccaggaaaaatctgaggaaggtgacgaagatgccacctctgaggtggacaaacgacgcacgaggcccagacaccaccacgggaggagcaggcccgacaggtcctcttcaaggagggagttttccctcttgaggaaaagggacacccccagggaggaatctgaggagtcaaacgtcagcatggccagtttaggggaaaagagggaccaccattcaacccactacagggcttcagaggaagaacctgattatggagaagaaataaagggttatccaggcgtccaggcccctgaggacctggagtgggagcgctataggggcagaggaagtgaagaatacagggctccaagacctcagagtgaggagagttgggatgaggaggacaagagaaactaccccagcttagagcttgataagatggcacatggatatggtgaagaaagtgaggaagagaggggccttgagccgggaaagggacgccatcacagaggcaggggaggggagccacgtgcctatttcatgtctgacaccagagaagagaaaaggttcttgggtgaaggacaccaccgtgtccaagaaaaccagatggacaaggcaaggaggcatccacaaggtgcgtggaaagagctggacagaaattatctcaactacggtgaggaaggagccccagggtaagtggcagcagcagggagtcctgcaggacactaaagtaaaacagggtggaagctaggtttcaagataaacaatatagctcccatcacacagctgaaaagaggaagagattaggggaactgttcaacccatactacgaccctctccagtggaagagcagccatttggaaagaagagacaacatgattgacaattttctcgagggtgaggaggaaaatgagctgaccttgaacgagaagaatttcttcccagaatacaactatgactggtgggagaaaaagcccttctctgaggatgtgaactgggggtatgagaagagaaacctcgccagggtccccaagctggacctgaaaaggcaatatgacagggtggcccaactggaccagctccttcactacaggaagaagtcagcttgagtttccagacttctatgattctgaggagccggtgagcacccaccaggaggcagaaaatgaaaaggacagggctgaccagacagtcctgacagaggacgagaaaaaagaactcgaaaacttggctgcaatggatttggaactacagaagatagctgagaaatttcagccaaaggggctgactgtcattggagcggtgggcactgttaagaagcagccatcacatgatctgtttttcaccacttcactgaaagacaccatttatctacccaagggcagaaagtagaacttactattcattaaatgtttgacacaattggaattgtctttaatttctgtcagaatgctattgaaaatgtgaattgcatgacttgtagcatattcttttctgcaaaatagacatattaacatgcttatgacaatgactgtgctactgtctttggaaaaatgtttgtctcagttggaaataataaaagattcacctgagaccaaaa

SEQ ID NO: 122455 - DNA, 2049 bp, Homo sapiens
agcaccgcggacagcgccagcctcgctcttccccgccgctcccgcagccctagacttgtgtctagactctagattctcccagtccctattataccagccgccaagtcctgaagacgagtaagtgtcccacacggcaggcagatcttggtcactgcagtgatccttgttcctactccctccacatcaccttcccagctgatgcctcggaagcccacgagtcctccagcaggggagaggcaggagccccaggggaggaggacatccaaggcccaacaaaggcagacacagagaaatgggcagagggaggcgggcacagccgagagcgagcggatgagccccagtggagcctctatccctccgacagccaagtctctgaagaagtgaagacacgccattctgagaagagccagagagaggatgaggaggaggaggagggagagaactatcaaaaaggggagcgaggggaagatagcagtgaagagaaacaccttgaagagccaggagagacacaaaacgcttttctcaatgaaagaaagcaggcttcagctataaaaaaagaggagttagtggccagatcggaaacacatgctgccgggcattctcaggagaagacacatagccgagagaagagtagccaggagagtggagaggagacagggagccaggagaatcacccccaggagtctaaaggccaaccccgaagccaggaagaatctgaggaaggtgaggaagatgccacctctgaggtggacaaacgacgcacgaggcccagacaccaccaccccgaggagcaggcccgacaggtcctctcaaggagggagtcttccctctgaggaaaagggactcccccaggaggaatctgaggagtcaaacgtcagcatggccagttttaggggaaaagagggaccaccattcaacccactacagggcttcagaggaagaacctgaatatggagaaggaaataaaaggggttatccaggcgtccaggcccctgaggacctggagtgggagcgctataggggcagaggaagtgaagaatacagggctccaagacctcagagtgaggagagttgggatgaggaggacaagagaaactaccccagcttagagcttgataagatggcacatggatatggtgaagaaagtgaggaagagaggggccttgagccgggaaagggacgccatcacagaggcaggggaggggagccacgtgcctatttcatgtctggacaccagagaagagaaaaggttctttggtgaaggacaccaccgtgtccaaagaaaaccagatggacaaggcaaggaggcatccacaaggtgcgtgggaaagagcttgacagaaattttctcaactacggtgaggaaggagccccagggaagtggcagcagcagggagacctgcaggacacttaaagaaaacagggaggaagcttaggttttcaagataaaccattttagcttcccatcacacagctgaaaagaggaagagattaggggaactgttcaacccatactacgaccctctccagtggaagagcagccattttgaaagaagagacaacatgaatgacaattttctcgagggtgaggaggaaaatgagctgaccttgaacgagaagaatttcttcccagaatacaactatgactggtgggagaaaaagcccttctctgaggatgtgaactgggggtatgagaagagaaacctcgccaggggtccccaagatggacctgaaaaggcaatatgacagggtggcccaactggaccagctccttcactacaggaagaagtcagcttgagtttccagacttctatgattctgaggagccggtgagcacccaccaggaggcagaaaatgaaaaggacagggctgaccagacagtcctgacagaggacgaggtatggtctagggcttctgtttaaaagtacttactctggtcaatgttagcacattatgttcaagactatccgagctgactgtcattggagcggtgggcactgttaagaagcagccatcacatgatctgtttttcaccacttcactgaaaga

SEQ ID NO: 122456 - DNA, 381 bp, Homo sapiens
cagaagtttgcccgtgcccacggggtcagcgtccagccagaggcctcggacacccacatcctcctcctggaaggcttcctgctctacagctacaatacccgcaactacacagtccctgatccccccggcctcttcgatggccacgtgtggcccatgtaccagaagtataggcaggagatggaggccaacggtgtggaagtggtctacctggacggcatgaagtcccgagaggagctcttccgtgaagtcctggaagacattcagaactcgctgctgaaccgctcccaagaatcagcccccttccccgctcgcccagccaggacacatggacccggacgcggatgcggccacagaacggcattcctgcagcgtcccagcagg

SEQ ID NO: 122457 - DNA, 1087 bp, Homo sapiens
atgaagctcatcgtgggcatcggaggcatgaccaacggcggcaagaccacgctgaccaacagcctgctcagagccctgcccaactgctgcgtgatccatcaggatgacttcttcaaggtgcccgcccttgcccggggagtgctggagtctctggacatggaggccatgctggacaccgtgcaggcctggctgagcagcccgcagaagtttgcccgtgcccacggggtcagcgtccagccagaggcctcggacacccacatcctcctcctggaaggcttcctgctctacagctacaagcccctggtggacttgtacagccgccggtacttcctgaccgtcccgtatgaagagtgcaagtggaggagaagtacccgcaactacacagtccctgatccccccggcctcttcgatggccacgtgtggcccatgtaccagaagtataggcaggagatggaggccaacggtgtggaagtggtctacctggacggcatgaagtcccgagaggagctcttccgtgaagtcctggaagacattcagaactcgctgctgaaccgctcccaggaatcagccccctccccggctcgcccagccaggacacagggcacccggacgtggatgcggccacagaacggccaggactgcagcgtcccagcaggacagcatgtgagcgtttccctatgggggtgtctgtacgtaggagagtggaggccccactcccagttgggcgtcccggagctcagggactgagccccaagacgcctctgtaacctcgctgcagcttcagtagtaaactgggtcctgtttttttaaaaaaaaaaaaaaaaaaaaaaaaaaaaaaaaaaaaaaaaaaaaaaaaaaaaaaaagggggggggcccttaaaaaaaaaacccgggggggcccaaaaaaaaccggggaaaaaaaaaaaaaattttttttttaaaaggggggaaaaaaaaaacccccgggggatttttgaaaaaaaaacctttttttgggggggggaaatttggccccccccccccccaaaaaattaaccccctgaggaaaaaaaaaaatttttaagggggaaggggggcaaaacaaccc

SEQ ID NO: 122458 - DNA, 421 bp, Homo sapiens
ttctgctaaaaatagaggcaggacttggctgtttcacaacagtggcagttgaggttcctggtgagatcttgactcaccaaaacctcagggagatgagtttgcagacatcaaaaagaaggaaacggcttgagcggcattatggggaagcttacgcaggctgtcattactccacagagcgccatgatgccctctacgtggtaggggcactggacgaagccatggagctgcggggcatgcggtaccacccaatcgacattgagacctcggtcatcagagcccataaaagcgttacggaatggcagcagcaaagaggcagcactggaacacagactccgctggccaggtggagtgatgctgtgctagaaatgggaactcgggaagatggtgaaacagtcgcagaagccaccgagagagaaggctg

SEQ ID NO: 122459 - DNA, 6200 bp, Homo sapiens
  misc_feature (1)...(6200): n = a,t,c or g
attctgcacctcctgacgtaaccacgtacacctcagagcactcgatacaggtggagagaccgcagggttccacggggtcccggacagcgcccaagtacggcaacgccgagctcatggagaccggggatggagtaccagtaagtagccgggtgtcagcaaaaatccagcagcttgtcaataccctcaaacgaccgaaacgaccacctttacgagaattctttgtcgatgactttgaagaattattagaagttcaacaaccggatccgaaccaaccaaagccggagggggcccagatgctggccatgcgcggagagcagctgggcgtggtcacgaactggccgccgtcgctggaggccgcactgcagaggtggggcaccatctcgcccaaggcgccctgcctgaccaccatggacaccaacgggaagcccctctacatcctcacttacggcaagctgtggacaagaagtatgaaggtcgcttacagcattctacacaaattaggcacaaagcaggaacccatggtccggcctggagatagggtggcactggtgttccccaacaatgatccggctgccttcatggcggctttctacggctgcctgctggccgaggtggtccccgtgcccatcgaggtgccactcaccaggaaggacgcagggagccagcagataggtttcttgcttggaagctgtggagttactgtagccttgactagtgacgcctgccataaaggacttccaaaaagcccaacgggagagatcccacagtttaaaggttggccaaagctgctgtggtttgtcacagagtctaaacatctctccaaaccgccccgagactggttttccacacattaaagatgccaataacgacactgcgtatattgagtacaagacgtgtaagggatggcagtgtgctgggtgtgacggtgacgaggactgcgctgctgacacactgccaggccctgacgcaggcgtgtggctacacggaagctgaaaccattgtgaatgtgctggatttcaagaaggacgtcgggctctggcatggcatcctgacaagcgtcatgaacatgatgcatgtgatcagcatcccgtactcgctgatgaaggtgaaccctctctcctggatccagaaggtctgccagtacaaagcaaaagtggcgtgtgtgaaatcgagggatatgcattgggcattagtagcacacagagatcagagagacatcaacctctcctctctgcgaatgctgatagtggcggacggcgcgaacccctggtctatttcttcttgcgatgcatttctcaatgtcttccaaagtaaaggccttcgacaggaggtcatctgtccttgtgccagctcgccagaggccctcactgtggccatccggaggcccacggatgacagtaaccagcccccgggccggggtgtcctctccatgcatggactgacctatggggtcattcgtgtggactcggaagagaagctgtccgtgctcaccgtgcaggatgtcggcctcgtgatgcctggagccatcatgtgttcagtgaagccagacggggttcctcagctgtgcagaacggatgagatcggggagctgtgtgtgtgtgcagttgcgacgggcacgtcctactatggcctctctggcatgaccaagaacacctttgaggtgtttcccatgacaagctccggggctccgatcagtgaatacccattcataaggacaggcttgctggggttcgtgggtcccggaggcctcgtcttcgtggtgggcaagatggatggcctcatggtggtcagcgggcgcaggcacaacgccgacgacatcgtggccactgcgctggccgtagaacccatgaagtttgtctaccggggaaggatagccgtgttctcggtgaccgtgctgcacgacgagaggatcgtgatcgtggctgagcagaggcctgactccacggaagaggacagtttccagtggatgagccgtgtgctgcaggcgattgacagtatacatcaagttggagtttattgcctggccttggtgccagcaaacaccctccccaaaaccccgcttggtgggatccatttatcagaaacaaaacagctttttctggagggctctctgcacccctgcaatgtcctaatgtgcccccacacctgcgtcacaaacttgcctaagcctcgacagaagcagccagaaatcggccctgcctctgtgatggtggggaacctggtctctgggaagagaatcgcccaggccagtggcagagacctgggtcagatcgaagataacgaccaggcacgcaagttcctgttcctctcagaggtcttgcagtggagagcacagaccaccccggaccacatcctctacacgctgctcaactgtcggggtgcgatagcgaactcgctgacctgcgtgcagctgcacaagagagctgagaagatcgccgtgatgctgatggagaggggccaccttcaggacggcgaccacgtggccttggtctaccccccaggaatagacctgatagcagcgttttatggttgcctgtacgcaggctgtgtgccaataaccgtccgtcccccgcacccacagaacatcgcgacgacgttgcctaccgtcaagatgattgtggaggtgagtcgctctgcctgtctgatgacgacacagctgatctgtaagttgctgcggtccagggaggcggcggcggctgtggacgtcaggacgtggcccctcatcctggacacagatgattagcccaagttaacggtttgcccagacactgaaaccttgcaacccagacactcttgcatatctcgacttcagcgagtccacaactgggatgctagctggcgtaaagatgactaacgcagccaccagtgccttctgccgttccattaagctgcagtgtgaactttacccctctagagaagtggccatctgcctggacccttactgtggactgggatttgtcctctggtgcctctgcagtgtgtattctgggcaccagtccatcctgatcccgccctctgagctggaaaccaaccccgccttgtggcttcttgccgtgagtcagtacaaagtccgagacacgttttgctcctactccgtgatggagctgtgcaccaaagggctgggctcgcaaacagagtccctcaaggcgcgagggctggacttgtcccgagtgaggacctgcgtggttgtggcggaagagaggcctcggatcgcactcacacagtcgttctcaaagctgtttaaggacctgggccttcacccgcgggccgtcagcacctcgttcggttgcagggtgaacctggcgatttgcttgcagggaacctcaggacctgacccaaccactgtctacgtggacatgagagccctgagacacgacagagtccgcttagtggaaagaggatcccctcatagtctgcccctgatggaatcgggaaagatacttccaggggttcggattataattgccaacccagaaacaaaaggaccgctgggggactcacaccttggagagatttgggttcacagtgcccacaatgccagcggttatttcactatttacggagacgaatccctccagtcagatcacttcaactcaagactaagttttggagacacccagaccatctgggcacgcacaggctacttggggttcctgcggagaactgagctcacaagatccaaatggagagcgccatgatgcccctcnacgtggtaggggcactggaagaagccatggagctgcggggcatgcggtaccacccaatcgacattgagacctcggtcatcagagcccataaaagcgttacggaatgtgctgagtttacctggacaaatttgttggtggatgtggttgagctggatgggtcggaacaagaagccttggacctggttcccttggtgaccaacgtggtcctggaggagcactacctgatcgtcggagtggaggtcgaggtggacatcggcgtcatccccatcaactcccgtggtgagaagcagcgcatgcacctgcgagacgggtttttggcagaccagctagaccccatctatgtggcctacaacatgtagtctcgtctcttggcttccatggacttttctagagattgtagacattgttctccgtgtccactgaagcgtgcagacacagggcaacactcaccagaatacagccatttggtggtgagagtggaggaggaagaggaggaggaagaggacttctcacagcagccacgattggcatgggggtgaaatgtgaatttaccactgaatttcgctcagaaggactttggattactgccttcagtttgttggaaaagcccatttcaaaaactttcttttcttttctttcttttttaattattggataataagtgctttcttcgtaaatgtggtattttgttaagccgcaaatagcaatttaaaaaaatatcctgccctccagatgggttcttttaaacaatttatgtagtgtgnccaaagaattgttttctctggttttaatgtgtcatggaaatcttaatgacatggatcctgttacctaaatttaagcccattgcttagatctccatcccttttagggaaagtttgagggtacgaggaaaaccttccaaataggcaccttccaattaggataatagccagctttctttgtcagaaatgtgctgaagaaacaaaggctggtatacggccttcgaagttagtatagaatgagaagaaattataaataaggtgtatttcggcaattatcttgcaaatatctttgtactaaactaaaaagataaaataagttaacttcctcaatatgtaattatgtacaaaacgtttaatttattttgatctctttagaactataaaagagaaaaacattcaagaatattaaagtcttgtaatgtttgctaatataaaaaagtgttgtattatcttgcgtggatagtatcacaacaaatatatatatatgaaatataaattcactaatgaacaaaggagattttaaagtttaagatgcagaacttgtcacttgcatggtgtgccccccgtactcacatacactctgctgttgccagcagtcgcagaccgcaggagccctgtctaaaagtttcttctagaaccagagaccagcaagtgaaattattgccatctcaaggatggcaaaagaattcaaagctcaatgtgcactatttttttctttgctgtgggacaacagtgaatgtgtttatgccagcgtgtgctgactgatactgaggggctttaggttggcaaatagcactgttttcttagctgcaagaattcattgcacaatgtttttcatcatttttgttaatgtcatctttttttggtccttgctacgaaaaggaatgcgattctgtggtcattcgcactgggttgcattgattcccccttctgatgcccaatgtggagtggacaaagtgtccggaactcacatcggtgatcgtcccctcgtcttaagacccagcccgctctgtgtgagccctctggggcttccctcgctcaagtgagcacaagtttccccgggggttcatgcccagagctccgggctgaaagcaagaagtcctcccagctgcgtcggtttgccgcctgtggacgagtgcgccccagtttctgccctggcagctcctggccacaccttctcagagctcacctgtgcacctcctaaattgaattggccccacggtgtcccaaccaagaaggagcatctgcactccgagaaagatgtsgttctgtaactgccccagatagtgaccccgsgagtggctctcggtgctagatatgcatgactaaggttsatgctgggcaaaatgtagatgatctttcattatgttgtgggcagcgtctttctctgcctttgctatatgcagtscakcwgtaagtccttttgctaaaatgagttttgtttgacttctgagatccaagkgctgattgttgttaaaaaaaaaaaaaaaaaaaagtgggcacattttaaaaaaatgtgtctggcatatgtgggtgcatccttccatctccacaaaccatttgattcttgaaatattgtttgacctcattgctgtgtgtgaatatttctccacatgcttcaggatgcacattcctaggtctctggcttcctaagggggggaaccaccacacattggggggggaaaaaggacattttcctacacccacccaccttgttggaaggggaggtagg

SEQ ID NO: 122460 - DNA, 607 bp, Homo sapiens
ttgtgttgaaagcagtgtgctttattaacatttatatgttctttacctatgtcttttggttttgctccagcaattactgtcactgttgtcaaccactttgttctttgtagcaaaactggatcacaagtctttcggtcggagaactggaaggtctgggcagagtcgagcagaggagaccatgatgactgcctagacttgtgctcagtgctgtgttgggggagaactgctacaggtgcttttagttgtccagctcagctcatctttgctgtttcttcttcttcatctgttcccacatccatttcttcatcttcgtcttgctctgtgtcttctgttgtgtcttctgctgtctcttcaggttcttcttcaggctcttcttccacctttgcatcagggtcaatgttcaaactgaggcgaagcattctttctattctatctccatatgctttagtgtctggtaaaagataccctgaccgaagcgttgctgtttcaaacaaaaccacagcaagatccaaaactgttttatcatcttcatcttccttaattcgtcgaagcatgtctctgatcagcgggtgtcgggattaactcgtccgaatcccaggcgagcaat

SEQ ID NO: 122461 - DNA, 2299 bp, Homo sapiens
  misc_feature (1)...(2299): n = a,t,c or g
atgaccatggcagcggcggcggtggtggcacgcggggccggggcgagggcagcgacagcggcggctttgcggggtggctgcgggaccgcggctcgggggcggccgtgtgcgggccccgcccggcccttgtgcactgcacccgggaccgccccggacatgaagcgctacctgtgggagcgctaccgggaggcgaagagaagcacagaaggcactaagaagtacacgacctcacttaatgcaagacactattatacccatttcacagaggaaaatgaagatgaaattaacagctcgagttcttatgcgagtcagaagaaaacatttgaaattaatcccagacacccgctgatcagagacatgcttcgacgaattaaggaagatgaagatgataaaacagttttggatcttgctgtggttttgtttgaaacagcaacgcttcggtcagggtatcttttaccagacactaaagcatatggagatagaatagaaagaatgcttcgcctcagtttgaacattgaccctgatgcaaaggtggaagaagagcctgaagaagaacctgaggagacagccgaggacacaacagaagacacagagccagacgaagatgaagaaatggatgtgggaacagatgaagaagaagaaacaggcaaggaaagtgatgaccccatggcttatattcactttactgctgaaggggaagttaccttcaaatcaattttatttgtacccacatctgctccacgtggtctgtttgacgaatatggatctaaaaagagcgattacattaagctctatgtgcgccgtgtattcatcacagacgacttccatgatatgatgcctaaatacctcaattttgtcaagggtgtggtgattaggaagaagcttgttcgtaaaacgctggacatgatcaagaagattgctgatgataaatacaatgatactttttggaaagaatttggtcccaccacaaagctttggtgtgattgaagaccactcgaatcgaacaacgtcttgctaaacttcttaggatccagtcttctcatcatccaactgacattactagcctagaccagtatgtggaaaagagtgaaggaaaaacaagacaaaatctacttcatggctgggtcaagcacgaaaagaggctgaatcttctccatttgttgagcgacttcttgaaaaagggctatgaagttatttacctcacagaacctgtggatcgaatactgtattcaggcccttccccgaatttgatcgggaagaggttccacgaatgttgtccaaggaaaggagtgcaagttccatgaaagttgagaaaacctaaggaagtagtagtgtaagtcagttgagcaaagaatttnagccctctgcctgaattgggatgaaagataaagcccttaaggacaagatttgaaaaggctgtgggtgtcttcagccgccttgacagaatctcccgtgttgcttttggtggcccagccagtacgggattggtcttggccaacattgggagagaatccatgaaagcacaagcgtaccaaaccgggcaaggacatctcttacaaatttactatgccgagtcagaaagaaaacattttgaaattaatccccagacaccccgcttgatcagagacattgcttcgacgaattaaggaagatgaagatgataaaacagtttttggatcttgcttgtggttttggtttgaaaccggcaacggctcgggtcagggtatctttttacccagacacttaaagcatatggagattggaattggaaagaatgcttcgcctcagtttgaacatttgacccctgatgccaaaggtggaagaagagccccgaaggaagaacctgaagagacagcagaagacacaaccagaagacacagagccaagacgaagatggaagaaatggatgtggggaacagatgaaaaaggaagaaccagcaaagggaatctccagcttgaaaaagaatgaattgtaaattatactcctcacccatttggatccctgtgtggagaggggaatgtgaaaatttacatccatttcttttttgggagagactttgttttggatgcccacacataatcccccttctcccctgcactggtaaaatgtgggattatggggtcacaggaaaaagggggttttttaaattggaattttttttaccatccctcatgaatgtaaatttgtactatttaactgactattcttgatgtaaaatcttgtcatgtgtataaaaataaaaaagatcctaaataaaaaaaaaaaaaaaaaaaaaaaagtcgtatcgatgtcgagcga

SEQ ID NO: 122462 - DNA, 462 bp, Homo sapiens
gcagtgtggtggaaatccaccattgttgctggcttatgaagatatgatgaaagagaaggacgagctcaatgccaccctcaaggaggaaatgagaatgtttaggatgcgagcccaagaagtggtgaaagaaaatgaagaattgcaccaagagttaaataagagtagtgctgttaccagtgaggaatggcgtcagcttcagactcaagcaaaactggttttagaggaaaacaagttgttgctggagcagttggagattcagcaaaggaaagccaaggacagccaccaggagcgcctccaagaagagctgcgggcctgggaggcgacatcactgcagtttctaagctgactaaacaactaatgctcctggaggcaaaaacccacggccaggaaaaggagctggcggagaacagggaacagctggagattttacgtgccaaatgccaagaactcaaaacacacttg

SEQ ID NO: 122463 - DNA, 432 bp, Homo sapiens; identical to SEQ ID NO: 120313

SEQ ID NO: 122464 - DNA, 396 bp, Homo sapiens
ctagaagaagtccgtgactgtcagcttggagaactggggtaatataatgtcaacctcttgctcagttttagctctggtccccagaaaaaccatggccatagcagatgaaatgctgaagggagagatgaagatgtttccagccggattgttctcactcaacgccaggaacaggtccaaggcgaagcgggtgtttgctgagctcagctgctccatggtgaaaaccaccagcagcaccacggacgccacactcgcgcagccacaatagagggcccagacgccaacaacatgcacgacaccaagacgacccataatgtagcacacatgagagcgcaaacacacagacaactgaccgcccaggcgaagagctgagaccaacaccccgccaataacgcgcat

SEQ ID NO: 122465 - DNA, 789 bp, Homo sapiens
atggctaacaaccgacatatgtcagtcaagctcacagttgagggttacagcagaactagccagcttaccaatggtgctgtccgctatccagctagctatctcatgcgcgacattcgcacgctaatagtcagttcatctgatcgcgcgagcaagggcgtacacaaggcagtaaagggcccaaatagcagccgcccggtggtagcacggtggcaggctctaaaccgccggggctatcgccggcacaatttttataacaatcacaaggtttttatgggcagccgcgtgctcgcaggctgcaggttacaattatatagtaccttcctgcaaacatattactctattagtccgcaaaatcggcgctatacgatggcagtagttaaccaaggcgtttgcggcaaggccttagatcggccggtggcggtggcgggtttacaccaaatcctgtatgactccctcactggggttctggtcagccagcagaacctgctgctggagaaggccagtgtcctgttcaacactggggccctctacacccagattgggaagtggcgctattggcagatgcaggctgggctgcagagtgccatagatgcctttcagagagctgcagggtgggaagaaggtctaccaaacagcttgcacgcagccatgagccaggcgctggttgaaagagaacatccccttacttccttgggccagctggggcctgcgttgaaaggcccaccactacacgggcgcttggcccacttactttcactggccatcctcctcattgaccaccagggttaa

SEQ ID NO: 122466 - DNA, 933 bp, Homo sapiens
acagtcgtcctcaaggattttatcctggaacattatagtgaagatggctatttatatgaagatgaaattgcagatcttatggatctgagacaagctcgtcggacgcctagccgggatgaggccggggtggaactgctgatgacatacttcatccagctgggctttgtcgagagtcgattcttcccgcccacacggcagatgggactcctgttcacctggtatgactctctcactggggttccggtcagccagcagaacctgctgctggagaaggccagtgtcctgttcaacactggggccctctacacccagattgggacccggtgcgatcggcagacgcaggctgggctggagagtgccatagatgcctttcagagagccgcagagccccacgcgcggcgggcgagcatctacttacgaaatgactcctgcggcctctccgaaatcccaggagcatccttgcagcgcgaggagaatggaccggggcctggactcatcagcagatctatccacagccagggaccactccctaaagcccgccgcaggcccagccctcacgctttctcttcgcaatggactttgcagcaaccacgtcggccattggctcagctcggccctcgaccaatcagagctaaggttacttccacaccggtcgttcttggcaaccagtggcataataagagtgccacatactccgtgggaatgcagaaaacgtactccatgatctgcttagccattgatgatgacgacaaaactgataaaaccaagaaaatctccaagaagctttccttcctgagttggggcaccaacaagaacagacagaagtcagccagcaccttgtgcctcccatcggtcggggctgcacggcctcaggtcaagaagaagctgccctcccctttcagccttctcaactcagacagttcttggtactaa

SEQ ID NO: 122467 - DNA, 389 bp, Homo sapiens
ggcctgtatctgaaaggttgtgcattgctggaggacactcaccacaggtatgactccctcactggggttctggtcagccagcagaacctgctgctggagaaagccagtgtcctgttcaacactggggccctctacacccagattgggacgtggcgctattggcagatgcaggctgggctgcagagtgccatagatgcctttcagagagctgcagagatcccccaggttgttcctgcctctgaacttgctgccgccatgaagcagattaaagaactccagcgcctgctcggcaagaaaacgatggaaaatgaactcctcaaagaagccgttgaatatggacgggcaaaaaagtggatagcgcacgcgcccttattgcccggggatgggga

SEQ ID NO: 122468 - DNA, 545 bp, Homo sapiens
ttcactgcagaagaaggggacttgtggtttaccttgagagggaacgcccccgttcagggtcacttcctggatccttactgctctgcctcggaggcaggagcccgggaaggagattatattggctccattcagcttgtggattgtaagtggctgacgctgagtgaggttatgaagctgctgaagagctttggcgaggacgagatcgagatgaaagtcgtgagcctcctggactccacatcatccatgcataataagagtgccacatactccgtgggaatgcagaaaacgtactccatgatctgcttagccattgatgatgacgacaaaactgataaaaccaagaaaatctccaagaagctttccttcctgagttggggcaccaacaagaacagacagaagtcagccagcaccttgtgcctcccatcggtcggggctgcacggcctcaggtcaagaagaagctgccctcccctttcagccttctcaactcagacagttcttggtactaatgtgaggaaacaaacatgttcaggcccccgaacatttc

SEQ ID NO: 122469 - DNA, 846 bp, Homo sapiens
cttgtcttcatacatgttttgttcttagagcttaaatattgaaggcctcccatccaagggccctataccaccctggttgttggatataaagtacctgtcaccattgttgctggcttatgaagatatgatgaaagagaaggacgagctcaatgccaccctcaaggaggaaatgagaatgtttaggatgcgagtccaagaagtggtgaaagaaaatgaagaattgcaccaagagttaaataagagtagtgctgttaccagtgaggaatggcgtcagcttcagactcaagcaaaactggttttagaggaaaacaagttgttgctggagcagttggagattcagcaaaggaaagccaaggacagccaccaggagcgcctccaagaagtttctaagctgactaaacaactaatgctcctggaggcaaaaacccacggccaggaaaaggagctggcggagaacagggaacagctggagattttacgtgccaaatgccaagaactcaaaacacactcggatggcaaaatcgcagtggaagttcataaatcaattgtgaatgaattaaaaagccaattacagaaggaagaagagaaagaaagggctgagatggaggagttgatggagaagctgacagtcctgcaagcgcagaagaagagcctgctgttagagaataacagtttgacagagcactacaaagcactgtgagccgaacttgaacgagcacagaaaatcaatatgatatctcataagaaaattgaggtcctcataaagcaggtggaaaaagccatggggaacgaaatgtctgctcatcagtacctggcaaaccttgttggcctggcagaaaatataac

SEQ ID NO: 122470 - DNA, 1338 bp, Homo sapiens
ttttttaacagtctttattgcctttattacggggaagaaggaagggaaggaggcaagaaacagaatggtccttagaaacattgtgccttggacagagcttttcttacatcaaattataataaataagaacctctcaagattggaaatcaattcaacagtaaaggcttaaaaatctgaaaagctgattttcacaatcggaaacgttacctcttccttggacaaatgcctgaattttgtctgatatcgactgagttctacattcaaacgatggacagtcattttcaatccatcattttcatccaccagttcttgagcttgttttcgcagataaagtaattcaggtgcagcaacttccctgtgacgacgccttctcagcctctttgagctttctcttctctttttccattcccttaagttttaactgtagttctttcattgcttgtttcattgtgtttagttcaagggtaaggctttgattcatattgtttaggtccatattttcttcttttaatgcctcaaacttttctctggttatttctgtatatctttgacgtgctctaccagttatatctggggagggtggaggtttctcacataatggaggtttttcatcctttaaattcagaacagggtgtttaccatctttttgttgtgtccgctgtggtgcaggaggggagcctggaaacccatcttgatgagaaatattttcatcgtcttcactgttcacctcatgtaacaatggcacctgatttctgtgtggcacagcgtacaggtcatcactgtggcctcctctgtcctcccgggcactgacatcccccaattccttgccgctggatgacagctgagtttcaatgtcctcttcgtccccatagtccagtgtttcaaaggatggcaaagaagatcttcttcccatctcactctgccaatttggccgaggcctcagctgtgaggtggtggcatagggctcgatgaagctgtcctgttcaacactgctcacatcactctcagaccgggacctctggcgaggctgaggaatagcaaccgtccgcccagtcaatgttgtcgccagaatggctgctgccagagcagatcttggtctctctggagatgggttggggctgcggggaggaggtgtgcgtggcacagctgccttcggagcaacgctggctgcaggtaaaaggccatggatgatgtgtttgaaatgactcctgcggcctctccgaaatcccaggagcatccttgcagcgcgaggagaatggaccggggcctggactcatcagcagatctatccacagccagggaccactccctaaagcccgccgcaggcccagcacgaaa

SEQ ID NO: 122471 - DNA, 3335 bp, Homo sapiens
atggctgcgctatggaatacctgtggagcttggaaaaacatgcttatacctgagtgccactctcagcttctgagagtggccgcaaacccaaaggtgcgggagcaagtgcggctggagctgagcttcgtcaactcagacctgcagatgctcaaggaagagctggaggggctgaacatctcagtgggcgtctatcagaacacagatgaagatggctatttatatgaagatgaaatcacagatcttatggatctgagacaagcttgtcggacgcccagccgggatgaggccagggtggaactgctgatgacatacttcatccagctgggctttgttgagaatcgattattcccacccacatggcagatgggattcctgttcacctggtatgactccctcactggggttctggtcagccagcagaacctgctgctggagaaggccagtgtcctgttcaacactggggtcctctacacccagattgggacccggcgctatcggcacacgcaggctgggctgcagagtgccatagatgcctttcagagagctgcaggggttttaaactacctgaaagagacatttacccataatccaagttacgatatgatccctgccatgctcagcgtgcttgtcaaaatgatgcttgcacaaacccaagaaagcgtgtttgagaaaatcagccttcctgggatctggaatgaattcttcatgctggtgaaggtggctcaggaggctgccaaggtgggagaggtctaccaacagctacacgcaagccatgagccaggcgccggtgaaagagaacatcccctactcctgggccagcttagcctgcgtgaaggcccaccactacgcggccctggcccactacttcacttgccatcctcctcatcgaccaccaggtgaagccaggcacggatctggaccaccaggagaagtgcctgtcccagctctacgaccacatgccagaggggctgacacccttggccacactgaagaatgatcagcagcgccgacagctggggaagtcccacttgcgcagagccatggctcatcacgaggagtcggtgcgggaggccagcctctgcaagaagctgcggagcattgaggtgctacagaaggtgctgtgtgccgcacaggaacgctcccggctcacgtacgcccagcaccaggaggaggatgacctgctgaacctgatcgacgcccccagtgttgttgctaaaactgagcaagaggttgacattatattgccccagttctccaagctgacagtcacggacttcttccagaagctgggccccttatctgtgttttcggctaacaagcggtggacgcctcctcgaagcatccgcttcactgcagaagaaggggacttggggttcaccttgagagggaacgcccccgttcaggttcacttcctggatccttactgctctgcctcggtggcaggagcccgggaaggagattatattgtctccattcagcttgtggattgtaagtggctgacgctgagtgaggttatgaagctgctgaagagctttggcgaggacgagatcgagatgaaagtcgtgagcctcctggactccacatcatccatgcctcgccagaggtcccggtctgagagtgatgtgagcagtgttgaacaggacagcttcatcgagccctatgccaccacctcacagctgaggcctcggccaaattggcagagtgagatgggaagaagatcttctttgccatcctttgaaacactggactatggggacgaagaggacattgaaactcagctgtcatccagcggcaaggaattgggggatgtcagtgcccgggaggacagaggaggccacagtgatgacctgtacgctgtgccacacagaaatcaggatgaaaaacctccattatgtgagaaacctccaccctccccagatataactggtagagcacgtcaaagatatacagaaataaccagagaaaagtttgaggcattaaaagaagaaaatatggacctaaacaatatgaatcaaagccttacccttgaactaaacacaatgaaacaagcaatgaaagaactacagttaaaacttaagggaatggaaaaagagaagagaaagctcaaagaggctgagaaggcgtcgtcacaggaagttgctgcacctgaattactttatctgcgaaaacaagctcaagaactggtggatgaaaatgatggattgaaaatgactgtccatcgtttgaatgtagaactcagtcgatatcagacaaaattcaggcatttgtccaaggaagagttggatataaagtacctgtcaccattgttgctggcttatgaagatatgatgaaagagaaggacgagctcaatgccaccctcaaggaggaaatgagaatgtttaggatgcgagtccaagaagtggtgaaagaaaatgaagaattgcaccaagagttaaataagagtagtgctgttaccagagggtctctgggctctggagcatcacacttggtgggcagaccttgccgctctcggtacctgcacacctgcacggctgctaaacctgcatgcagcactcggcgtcagcttcagactcaagcaaaactggttttagaggaaaacaagttgttgctggagcagttggagattcagcaaaggaaagccaaggacagccaccaggagcgcctccaagaagtttctaagctgactaaacaactaatgctcctggaggcaaaaacccacggccaggaaaaggagctggcggagaacagggaacagctggagattttacgtgccaaatgccaagaactcaaaacacactcggatggcaaaatcgcagtggaagttcataaatcaattgtgaatgaattaaaaaggaagaggaactactggtacttggtgtgtactgtgtcagttgagggattttctgccctggtggttccctgtgcaggcatctccctggctgctgagcaggcctctgtgtatatagataaggtgcatgcaatgacattcccccggtgtgagcgctggttcagcagctgctttgctgataaatcaaaggaagaagagaaagaaagggctgagatggaggagttgatggagaagctgacagtcctgcaagcgcagaagaagagcctgctgttagagaagaacagtttgacagagcaaaacaaagcactggaagccgaacttgaacgagcacagaaaatcaataggaaatctcaaaagaaaattgaggtcctcaaaaagcaggtggaaaaagccatggggaacgaaatgtctgctcatcagtacctggcaaaccttgttggcctggcagaaaacataacccaggaacgtgacagtcttatgtgtttg

SEQ ID NO: 122472 - DNA, 1798 bp, Homo sapiens
atgtatcggcattattcccaatcactgaaatgtgaaatgaatgtcggcgtctatctcccaccaaaagccgcgaatgaaaaattgccggtgctgtactggctttcaggcctgacctgcaacgagcagaatttcattactaaatcggggatgcagcgttacgcggctgagcacaacattattgttgttgcgccggacaccagtccgcgaggcagtcatgtcgcagatgctgaccgttacgatctcgggcaaggtgccgggttttacctgaacgcgacgcaagcgccgtggaatgaacattacaaaatgtatgactatatccgcaacgagctgccggatttagtgatgcatcattttccggcaacggccaaaaagtctatctctggtcattctatgggcgggctgggcgcgctggtgctggcgttacgtaacccagatgaatatgtcagcgtctcggcgttttcgcccattgtctccccatcgcaagtgccgtggggacagcaagcctttgctgcatatcttgctgaaaataaagatgcctggttggattacgacccggtgagtcttatttcacaaggtcaacgcgttgcggaaatcatggttgatcaggggttgagtgatgatttttacgcagacagctgcgactccaaatctgaaaagattggcctcagtgagaacggtttgtccctggatgccgtgttgggtttggttcggtgcttctccactctgcagtggctcttccgcttggacatcagtacctggatcgacgttgatgtacggatccagtttcatgatggtcacattgaggccacgggcttcaagaatggctgcgagggaggctgcggcaatgcctttacccagagaggatacgaccccgccggtcacaaaaatatagttcgttgtcatgctgaacctgagaacctaccattcagccatctgggcccaggtggggccctgagcctggcccaggccctggatggatccccccatttggaagagatcagcttggcggaaaacaacctggctggaggggtcctgcgtttctgtatggagctcccgctgctcagacagatagactgtttccgtagattgcaccagatgcaagtctgggaggaggaccagatggggtccagtacttactgttttacagacatagaaaccgaggctccattctcagccatcttcttcccttatgccccagtttttaattctcatgacattccagagggagtgtccgttggaacaccaccagagacaccacacttgccactcatgaagtgctccctacttgcagaacgtctgctccctgttccccagttccagcctcccagccgccctacttctgtgttgacctgccagggtgtagagcccacgaggacagggatcacctgcagcaagcctccctcgccatgtggaactggtgttttgaagcctgtggaccttaatggtgtcatcaaactttttgaagagactgctaaagaaggcttagaagaaaagcaacttaaatctgtcaagaaactgggagcgggtcagggtcttccctgggacttcatgcacaggtctttcctgggacttcatgtaggaccagccatcccgtcagtgctcagtgaacatgagctgcttccctgtgggatgtctgggaggctgtcctggaatctcctcggggatgaggcagctgccgagctggcccaggtgctgccgcagatgggccggctgaagagagtggagtatgaggggccgggggaggaatgggacgggctaaagggggacctacatcccgggaacaccaagaggccactgg

SEQ ID NO: 122473 - DNA, 1407 bp, Homo sapiens
atgcccgggcggctcggagcgcgggcagcggcagccgtgcgggtgcaggagccgtgggcggacagagccagggttctctccctgttagaagtctgcgcccaggcctcaggcagtgtcactgaaatcagcatctccgagacccagcagcagctctgtgtccagctggaatttcctcgccaggaagagaatccagaagctgtggcactcagaatatccttggaccttttcagcttgtctcaggttaacctctgtgaggacgatgatgccagttccctgctgctgcagagcctcctgctgtccctctctgagctgaagacatttcggctgacctccagctgtgtgagcaccgagggcctcgcccacctggcatctggtctgggccactgccaccacttggaggagctggacttgtctaacaatcaatttgatgaggagggcaccaaggcgctgatgagggcccttgaggggaaatggatgctaaagaggctggacctgcagcacaaaactgtgatcttcatgtttgcccaggagccagaggagcagaaggggccccaggagagggctgcatttcttgacagcctcatgctccagatgccctctgagctgcctctgagctcccgaaggatgagcttctcaggcaatgctctgggggatgaaggtgcagcccggctggctcagctgctcccagggctgggagctctgcagtccttgaacctcagtgagaacggtttgtccctggatgccgtgttgggtttggttcggtgcttctccactctgcagtggctcttccgcttggacatcagatatgcaccttacaatgtcctttggcatcacaatgagccctgcaagtcagcaaagttattactgctcatttattcagatgaaaatgaaataatccttactgcagatgccaacttttgcccccaatataaaaccccaaaaaggcctccctcgccatgtggaactggtgttttgaagcctgtggaccttaatggtgtcatcaaactttttgaagagactgctaaagaaggcttagaagaaaagcaacttaaatctgtcaagaaactggcacaaccaccaaaggagcatattccaggttaccagcaagtgagttcatcatacaagattcaaatggctgaagttggaggattggcaaaaacaatggcccagttaatgaccttgcttgaaaatcaacttgttgagaaactttgggtacttaaaattctgcagcatctctcgacttctgaagttaattgtactgtaatgatgaaagcacaagcagccaaaggaatctgtgctcacctcaatgactcagatttctctggacagcttttatttccttcatcagaaacactttggaacttatcagaaaaaatcttcaaaataagaaattgttcaacagcttag

SEQ ID NO: 122474 - DNA, 439 bp, Homo sapiens
gcggccgccctcggcacctcctgttgcgctccctggaggccttcgccgaggaggtcggcgccgcgctgcaggcttccgtggagccaggggcggctgacggcgagggcggcccgggcccggcggcgctgccctgcacgctggccatgtgggagttgggccactgcgacccccggcgctgcacgggccgcaagctggcccgcctggggctggtgcgctgcctgcgcctgggccacagattcggcggtctggtgctgagccacttgcgcctgttgccctacctggtggccgccaaccccgtgaactatggccggccctacagactttcctgcgtggaagcgtttgctgccaccttctgcatcgtaggctttccagaccttgctgtcattttgctgcggaagtttaaatggggcaagggcttcttggacctgaaccgtcagct

SEQ ID NO: 122475 - DNA, 5569 bp, Homo sapiens
  misc_feature (1)...(5569): n = a,t,c or g
atgagaccccggggagcagcgtttgcagcgggcccgccaggtgacctgcacctgggcaccgccatcggcttcgcaggggccatctggaggagtcggtcacccgccatgtcgaccttgctggacattaagagcagcgtgctcaggcaggtgcaggtgtgcccgtccttccgccgcaggactgagcaggacccagggagtgccagcgccgacccgcaggagcctgccacgggggcctggaaacccggggatggcgtggagttctttgcccacatgcgcctcatgctgaagaagggggaaggcagacagggcttgccgtgcctcgaggtccccctgcgcagtggctcgccagcacccccggagcctgtggatcccagcctcggcctgagagccctggccccagaggaggtggagatgctctacgaggaggccctgtacacggtgctttaccgcgcgggtaccatgggccctgaccaggtggacgacgaggaggccctgctcagctatctccagcaggtgtttggcaccagccttgaggagcacactgaggccatcgagcgagtgaggaaggccaaggcccccacgtatgccctgaaagtctctgtcatgcgtgccaagaaccttctggccaaggaccccaacggcttcagcgacccatactgcatgctgggcatcctgcctgcctcggacgccacgcgggagccccgtgcacagaaggagcagcgcttcggcttccgcaagggcagcaagcgcggtggacccctgcctgccaagtgcatccaggtcaccgaggtgaagagcagcaccctgaaccccgtctggaaggagcacttcctcttcgagattgaggatgtgagcacggaccagctgcacctggacatctgggatcatgacgacgatgtatccctggtagaagcgtgcaggaagctgaatgaagtcatcggcctgaagggcatgggcaggtacttcaaacagatcgtcaagtcagcccgcgcaaacgggacagcaggacccaccgaggaccacaccgatgacttcctggggtgcctcaacatacctgtccgggaggtgcctgtggctggcgtcgaccgctggttcaagctggagccacgctccagtgcctcgcgtgtgcagggacactgccacctggttctcaagctgatcactacgcagagggatacggccatgagccagcgcgggcgatccggcttcctgtcccacctgctgctgctcagccatctgctgcggttggagcactcagcagaggagcccaactccagcagctggcgaggagagctcagcacaccagccgccaccatcctctgcctgcacggagcccagagcaacctgtcacccttgcagctggccgtgctgcactggcaggtcagcagccgccaccatcaaacctgcacgctggactacagctacctgctggggctgctggaggacatgcaggcacactgggaagaggctccttcactgccccaggagcaggaggagagcctggctgatagcctttccgccttctctgagttcgggctgcagctgctgcgccagctccgagactacttccctgccaccaacagcaccgctgtccaccgcctggagctgctgctgaagtgggtgcagcgccgcgtgtcagcgtgtctgggcaagctgcagctcttccaaccctcctttgagatctgccccttcgagtcggagctgaacatggacattgctgcggccctgaagagaggcaaccgtgagtggtacgacaggatcctgaatgccaagagtccccgagagcagccaggaccacagcgcctgcctgggctggttgtgctggctgacgccgtctatgatgaccttcagttctgctacagtgtgtacgccagcctcttccacagcatcctcaatgtggacgtcttcaccctgaccttccggcagctggagcgtctggtggctgaggaggcgtgggtgctgacggaggagctgagccccaagatgaccctggaggtggcctcggggctctttgagctctacctgaccctggctgacctccagcgcttctgggatagcatccctggccgggacagccgctctctggccctggctggcatccacgcccccttcctgcctgctgtgaagctctggttccaagtgctgagggaccaggccaagtggaggcttcagggagccgtggacatggacacgctggagcccgtggacgcctcctccaggcacagcagctccgcagccactgctggtctctgcctcagccacatccaggagttgtgggtgcgcctggcgtggcctgaccctgcccaggctcaggggctgggcacccagcttggccaggacgtgtgtgaggccaccctcttctatacggagctgcttcggaagaaggtggacactcagccaggggcggccggtgaagcagtgagcgaggcgctctgcgtggtcctcaacaatgtggagctcgtgcgcaaggctgctgggcaggccttgaagggcctggcatggccagagggggccacggggcccgagggggtgctcccccgccctctgctcagctgcacacaggccctggacgatgatctgcaacgggaggcccacacggtgacagcgcacctgacctctaagatggtgggcgacatccgcaagtatgtacagcacatcagtctctcgcctgactccatccagaacgatgaggccgtggccccgctcatgaagtacctggatgagaagctggccctgctgaacgcctcgctggtgaaggggaacctgagcagggtgctggaggccctgtggaggctactcctccaggccattctgcaggcgctgggtgcaaaccgtgacgtctctgctgatttctacagccgcttccatttcacgctggaggccctggtcagttttttccacgcagagggtcagggtttgcccctggagagcctgagggatggaagctacaagaggctgaaggaggagctgcggctgcacaaatgttccacccgcgagtgcatcgagcagttctacctgggacaagctcaaacagaggaccctgggagcagaaccggttttgaacgcctgagcgtccgttgccattacgaggcggctgagcagcggctggccgtggaggtgctgcacgccgcggacctgctccccctggacgccaacggcttaagtgacccctttgtgatcgtggagctgggcccaccgcatctctttccactggtccgcagccagaggacccaggtgaagacccggacgctgcaccctgtatacgacgaactcttctacttttccgtgcctgccgaggcgtgccgccgccgcgcggcctgtgtgttgttcaccgtcatggaccacgactggctgtccaccaacgacttcgctggggaggcggccctcggcctagggtggcgtcactggtgtcgcccggccccaggtgggcgggggtgcaagggctgggcagcctgtcaccctgcacctgtgccggcccagagcccaggtaagatctgcgctgaggaggctaggaaggccgcaccagcaaggaggcgcaggagttcgtgaagaaactcaaggagcttggagaagtgcatggaggcggacccctgagtccatcagctgccagccccggccctggcccccaccccaagttccctgaagcatcctccagctcactgtggccagctttgtgcaaccagggcccacggcgccccttcctgttgctgtgacgtgtgtgttcgtggctgggccccgcggcgccttaccgccctgggccgtgtattgtctggtgtgtgctgtgaacccctgcacccaaccccacatctgggtggccaacttggcaggacttggccagcagctggcccaggacacagtgcaggccagagcggggcttgaccacctggtgggcctccctgcccgcttccttgggctccccggccctgggtgggcggtgggcagctggtctccagggactcagtgagtggctgtgctctctgcacaacgggcaatgtgcagacgcatttttggtaatcacagctggggagtgaaaagggtgccactggcaccactgggtggatggtccagagcctccacccacagaggggatgcaaagggcaggtgagtcaagaaccgcataggtctccagtccccacggggctcccaggccggggaaaggttcccccttgaggtcaacttctgagggccagggacgtcaacccaaaggcttggtggtcaagtgtgaaagggctccgtgcccaaactggtcaagctgtcctttcacgcacatatccgtggcccaccctgaaacctgctcccacgaacccttcccaggcagagtccgagagttcgccccaacccttccccaggcccagtgtgaaaaacagactcacaaggggcttacttggcctgcagcttcatttgcgagagtcgccgaggcaggacacatgagcacagctgtgctgtgaagtgtggggagaacccggacagctcagtcctgccagcagccgcaaagagccgaggctgccaaggcccatttatgtccctcatgtctctagatttttctcgtcacccagcctcaaaaatatatgtgtctgcaaccctcagtctctctgccgtttcttgatttcttttccaaacctcagccgggggccctggcttcagccccccgtccctgcgtctgcttcctcttcacagcagctgctgctgggcttcctccgcgctcggngcaagggccctgggtccttcagacgcatgcactgtcattcagtgttccgagggcagccggggtgctgggccacaggcctgttggggtttccaaactctctccctgaatccacatcgaaggaatcgatctcctcctccctgggggctctccttggccattggccaagaacttccttgctccgcctgcagcacctcctcccggggctgccgcagagacgcgtactttgtccagggagcctgcgggttcaggtccaagaagcccttgcccccatttaaaacttccgcagcagaaatgacagcaaggtctggaaagcctacgatggcagaaggtggcaagcaaaacgctttccacgcaaggaaagtctgtagggcccggccaattagttcacggggtttggcggccacccaggttagggcaaacaggcgcaaagtggctcccctcgcatctttcccaaaacggtgtctcgtccagccttggcccaggagcagtcgatgacggcgacccccagactgcggccaccagctgtctgtctgcgggggacgcgtactgccttgcccacagggctcagcaccagcccccccgaatctgtggcccaggcgcaggcagcgcaccagccccaggcgggccagcttgcggcccgtgcagcgccgggggtcgcagtggcccaactcccacatggccagcgtgcagggcagcgccgccgggcccgggccgccctcgccgtcagccgcccctggctccacggaagcctgcagcgcggcgccgacctcctcggcgaagaacctccagggagcgcgtcgggaggtgccgagggcggccgccttccgcccccggcccgcgcgctgccctcctgcggcccat

SEQ ID NO: 122476 - DNA, 3447 bp, Homo sapiens
atgcccagcattcagacctttgcctggccatggctgtccaaccccagtcccaacggcagccggagggtctggggacaggagcctggaggggcactgggggccctaatggctgccctggatgactaccgtggccagtttctgagctgcagggcctggagcaggagcagagacaaggtcgactcgcagccgggcctccagtctcagcatcactgtggagcatgccttgagagcttcagcttcctcaatgaagacgaagatgaagacaatgatgttccggggacagaaactgggcacatttggcccctgcgctgccaggaggcatgggccctggagcggctgctgcgggaacccgagtactggaggcagtatgcgagttcagcaggcggtgggagatcccgccagctctgcccaggaagtgcacgagagactcagctgcttcctctgcccggtggagcgggtgcttctcacctctgcaaccagtatggtgcccgcctctccctgcgccagccaggcttggctaggctggtgagtgggctgcttcctccttccacccttgctcagattcccatgacaggaagctcggggaagccagtgtgtgtgaagttcctggaggatgccctggggcaaagctgcccagaaggccccagccagggcctggagagcagctcacagtctccagttctggagttttgtggaaaccttggacagccccaccatggaggccacgtgactgagaccgctgaggagggccctcctgtgttcctggaccagctggaggatgaggacgctcccgagggcattgagcccttggtgtacctctgccaaactgacacagaagctgtgagggaagctgccggcaaagcctacagcagtgtggtacccccagcttgccgcaggaagggaatgggctcagtgcccgcgtggacgagggcgtggggaattcttctccaaaaggctgatccagcaggatcgcctgagccgacctcctacacaagagatagcaaggcctactcgatgatactgctgcctgccgagaggaggcaacgctgggtgccagacccgacaagacccttcctgcagacctggcccagggagccaggggctgagtctgccacctggaagacactggggcagcagttgaatgcggagctcggagccgtggttggggccaacaggatggtccaggccctccctcccctggcaaagcccaagtccctgcagaaccagcccctccccagacagcctgggcccccagaggacccttgcttgggccccagaaatgaagtacctgacggcggcgagcgcgtcaatcccaccaccccgggcctccgcctcggtctccgggccctgaagggggctcacctcaagcagctgcccggctcgtggactggagggtgtctcgaccccagaatcagctcccgaatccagggccgtaggaccagcctccccgacctgccatccccacggctacacccagcggatgcaacgggcccgggtttccgcgggcgcccaggccccgcctttcctcggaagaggaagctccttcgcgggcggggccggaggaggaggccccgcccacgtacaccccgcgcctgcgacgagggcgtcctgctcgggggcctgtgtgcagactcccgctggtccacccgctgtttgacccgagttccgacgcttcgcgctgcctcgcgcttcggtgagcggcttccagagttctcgcggttgctgcgggcggtgcaccagatcccgggcctggacggctacttggctatacggatgctcatggcgacctgctgcccctcaccaacacgacagcctgcaccgggccctggccagcgggcccccgccactgcgcctctggtgcagaagcgggcagaagctgactccagcgcctggcttttgcctccaactctctgcagcggcgcaagaaagggctcttgtgcggccagtggcacccctgcgcacccggccacccttgctaatcagcctccccaagatttccgccaggtttcctcagtcatagacgtggacctactgctgagacccaccgacgggtgcggctgcacaagcatggttcagaccgcccctgggcttctacatccgagatggcatgagcgtgcgtgtggctccccagggctggagcgggttccaggaatcttcatctcccgcctgcctgtggcgatcctcagcatggagctccttgccactgtcccccaaaggggccagtcgtccatcttcacgaagactttgggccgagaaaagatcttgatggctcctctacctgcaccagcttccggtccagctcagcacggtggctctggctctcagtccctgcgctccaacaagctgtggtacacaggctcagagttgatgacccgagggcagagaactcagatcagggtacagttgcctgttggccaacaaatggataatacttctggctccctgaagcaggtacctggagctgggccttacccgggactccaccttgtcgtacttggaaagagctccctgacctctccaactaccttagaccctacacacacttccctcatcaccgtgttcccttcctcatgtagttgggacaaacattcctatggttaccaggtgatgatgggcattcgttctgctcctcggggactggccagccctatgtcccacattcaccacaggagacgtgatcggctgctgtgtcaacctcatcatggcacctgcttctacaccaagaatggccacagccttggtatagcctcacagacctcccggccaacctctaccccccgtaggcctgcagacacctggggagattgtggacgccaactttgggcacagcccttcctgtttgacattgaggactacatgcgggagtggcgtgccagagatccagaagctggtgctggagggcctgtgggcgaggccatcgagaccacccagcgcttctacccagggctgctgagcacaaccccaacctcctcttcatgctcaagagcagacagtcccactgtagcaatggcgtcgcgtccaccaagagcaaacagaaccacagtaaaaccctgcacccagctcctcatcctcgtcctcctcctcctcctcgtcctctccccatcctccgtcaattactccgagtccaactcaacagactccaccagtcccagcaccacagcagtaccagtaaccaggagaccagcaacccatggctacagcttgaaaggaggcccaccaggctgctccaaccacaccccctgggccaactcccacctcaacccctcccacagcgacagtgagatggagatggaggcagagcactaccccaacggagtcccagaacctgccaaagcagccccctctgatgctcgcctgggccaggcatctgagtgtctccggctcatggcccgagcaggcctggttcttgctcctttgccagagttgatgactacttgcactagctga

SEQ ID NO: 122477 - DNA, 763 bp, Homo sapiens
tcacagtttcttcctaaaacgtagctggtaccgccatttgttcatttgcaccaggacgcaggcaaacaccctgccacacacgagaaccacaggacggcagaccgagagcgcgcctgacagcttggacccgagcacagagggacgtgcagggtggctcatactcatactggaaggcagaaccatcacgatgcctctttgggggttctcaaggcatcatagagctttttctgaacatctaagtcttggttgcgcgccgccctcagcgacctggacatgaacccgcagtcctgcagcagcagcagccggccctctgtcccgcggaagccgaatccttctcctccctcgcgctctcctgccggactccgacctccaggccgcgcggggcctctcaccagtccgaggtgtccaggccttcccgcgttcacagggcatcggacactgtgggtcccgtcagacccaaagcagcggggccccgacgtcgtacgtatcaggggcgtgggatgggcccgcgaccgcggcctcggcgtcctgtagtacctgtcggcggcgagcggagtcattcccacccctccgggcctccgcttcggtctccgggccctgaatgggggctcacctcaagcagctgcccggctcgtggactggagggtgtctctgcccccagaatcagctcccgaatccagggccgtaggaccagcctccccgaacctgccatccccacggctacacccaacggatacatcgggtccgggtttcccgcgggcgc

SEQ ID NO: 122478 - DNA, 940 bp, Homo sapiens
accttattcaataagtattgtctccacaggcccctctgctgacagtgtatacacaaaagtgaggctccttgaaggggagactctgtctgtgcagtgctcctataagggctacaaaaaccgcgtggagggcaaggtttggtgcaaaatcaggaagaagaagtgtgagcctggctttgcccgagtctgggtgaaagggccccgctacttgctgcaggacgatgcccaggccaaggtggtcaacatcaccatggtggccctcaagctccaggactcaggccgatactggtgcatgcgcaacacctctgggatcctgtaccccttgatgggcttccagctggatgtgtctccagctccccaaactgagaggaacattcctttcacacatctggacaacatcctcaagagtggaactgtcacaactggccaagcccctacctcaggccctgatgccccttttaccactggtgtgatggtgttcaccccaggactcatcaccttgcctaggctcttagcctccaccagacctgcctccaagacaggctacagcttcactgctaccagcaccaccagccagggacccaggaggaccatggggtcccagacagtgaccgcgtctcccagcaatgccagggactcctctgctggcccagaatccatctccactaagtctggggacctcagcaccagatcgcccaccacagggctctgcctcaccagcagatctctcctcaacagactaccctccatgccctccatcaggcaccaggatgtttactccactgtgcttggggtggtgctgaccctcctggtgctgatgctgatcatggtctatgggttttggaagaagagacacatggcaagctacagcatgtgcagcgatccttctacacgtgacccacctggaagaccagagccctatgtggaagtctacttgatctga

SEQ ID NO: 122479 - DNA, 396 bp, Homo sapiens
ttcggcacgaggatgaagaaagtcatgccatttgttgccatgattaaggaaaatctggagaagatggggcctcgtattctggatttgcaattagaatttgatgaaaaggctgtgcttatggagaatatagtctatctgactaattcgcttgagctagaacacatagaagtcaagtttgcctccgaagcagaagataaaatcagggaagactgctgtcctgggaaaggagtacaccgagaagacccccatttctgagcatgctgttttcaatgtggacctcatgagcaagaaaattcatctgactgagaatgggataagggtggatattggcgatacaataatctatctggttcattaaactcatgcacattggagatttaaaaaaaaaaaaaaaaa

SEQ ID NO: 122480 - DNA, 2625 bp, Homo sapiens
atgccttgcactgcgcaattcggcacgaggacaaatggcctacagctgtgagagcaaatggacatctcctcctgaactctgagaagatgtcaaaatccacaggcaacttcctcactttgacccaagctattgacaaattttcagcagatggaatgcgtttggctctggctgatgctggtgacactgtagaagatgccaactttgtggaagccatggcagatgcaggtattcttccgtctgtacacctgggtagagtgggtgaaagaaatggttgccaactgggacagcctaagaagtggtcctgccagcactttcaatgatagagtttttgccagtgaattgaatgcaggaattataaaaacagatcaaaactatgaaaagatgatgtttaaagaagctttgaaaacagggttttttgagtttcaggccgcaaaagataagtaccgtgaattggctgtgggaagggatgcacagagaacttgtgttccggtttattgaagttcagacacttctcctcgctccattctgtccacatttgtgtgaggcacatctgggacactcctggggaaagcctggacttcaattatggaattgctttccatgggcctgtggcagggtccctgtttaatggaagtttttaatacactcctcacagtatcttatggaagtaacacatgaccttagactacgactcaagaactatatgatgccagctaaagggaagaagactgacaaacaacccctgcagaagccctcacattgcaccatctatgtgggcaaaggaactatccaccttgggcaacattaccaccctgtctgtttcttacggtaaaacactttgagggccaattaacgggaaaaactggcctggacaacaaagtccattgctagtgaactaggcagtatgccagaactgaagaaatacatgaagaaagtcatgccatttgttgccatgattaaggaaaatctggagaagatggggcctcgtattctggatttgcaattagaatttgatgaaaaggctgtgcttatggagaatatagtctatctgactaattcgcttgagctagaacacatagaagtcaagtttgcctccgaagcagaagataaaatcagggaagactgctgtcctgggaaaccacttaatgtttttagaatagaacctggtgtgtcccgtttcctcctggtgaatccccccagcccatcccaatggcccacttcctcaacccaaaattggaaatcaggcaaggagataactgtgattcccataatcaggcgtttaatgaaaatgaatcgaggaatttaaagaccctttcccaaagtgaaacctggatggaggatttgatgatcccactgttggggccctcgacggagttcctgtccctgggaaaaggagtacacccgagaagaccccccatttcctgaagcatgcctgttttcaatgtggacctcatgagcaagaaaattcatctgactgagaatgggataagggtggatattggcgatacaataaatctatctggttcattaaactcatgcacattggagatttatcctggtttcttaggaatactactactctgattgtgtctactgattggctatcagaaccttaggctggacctaaatagattgatttcatttctaaccatccaattctgcatgtattcataattctatcaagtcatctttgattcctgggacctaataaattttttttccctttctttgggtgtccaagagaaatggtttttgccaaactctttttaaaaaacaaattgttgctatttcctagaagtttctggtttttaagatgaacataaaagtgtcagtatgcttcttttatgaggtgtactttatactttgatgaaggctaaggtgtacctaacagctttttatagtatattcatttatggagttagctgtattttttttaaaaaaagaaaagtagtaaattagcagcttttttttttaaatgaagagaacttcatgatgatttaaaaggactaatgagaagtagtttgacttgacttcaattactaagccgatttgtataaggaacaaatacctcctgcattttatacgactttttaaagctttaattattcaactaagaaccaataatggcttcttcaaggctaatatcaatagtttataagcagtatatttcacctacactaaatatggggcattttaaaagaagattccccccttcccccccggaaatctgcatttactaaatttgtcttaagtccagttgtgtttaaaggtcatgcttggtcggggtgtggtgcttcacacctatttaatcccagcactttgggaggccattgttgggcagtcacctgaggtcaggagtttgagaccagcctgaccaacatggtgaaaccccgtctctactaaaaatacaaaaattagcttggcatggtggcgggtacctgtaatcccagctgcttgggagtgtgaggcaggagaatcgcttgaacctgggagaccgaggttgcagtgagctgaaaccgtgccattgcactccagcttaggcaacaagagtgaaactctgtctcaatcaatccatcaatcaatcaataaaatagaggtcatgctgactattaaaaaaaaaaaaaa

SEQ ID NO: 122481 - DNA, 2180 bp, Homo sapiens
  misc_feature (1)...(2180): n = a,t,c or g
atgatcaagaatattgggccacagtatttgacaccgtcgttcttgggagagcaggagggtgatgaggaagaggaggggcacattgtggatgctgaagctgaggagggggacgccgatgcctctgatgccaaacgcaaggagaagcaggaggaggaggttgattatgagagtgaggaagaggaggagagggagggcgaggagaacgacgatgaagacatgcaggaggaacgaaatccccacaggagaggtgctcgaaagacccaagagcaagatgaagaggtgggcttaggcactgaggaggacccgtcccttcccgccctcctgacgcagccccggaaacccacccacagccaggagccccaggggcccgaggcagtggagcgccgggtccaggctgtgcgtgagatccacccgttcatagatgactaccagtacgaccaccgaggagagccttgtggggccaggtgacagtgaagctccctctgatgaagatcaactttgacatgagctccctggtagtatctttggcccatggtgccgtcatctatgcgaccaagggcatcactcggtgcctcctggaatgaaacaaccaacaattaagaacgagaaggagcttgtgctaaacacagaaggaatcaacctcccagagctattcaagtatgcagaggttctggatctgcgccgcctctactccaacgacatccacgccatagccaacacgtatggcattgaggccgcgctgcgggtgatcgagaaggagatcaaggatgtgtttgccgtgtatggcatcgcggtcgaccctcgccatctctccctggttgctgattatatgtgcttcgagggtgtttacaagccactgaatcgctttgggatccaggtcaaactcttccccgctacagcagatgacatttgaaaccagcttccagtttctgaagcaagccaccatgctgggatcccacgatgagctgaggtctccttctgcctgccttgtggtcgggaaggtcgtcaggggcgggacaggcctgttcagagctcaagcagcctctgagatagcagctaccccggcaccatctgcccagctccaaggacccttggtgagggcgtggcccagcctgccttctgcatgagaggaccaggagactggaatccagggcagttccaagtgacagtacagagcacagcagcgaccttgggcctgaaagcagtgggcctctgagctgggccagcttcacctggaaagtgacagagttgctcatccttgcccctccctgtctctggatttttatcaaggtttaccaagtcttctgagtccccctgagatggctggggcttcacctgtgctgcaggaggcctctgtggcataacccctaaggagaagtcctgattcacgattcactgagaagaccaaaggggaagccatgctttgctgctggggaccccaggcacctccagagtagggaagcggggttcttttgctgtgagtggccagggacaacagacaagattcctgggggctcccgatgagcaggaacgtggagcctgctgcccaaggcctgctccttccggctgctccagcccctgggggcagagtccacaaagaagtccccatcaagacttcttccctgagtcaaagtacagcgtagcatagtcctccacccacccaacctctctgcctggccagggtccctggccccttccactgtgtggccgaggtgtccttctagaccacatcagcccccaaggctgggagcagtcgctcccagggccgcagcagttcactcccccacacatagaacccaggtcaactgctggggccganttgaaacagggttgccctggcttttctctgcttgtcagtttggtgtggaggcctatgttctgccccaatacaccccaacaggcccttgcttatgggaaggaacaccaggcctccagcccagaggactgtgccgccctgttcttggccgtccacgtttcctctccctctagcaccagcaatacatttccctgggcatgggacagaaaaagacagagaggacttgtacaaaggcttttgtaaaaaccagaggttagcttcttatcttttgtcttattgttatttcaagctcagggcgggtaataaacatcattggaactagctattaggaaagaaaaaaaaacttggttttttttacaacaaa

SEQ ID NO: 122482 - DNA, 498 bp, Homo sapiens; identical to SEQ ID NO: 122448
  misc_feature (1)...(498): n = a,t,c or g

SEQ ID NO: 122483 - DNA, 1587 bp, Homo sapiens
atgcagggatgggaaagatgtcgtttccttagtccgggcaactgtctgggctttgagcaagaggaagctgcagcccacccgggcaccctcaccccgacaccttcagcagtaaacaagataaaacaattccttaaagataagcctgagcttgtagatgtaaaagttggtgtccgaaccaggggctgtaatggcctttcttatactgtagaatatacgaaaacaaaaggaaattctgatgaagttatacaagatgaagccagagtattcatcgaaaagaaagcacagctaacacctttaggaacagaaatggactatgttgaagacaaattatccagtgagttatgttcaataacccaacatgaacttgtggctgtggagctccaggaaagctggtggaaaccttggggctcactgaagaaatcatgtgactgtcacatgcttaacttgcggctgccttgtaaagaaaataaagtgatgcattttgaaaatgaagccatttactctagagaatgccaagttcgtcatccagaactcaattactcttactttgtgtttcctagccaacagcagattaacaggaatagagactgctgtaataagataaattgtcaacaggacgtggatgaagctggaagccattatcctcagcaaactaacacaggaacagaaaaccaaacctcgcaggttctcacttataagtgggagctgaacaatgaaaacacatggacacggggaagggaacacttactggggcctgctggggaagggcggggatggcctattgtgggaccttgtgatcataacagatttgtgagggttgcacctgcatctttgaagagtcctgtaattgctgttctctgtatgtcaggtctaatagtggagaccacagtcactcaactacagaatttaaatacaatgggaataattggatcccgaggagacctagggccttttaccaggataactgtgcactgggaagaggggaatgatcagacactttggggactactggacactggctttgagctgacgttgattccaggggacccaaaacatcattgttgtcctccagttaaagtaggagcttatgtaggagcttatggaggtcaccaacatcaaagaccaaaggtaggtaaaaccacaaagatgaagagaaaccagagcagaaatgctgaaaattccaaaaaccagagtgcctcttctcctccaaaggatcgcagctcctcgccagcaaagaaacaaaactggatggagaatgaccttgatgagttgacagaagtaggcttcagaagtgacggggagaatggaacaaagttagaaaacactcttcaggatattatccaggagaatttccccaacctagcaaggcaggccaacattcaaattcaggaaatacagagaacaccaaaaagatactcctcgagaagagcaaccccaagacacataattgtcagattcaccaaggttgaaatgaagaaaaaaatgtttagggtagccagagagaaagatcgggttacccacaaagggaagcccatcagactaagagcagatctctcagcagaaactctacaagccagaagagagtag

SEQ ID NO: 122484 - DNA, 525 bp, Homo sapiens
  misc_feature (1)...(525): n = a,t,c or g
atgacctccaggctctcagataccaagattgtacaagacctaacccagagaattactcaagacactttctacgtaagaagaattgtggtgctagctctcctcatagaaaaatgttttctgtctcttgttgaaattgacagcaaacacaacaacacagaactatttgggagaacagaggacagtgatacactagggaanatttgtgaggacagcacctgcatctttgaagagccctgtaaaggctcttctctgtatgtcagatctaatgtcatcttagctccagagggaagaacgctgctaccaggagacacaataacgattccattaaactggaagttaagatggccacttggacgctttggggtcctcctacctttaagtcaacaagctaagaatggagttacagtgttggcggcagtgattgacccagactatcaagatgaagtaggactacaaatggtccagatcctctccgggtcacgacctgctgaggtgcttgctgaaggcaaagggaatacagaataa

SEQ ID NO: 122485 - DNA, 1120 bp, Homo sapiens
gactctatctcaaggtgtgctacatttgaaaagaactgtttgagttctctaatttatataaacagccatctggagaagaggtatgggaacggatattaagggtataggataatggtggaaggaacataagagttgtatcaggctgaatttattgatttgggcccagtaagtagggactctgcttttaatgttgcagctcaaggagttaaaaaaggttctaataggttatttccttggttagctgaaatatggattaaaaaatggcccactgtgagagaggtggaaatacctgatctccctttgtttaatgtagaggaagggatccaaaagcttagggagattgggatggggtagtggattagtcactttagacctactcatctcagctgggagggtccagaagatatacccttgaccaggccctcgcaaaatatatttgtgagggcagcacctgcatctttgaagagccctgtaattgctcttctctatatgtcagatctaatggtgagaactgcagtcactcaactacaaaatttaaatacaatgggaataattggatcccaagggggcagggaccgagtggcaccactcaaccatcaaaggcaaagtgggcatggctaccataatggacagcagagggaaagtggcaatcagaatagtctgactggtgtagagctctggcactggctaattaatcatgttgtttctagaagtgaagttgataggaagcctactaccttcctacttaatttatacaagcagaaaacttctaggtcgaatggacgaaagactagtttgaattataaaaacagagaatcacggcccctcaatcaattcccagacttgagccagtttacagacccagaaccccttcaatgaaggggaggctgggcccccttgaggaagtactactttattgacaatttatgcagtgaatctttacctcatccttccccaaggagacctagggccttttaccaggataactgtgcactgggaagaggggaatgatcagacactttggggactactggacactggctttgagctgacgttgattccaggggacccaaaacatcattgttgtcctccagttaaagtaggagcttatgtacgagct

SEQ ID NO: 122486 - DNA, 1347 bp, Homo sapiens
tcagtacacacaggccaccaccactaccaccaccgccaccaccaccaccaccaccaccagcaccagcaccaccagcaccagcaccagcaccaccaccaccaccaccaccaccaccaccaccaccaccaccttattttcaataagccacttgggaaatgcttgcaatgggaaccagctgccaccaaaggtccttggtcctggaatccccctctttttgcgtccgttggaataaccaaaatttcccccttttcggggcctggccaaggaggccttccctcctcctaggaggtggcccagaggatgggaccaataaccctggaaaaataaggtccgctcggccacctttggccggaaaaccccccaatttgccctcaagggccaaggggggtttccccacccggtacctatttttccaaggctccgggggtggcctccaggattccttttcctttttccttcactctggtaagtcctcaaggacagcaatgttaagaagaatgttgtctgaaagactgcaaatagagccatcagttctggttttctgtcaggatactcactcgatggcacagattcactttcactattatgtctagagctggttgactccgagttcaaacttagagtgcttgggatagatgaaagttcattacagagttgttccacatcatctggaaccactggccacagatgtttgcgactatgcctcacagcatcccagttgtgacattttagaatatcacagccttgtttggttttagctatgagcccaagtacatatacacaggtccctctgatggaaagaacttcacactgttttgcaagttttagtatatctggaatcacgttttcttcctgtagcaaattgagaccccaatttgatgagccgatatttccccccaccacacagccctcacccttgaggcaagctaggaaagcctggcccaatcttggattttcacttgatctttggttactccgacgaacatagttatcaccatcaacaggcttccggtaagtagtaagtgcttcattgagttgttcctcaatcaagtcaacatatttggagttgtattcctttgctccagttcccaacaagttcctcatctccatctgagcctggacttccacctcagcctggacttcattgttcatatcactatcagcattttggtcatatccattcaacaagcctctaggaagttccaaactttccaacatcttcctgtcttctgagccctccaagtctctaagaagttccaaactttcccacatcttcctctcttcttctgagccctccaaactgttccagcctctgcctgatacccagttccaaagtcgcttccacat

SEQ ID NO: 122487 - DNA, 666 bp, Homo sapiens
tcagtacacacaggccaccaccactaccaccaccgccaccaccaccaccaccaccaccagcaccagctccaccagcaccagcaccagggggggggccaccaccaccaccaccaccaccaccaccaccaccttattttcaataagccacttgggaaatgctgctgtgggtaggtcacagtcatctctgaagacagccttagaaacaacatgaacacagggatgatgtctcacaggcaggatcagtgtgtccctgtgcttccaggggattccacataagataacatctttggggattttgccagattcccttgtctgtatgcattggggccaccgtgacaaaaatctttcgcttggccaaactttagtcagagtcctgacccctctcgtaggctcaatatgtgtatttcctcgtaaaatcccttcagatggaggtggccttctgtgccccaagcagccaaaatgccaatgcctatgatgcactgactgataggaaccatggtctctggcacctaaaatggcccaacgggccctgcccacaaccagataagcatcttgggtcactatgtttgtccgaaaacctcccaatgtcatcagtttaatttttccctgcttatgtctatgtgtgtcctttggatcttgagtcacgttctctgtgaaggcctgcat

SEQ ID NO: 122488 - DNA, 449 bp, Homo sapiens
tctcgggcttctcatcagcttattggcccatttagccagggcaaaggtgcatgacaactctgagcaagtcaaaacaaccgtcagcagcgggaaacctcgatgaacaaacaccgggagagtgcattcccaggggagttccaggagcccatggcccctcctgtacagccctccaccgcccagagccttccagcgccgtgtcttccccttggagcatctggaggccccagacagcacccgcctgacgttcagcagagggggagaccgaggcctgcagcagagtgttttgtcagatgctgctcctgaccgggagtgagagggaacccacctagagtttctgcagatcctgctttgtgacttcgagtgaagtgtggaagcgctggaagcacttagaccctgcctgtgagttgtcatgtatcatgtctgcaaacattaaaaatctcaccagaaaa

SEQ ID NO: 122489 - DNA, 262 bp, Homo sapiens
tggggcaatcgccgctgttggtttcatctcccagcactgcccattggccgcagcacctcctgcccccacggtgcactcccttctgcggtcatttccttcccagggacattttgctgaaacagcttgtaaaggatggcgcctggctggtgcctctgcctgctatggggtgcgggaggcaatgtgggaagctccgtactctctgatcgatgtatcggtaaaatgaaaactgctctaaaaagtagtcttttaatcaaggtcacag

SEQ ID NO: 122490 - DNA, 2348 bp, Homo sapiens
atgttcagcatcccgactggacagctccgtgcggcggcatcgggggcgcggcggcatcgggggcgcggcagcatcgggggcccttttcatgccattcaaggccccgtggaaacagacaccacagctcagcatgagactgtggccccacctgacctggctcatccatccccagcctctcgtggtccccggccctatgccgacatttggcactcgatgagccatttctccacatttcaggagccttgttttaagacagcctggctgtctgagagccaccggagtcgagactggatgcccggcctggtgcccgcaacagcaactccagatgtcccatcacagctgcccaccggacacagatatggggacaccaagtgcgcagggggcaaagtcatctgcgttgtgctcagctgccgccgccacacaacagcaccagaagagctcccgccggggacatgccaccgagcatgccgggtgccaccgagctgctggcatgttcggtgcctgctggctgaacctcggagttgcgtggcggtggctttgcttcatcactgtctggttcaccgtgctctaagttcgggagccctgcgagcagtgatgcgtggccacgtctacagcctcgctggcctgtcacgttcccagaggcacagcccttggaggtgcctggtggaactgagcatggctgctctccgtgggaaccgctcagcaactcagctgcacagactcctttcttcccacctctccatcccactgctccctcctgtcccctcgggcttcctgggtcacctccaggccccacctccagcactggggactacatccccacatgagaccagagcgggacatccaagctatattgccctcttcaacagggaggagcagaggctgcacactgtgtgctgctcagagcagccagagaccaacagcaaacgaaaaggagaaacaccaacaccaaacgaaaagaaggagaaacaccaacaccaaacgaaaagaaggagaaacaccaacagcaaacaaaaaggagaaacaccaacaccaaacgaaaagaaggagaaacaccaacaccaaacgaaaagaaggagaaacaccaacaccaaacgaaaagaaggagaaacaccaacaccaaacgaaaagaaggagaaacagagccagcacaaggcgggaccaaccctgggcgtgttcaacagagccctgcagctctataatgttttagttattaaagtgaatgtggccaggcatgcccttctgatgagtcagctggtgccagattcacggcaggatctgcccccgacaaaggacttcacctggaccgagctcctgggccccaagcagctgacatttgattctcgcaacaactgtgcacctcctggtgacacggccttgctagccgccatcctgtaccgggcccagtggtcacctggttgtcggtggcccgcgtccatcagcccatcatcattccgacttgctgttttgatcgtcggccggaaagccagacagctggccttgctggaccatgtctgcaatgggaattttgaggccgagagggagggcttcaggggcccctgggagtgcaacaccattcccaggggagttccaggaggcccatggcccctcctgtacagccctccaccgcccagagccttccagcgccgtgtcttccccttggagcatctggaggccccagacagcacccgcctgacgttcagcagagggggagaccgaggcctgcagcagagtgttttgtcagatgctgctccctgaccgggagtgagagggaacccacctagaggtgccagatggggtgccagggcagcgtggcctgcaggcccctcagctcctcacagcccctgcccccagccttcctgggcccagagatccccttgtttaccctagtccagggacagaggctcagatgtcatgcttgaccccacagtttctgcagatcctgctttgtgacttcgagtgaagtgtggaagcgctggaagcacttataccctgcctgtgccgcagacccctgggaggcaccaacaccccggatcgagaagcccgatgggaaagaatgtctgggaaggacgtcatgcccgaggcttgcgtgacagtttccactcacagtgcgctcactctgaacctctgtgcacacgatgggcctgcatctcttcccactatctgctaggaaacacgaggggaaggaaatgaccgcagaagggagtgcaccgtgggggcaggaggtgctgcggccaatgggcagtgctgggagatgaaaccaacagcggcgattgccccagaaagaacttggcgctgctaaggcaatggcggcccgaaagaggcccctgacgcatgaggagcggccg

SEQ ID NO: 122491 - DNA, 960 bp, Homo sapiens
ggagcccaccacagctcacagaggcctgcctgcctctgtaggctccacctctgggggcagggcacagacaaacaaaaagacagcggtaacctctgcagacttcaatgtccctgtctgacagctttgaaaagagcagtggttctcccagcacgcagctggagatctgagaatgggcagactgcctcctcaagtgggtccctgacccctgacccccgagcagcctaactgggagtcacccgccagtaggggcagactgacacctcacacagtcgggtactcctctgagacaaaacttccagaggaacaatcagacagcagcattcgcgggttcacgaaaatctgctgttctgcagccactgctggttggtacccaggcaagcagggtctggagtggacctctagcaaactttaacagaccttgcagctgagggtcctgactgttagaaggaaaactaacaaacagaaaggacatccacaccaaaaccccatctgtatgtcaccatcatcgaggaccaaaggtagataaaaccacaaagatggggaaaaaacagagcagaaaagctgaaaattataaaaatcagagcgcttctccccctccaaaggaccgcagctcctcaccagcaacggaacaaagctggacacagaatgactttgatgagttgagagaagaaggcttcagagaatcagacttctccgagctaaaggaggaagttcgaacccatcgcaaagaagctaaaaaccttgagaaaagattagacaaatggctaactagagtaaccagtgtagagaagtccttaaatgacctgatggagctgaaaaccatggcatgagaactacgtgacgaatgcacaagctttagtagctgattcaatcaactggaagaaagggtatcagtgattgaagatcaaatgaatgaaatgaagcgagaagagaagtttagagaaaaaaaaaaaaaagcgg

SEQ ID NO: 122492 - DNA, 4758 bp, Homo sapiens
atggatggaaggctctactctgtgaccattcagccttcatcagttctcaacctacaacttctgttatctgggcccaagtcagctgtcctggttgtcaccattctcatgtgttcagaaactaacttgtcttttaatgaattttcagaaagctttaaaacaacttcccctgagaaaatgagcataagaaagccacaggagaaatctgcagatggaaaacaatttttgcaaaatgataggaaaaatccaaagttaggtaatactcaaactcttttgagaaatgatgtttctggacttttgagcagaactaaacgaaatattgtgcctccagggtggtattctgtatatgtaacaaataattatgtttttaaaaaatcccctaaagccaaaaaagtatccgaatccacaacaaaaaacgatccagtgaaaaatattcacattgaaagctcacacaatatagacctaaacaaaattgcaatgaattctaatttacaagtggttgtgaagcgtttggaagatacaataagtatagccaaaaaatcctggaataatcagccattatcagaaggatataaagcatccaagaaattgatagaaattgatggtaaagaccaacatgctgacagaaatatgactcttactctaaatagaatgacatgcaaagaacagagcttatcaaaatctgtggtagcatccggcaatattatcaatagtcactgcatgcctacagtggatttgaataacaaaagacttgaaaatctgaaaaagtcatctattttagatatgggtcgcttgatttccagtgttgaaaatgtaccagcaaaatatgaaggtactgaaagttcatctgtttccaactattctagtcctatcaaactcatgtttttatctgaggttaaaagtagtgaaggggtcaaatatactttaacttcagttggcacttcccattcaaatgttgttctcccttctgaaaaacctacaacccatcacgtaactgaagaaaaaacagaaacaaatgaggatatctcaaatgcgaactctgaaaattatcactccagtcattatgatactgatacttttcaaagagaactaaacaaattcagtcatgcaaaagaaactgcaggatcctctacaatgtttataggtgatataaatagtgataagccacaagaagaacctaaggacaattcaagcagtgctactgatccatcttttaaaagaaaaccaggtagaccaaaaaaaataggtccccaagttgtgaaacagattaagcgaccaattggaagaccaccaaagcctaaaattgatcaaacaaacatcactgtttgccagaatgagccctttagtgctggaaggaaaagcccagaatgtctcatatcagaagtaaaagaaggtatttataaaaagagtattacagtaactgttatttacggaaggtcaagaagaactaaaaggcatgtttctgaaggaagggtaaacataagcaaccttatgtctttaaacaataatgctggtgattttccaactgaatataatagtcccagaaatattagtgaagacaaaattgacttgggtgaaagaataagtgctgtagcaagcttgactactgaaagtgagatcttggggtctggctttgaatatgtgagacccatcaagaacaaatctgtgatacctcagccttccaagaacattattcgaccaaatcagaagcctttggcaataagtaggaagcctggtagaccggcaaaagtgaaaatctctggcatatctgtgactattaatagaacttcacctcaggaaagagaagtaagtattagcagctgcttgcctcctttagaacaggataatacgtcaggaaaaaatctgcctgaagaaaagtatgaccaacagtgcactcaaatggataaaataaggcacactgaagctgatatatttaaaaatggatcaaaacgtatgattgctactgtacctttgagacattctattagggatagaaaaccatctctgcatttcttacattcattagcatcttctagctcacttatttatagaaacgctctgctccataaatcatataaactgcatttgcagaaaaataaaagtcagaaggaaaaacataggcactcaaagatgaaaatagcttacaaagataccccaagaaacagactttcgcggaatgcaaaaaagtgtttggaagataataaattagtacctatttctgaagtatccttggatcctataatttcatcaaaccctttgctcaggtggtgggctacttctgcttcaaatgattccttattagaggaattaaacaatagatttgagcaaataacaaatgcttgggtgcaagtaagtggagatgaagctgaaaattgtattcataaaaaaagagaacacattgaaaatgatcatttcaaagtagcaagccctttggaaacttgtcttttagaacttgaagtttcacctgtaaaaatgctttttcagaaaaagtatgatttgaatgaactctgtacttggtttatgcaaacaacagaaacacagtctctttcactagttagaaaagcaaatgcccgaaaccctttggaagtaataaataccaggggaatcaaattagggaccaaatattctgactttaatgccagccccttcagaaagcactttaaaaaatttgcactctcttctccttcaaaatcagcagagaaattgcatatactgcataaagtggctaactctccactcttaaatgtgaaaagtaatttagcaatagctagattaaaaaggactgagtttaagaggttgcatcatgaaaggtggaaaagagagggaaagctgcacaaccatggaacagttgactggaactctaaaaggagaaacttaagatttttctgccagaaccaatttttaaataagactgagggagaaacaaatgctgacatcccactccaaggaaaaagcatagtagataatcagtgtgttttgccacctgagatcaggggtgacttgcagcagagggtagtaatgcctgacttcaaaatacatgctagttttgagaataaatttaagtcagaagcaaaagagaatggaacaaattgcagccaaaaagactttcaaaagggaccaagactagaaaatgtatgtcctaatagttggaggtcaaaaaccttaaaagactgtagaatatttttgaggaagctcaactgtcttgaacacagaaatacttttaagctaaatacaatcatttactctcctgaatctactgacagtggaaatactcatcagactcatatggaagaatcaaagcgctttactttaagatctcattctgctaggcaaaattcttttaaaaagcaatctaaagaaatagaaaatgctaacacaaataatccttcagctgatgaatttgctgaccatcttggcaatagtaaattaagcaaatgtgttaactttgacaagaatcctgatagttttgaagttcttagcaatttgaacaaaagaaaaagaccaccatggaagatcacagaaatgtcaacaaaaagacataaacgacagtcttgcaacagtggacaaatggcaaactatttttccaaatccctagatttatggaactttgaacttgagaaagatgatttagggtatatggcggaagaaatttctaagcagcaaagcattcaagaggaaacttgggtgctgttaaaggcatttagttttataaaggaagcagagcataaaagttcggaaaatttgcagcctgacaatttgatagaaaagaaagacccattttctgaggagaaattcaagctggctacagaaatttgcataactaatgaggagccacacgttaatctccaagccaacagggaaaatgtctcaaaggcatggctgttgattcagagggtggaagccccagtgccttggcggcttccacatgctgttgagcctgtgggtgcacagaagtcaagaattgaggattgggaacctctgcctagatttcagaagatgtgtggaaacgcctggatgcccaggcaaaagattgctgcaggggcagggccctcatggagaacctctgctagggcagtgcagaagggaaatgtggagtcacagcccccacacagagtccctactggggcactgcctagcggaactgtgagaagagggccatcgtcctccagaccccagaatggtagatccaccaaaagcttgcaccatacacctggaaaagcctcagacactcaaagccatcccatgaaagcagccaggacaggaccctcagctgcaggtctgttggagtttgctagaggtccactccagaccctgtttgcctgggtaacagcagcggtggctgcagaacagcagattttcgtgaaccgcgaatgctgctgtctgattgttcctctggaagttttgtctcagaggagtacccggccgtgtgagaaaaaacaaccagagtatcctgtggatgccgcatgctcctctgatgagctggccataagtttaattcctgatgtttttccagcctcatcagagagcttagtagacaagcataaggaaaagagaaagggctgtattccagttccaggcagcatgctacaagtgaaaactgatgagaaactgaatgtgtctgatgagaatacagcaagttgccctttgagccccattaagatgtgccttaatcgtcccattgaatggaatctgaatttgacaacagcatctctaacgagctgtacagttcataaccaaaatctcaaaagcgaagagaaatag

SEQ ID NO: 122493 - DNA, 540 bp, Homo sapiens
cccacgcgtccgggcttcaagtgcttcaccaagaagatggacaacagggcactcagctcaacctcacagccaatgagtggcgacaggctttgagaaagagaatcagaagcctgacagttcttcttcagcctcagccaggccttgaagctggaccaggccatccacatcagtatggatgccttccactctgtcagtgagctctttgccagtcagtccaggcggggcctggacccagccatggacctgttggtgctgtctcagggacaccagaccaacatcctggacatcgtccacatacacaaggaagctcttaccaaagtcacggagaacaggcaacatgtggcagaagggaagacagaggtgcagaggctgatgacgtcagaatcacaggaacaggaattctttcaccacttcactggaaattcaccacttccatccaatttgaataagagacatgaaatcacagatgcagcatttcttgcaacaagagatactattttttcaaaaatcatccaggaattgataatgttgaatgactag

SEQ ID NO: 122494 - DNA, 461 bp, Homo sapiens
tttgatgatcttacagcagagaaggaagctgtatcttcaaaatgtgtcgatttggctaaagacaatcaagttcttcaacaggagttattatctatgaaaaaagtacaacagcaatgtgaaaaacttgagaaggataaaaagatgttggaagaagaaatattaaatcttaagacacatatggaagacaatatggtagaacttagtaaactacaagaatataaatcggagctagatgaaagggcaatgacggcagtagaaaaattagaagaaatccatttacagttaaacaagggtaatacggcttcactaaataagaaggaactcacacttaaagatgtggaatgtaaattctccaaaatgaaaactacttatgaagaggttacaaccaaattagaagaatacaaggaagcctttgcagtagcattgaaagctaacaattccatgtcaaaaaaattaacgaa

SEQ ID NO: 122495 - DNA, 319 bp, Homo sapiens
ggagcggcttccgggagccgggcagcaaccgccgtgcaggcgcgcgcccaacggcttttcaagtctcactcggtctgagaggtcggaggctgcgagtgtcgctgctgaaggctgtggtggaccgggctggatcgcggattgtggagggccagacggcccagggctctatagaacatgtctacacgggttccggataccgaatccgggactccgaactgcagaagatccacagggcagctgtcaagggcgacgccgcgggggtggagcgctgcctggcgcgcaggagcggagacctggacgccctggacaagcagcacag

SEQ ID NO: 122496 - DNA, 480 bp, Homo sapiens
ggattgttttatattttatgagaaacaattaaaatgtggaaagagcccagtgataaagttttataatcttttaaatcatcatacaatttttccttaagactttatggttaaatattctcttcattaaatgtggcttacccgtggattccagagaagaaagtagatgggagcaagtgtccaatacagcaacagctggaaagaaaaataaagaattttgttctttacctaaaacacttcagttaactaagtgtgagtttaaaaactaaagacttgagaactttatcagagttaataagaacgagaaatatgtatgtacatttaccatacaaaattactatttaataatttacacatggcattaattctaattgtgtttaaatatcagagctttttcagtcttcattcatgtaatcaacagccacatgctaaggtactcgaaccagcactggaattacaagatgaagatggcatggtccacct

SEQ ID NO: 122497 - DNA, 531 bp, Homo sapiens
atgggcagcaacttccagctgtttccatggcaaggggtggggacttcccgtgctgccatgtcattggcaagctgtgatggcactgctgtgtttccagtgtcctctgggtgtttccaagagcgacaggaaacaaataaatctctgtttgatgatcttatggcagagaaggaagctgtatcttcaaaatgtgtcaatttggctaaagagaatcaagtttttcaacaggagttattatctatgaaaaaagcacaacaggaatgtgaaaaatttgaggaggataaaaagatgttggaagaagaaatattaaatcttaagacacatatggaaaacagtatggtagaacttagtaaactacaagaatataaatcagagctagatgaaagggcaatgcaggcagtagaaaaattagaagaaatacatttacagaagcttattcgacatggtttatttgatgtgttttatggaccaccttgcatgagtggatcaaggagctctaattcaaggccaaatgaggggataggagaaatgtag

SEQ ID NO: 122498 - DNA, 812 bp, Homo sapiens
cggaattcatacaaggctcaattccgaactgttgaaggaagaagaaagcaacaaaagactggaagctgaaattgaatcatcagtctagactgactgctgctataagtaagcacagtgaaagtgtgaaaacagaaagaaacgtaaaacttgcattagagtgaacacaagatgtttccgtacaagtaaaaatgagttctgatatttccgaagtagaagataagaatgagtttcttactgaacaactttctaaaaagcaaattaaattcaataccttaaaagataagttccgtaagaaaagagatactctcagaaaaaagtcattggctttagaaactgtacataacaacctaagccaaacacagcagcaaataaaggaaatgaaagagatgtatgaaaatgcagaagctaaagagaataattccactggaaagtggagctgtgtagaagagagaatatgtcaactccaacatgaaaatccgtgcattgaacagcaactagatgatgttcatcagaaagaatgtttaccatcgaggaaggagaagtttaagtctgaaccaccagctttcctcagtggaaatcaagtgaagtcatcatcttgcagtttacagaccctctttcctcctgatgatttgatcttatatttggaaaatcctaaggactccaccaaaaaactattagaactgatcaacaaattcagagtcacaggatacaaaatcaaactacaaaagtcagtagcatttctaaatgacaaaaatgaacaatctaaagaagaaaatcaagaatgtaatcccatttacaataactacaaataa

SEQ ID NO: 122499 - DNA, 1581 bp, Homo sapiens
atgaaggaactcacacttaaagatgtggaatgtaaattctccaaaatgaaaactacttatgaagaggttacaaccaaattagaagaatataaagaagcctttgcagcagcattgaacgctaacaattccatgtcaaaaaaattaacgaaggcttcaaatcaacacactacttcctggggcacaaacctgccaagagggggaattcaacatgtggaagaggtggtcctacgctgtccactggaaaaggagggactcagggaaaagaaactcctacatgaggaaagatcattatggaggcgtcagcccatagtcactggggacgctctcaccagcacctgtgaattttggagacatttgaggatgtcctgtgcaaattgggatgttggaagttctgatgaatctgcagtcagaaaaaagtcattggctttagaaactgtacaaaacgacctaagccaaacacagcagcaaataaaggaaatgaaagagatgtatcaaagtgcagaagctaaagtcagtaaatccactggaaagtggaactgtgtggaagagaggatatgtcaactccaacgtgaaaatccgtggcttgaacagcaactagttgatgttcatcagaaagaggatcataaagagatagtaattaatatccaaagaggctttattgagagtagaaagaaagacctcatgctagaagagaaaaataagaagctaatgaatgaatatgatcatttaaaagaaagtctctttcaatatgagagacagaaagcagaaacagtaatagcacagcccctcaatctgagtgctcagcagagtgcttgtgaaggcagcaccacagcaacagttgctcagagggaacagattcaggagccttggtttagcaatagagtccagggttttcagctcagtgtctttagcctgtctctgctggtcatgtcagttatgtactattccatccaggaggcatctgactctgcatctccccgaggtttggagccccccatgcttcagagagctgctcaaagaatggcccggagtgcggaggccaggatgggaaggcgagcttggaagcagacggtgatgcgcctggggcagaacatctgtgttctctgttgtgagtggttaagacaagaagacagggcctggatgtcccagacagtcccccagggacttggtgggggcagcccctaccccagatcccagttagagagaacagcccagctcttggggctctgggcctggctgagccacctgggatctgggtaccctggtggtcggggaggggcacagactttaagtccagcagaagttgtttccggacagtctatgaaaagctctgctggccacggaggaagtaggcagctgacaaaaagttctgcaattgcctgtgccaaactgtgtaaagcaagtacttacatcaattgggaagataacgctgtcattttcctacttgttcagtccatggtggttgatcttaaggcagaagagcctcatcccattgctaccatcaccacaggcccatggggaataccgccaggctaccaccaatgttcccttaagattcaaggctctttagttcacttgtag

SEQ ID NO: 122500 - DNA, 3127 bp, Homo sapiens
tttcgtgagtgttgctgctgaaggctgtggtggactgggctggatcgaggattgtggagtaaatcatagatttgaaatagcggatttggggttgtatcggggctttggggttggataggggatttggggctgggtcggccggggtcggggaggcgggtggtgaaaaggtgacaggcagctgccctcgctcaagagccggtggttgggggtctgagaagaagtcaccactatgaagttattcggcttcgggagccgcaggggccagacggcccagggctccatagaccacgtctacacgggttccggataccgaatccgcgactccgaactgcagaagatccacagggcagctgtcaaaggcgacgccgcggaggtggagcgctgcctggcgcacaggagcggagacctgcacgccctggacaagcagcacagcagtgtgtccccaagaaagtgtcagagcctttacgtggaccttcccatggaaaaggaaacagaatagtcaatggaaaaggagaaggacctcctgcaaaacatccttccttgaagcctagcactgaaatggaagatcctgctgtgaaaggagcagtacaaaggaaagaatcgtacatgacattgagagcagaacaagccttaccagtggcttcagaggaagaacagcaaaaggcgtgaaagaagtgaaaagaagcaaccacaggtcaaagaaggaaataatacaaacaaaagtgaaaaaatacaactttcagaaaatatatgtgatagtacatcttctgctgctgctggcagattaacccaacaaagaaagattgggaaaacgtatcctcagcaatttcccaagaagctgaaggaagagcatgatagatgcaccttaaaacaagaaaatgaagaaaaaacaaatgttaatatgctgtacaaaaaaaatagagaagaattagaaaggaaagagaaacaatataagaaagaagttgaagcaaaacaacttgaaccaactcttcagtcactagagatgaaatcaaagactgcaagaaatactccaaatcgggattttcataatcatgaagaaatgaaaggtctgatggatgaaaattgcattttgaaggcagatattgctatactcagacaggaaatatgtacaatgaaaaatgacaacttggaaaaagaaaataaatatcttaaggacattaaaattgttaaagaaacaaatgctgcccttgaaaagtatataaaactcaatgaggaaatgataacagaaacagcattccggtatcaacaagagcttaatgatctcaaggctgagaatacaaggctcaatgccgaactgttgaaggaaaaagaaagcaagaaaagactggaagctgacattgaatcttatcagtctagactggctgctgctataagcaaacacagtgaaagtgtgaaaacagaaagaaacctaaaacttgctttagagagaacacgagatgtttctgtacaagtagaaatgagttctgctatttccaaagtaaaagctgagaatgagtttcttactgaacaactttctgaaacacaaattaaattcaataccttaaaagataagttccgtaagacaagagatagtctcagaaaaaagtcattggctttagaaactgtacaaaacgacctaacccaaacacagcagcaaacacaggaaatgaaagagatgtatcaaaatgcagaagctaaagtgaataattccactggaaagtggaactgtgtagaagagaggatatgtcacctcccaacgtgaaaatccgtggcttgtacagcaacctagatgacgttcatcagaaagaggatcataaagagatagtaactaatatcccaaagaggctttattgagagtggaaagaaagacctcgtgctagaagagaaaagtaagaagctaacgaatgaatgtgatcatttaaaagaaagtctctttcagtatgagagagagaaaacagaaggagtacctaaaaaagaaaatgaagaattaagaaaactttttgagttaatatcatcactgaaatataatgtgaatcgaataagaaagaaaaatgatgaattagaagaagaggcaactggatataagaaactcctggaaatgacaataaatatgttaaatgtatttggaaatgaagactttgattgccatggagacttaaaaacagatcaactgaaaatggatattctgattaagaagctaaaacagaagtttgatgatcttaccgcagagaaggaagctttatcttcaaaatgtgtcaatttggctaaagacaatcaagttcttcaacaggagtttttatctatgaaaaaagtacaacagcaatgtgaaaaacttgaggaggataaaaagatgttgaaagaagaaatattaaatcttaagacacatatggaaaacaatagggtagaacttagtaaactacaagaatataaattggagctagatgaaaaggcaatgcaggcagtagaaaaattagaagaaatccatttacaggaacaagcacaatatgaaaaacaattagagcagttaaacaaggatataatacagcttcactaaataagaaggaactcacacttaaagatgtggaatgtaaattctacaaaatgaaaactgcttatgaagaggttacaactgagttagaagaatataaggaagcctttgcagcagcattgaaagctaacagttccatgtcaaaaaaaattaacgaaatctaataagaaaatagcaatgatcagcaccaagctccttatggagaaagagtgggtgaaatattttctcagcactcttcctacaaggcgaggtcaagagtcaccttgtgttgaaaatcttactagtatagtactcaacagtaaatatattcccaaaatgaccggaagaattcctacttcaaacccttaaaccttaaataactggcagaactacttgactgagctgttgctgtattggacacttgctcccatctactttcttctctagaatccacgggtaagccacatctaatgaagagaatatttaaccataaagtcttaaggaaaaattctatgatgatttaaaagattataaaactttattactgggctatttacacattttaattgtttctcataaaatatataacattccaataaa

SEQ ID NO: 122501 - DNA, 3119 bp, Homo sapiens
gctgtgtacctaagtcgtggatgtgtctgctgcatccgctgcatcagttcacttctgaaggaaccccatgaggaaggtgtaatgtgctcctttcgctctgtggctactcagaagaatgacatcaggcccgatttccagctgggaaagatggattctaaaatcaaggaactggagccccagctgacaattctatatcagaacccaaagacgctgaagttccaaggtaagaaatctgtaaaatttgctctcagcccatcaatggccctgagaaagtagccattcaaaatgttctccatttaaagtatttttatcgccctgcagttcctgcacggctactacaagcccatcctgttcgagcccaaccagacctggcccgggcacgtggctgtgtggcaggacacgtgctccatcgtggccatcttgctaacatcacgcagaaggtgcaccccgtcatctgatagcattcccccgtacggtgtggctctcagcagcctcaccacaggcaccgcagctttcccgctgtgcacccagctgggtgtgtgaatccccctggactgcgcccaggccaccttcatctcccatgacaagatggtcatctccctcaaggggtacctgttcctgagttcttgcctgggcaactctctcctcctcaagtacaccgagaagcttcaggagcccccggccagtgctatctgtgaggctgctgacaaggaagagcctccctcacagaagaagcgagtggacacatggccagctggtcagccagggacaaatccgtgtcacaggacgacatggacgagattgaagtgtacggcagcgacgcccagtcgggcacacagctggccacctacctttgaggtgtgtgacagcatccttaacattggaccctgcaccaatgctgccatgggtgagcctgccttcctgtctgaagagtttcagaacaaccctgagccggacctggagattgtggtttgctccagccacaggaagaatggggctctgtcggtgctgcagaagagcatccagccccaggtggtgacaacctttgagcttcccggctgctacgacatgtggacagtcatcgccctggtgcctaaggaggagaaagagaatcccaagggggagggcacggagcaggaacccagcacccccgaagcggacatcggggacaaccactacattgtccaagtgtcgctgctgggcatccacctgctggaaggaatgaatcagttgtacttcatccctgtgggcctggtcacccgcaacatgcagtgcactgtaggcaacccctgcgtggtcatcatgagtgccgacggccgcgtcaccatgttcctgctgaaaagcacactcctatagtggctgccacgaccacctggtgctgcacaagcccccgctgcaccatcagcccaacgtgatcacgctgtgccgtaccgagacctcagtggcatgttcaccactgagagctgcctgagcggggctcacgatgagctagggggccacagtggcttggaggccgagagcctgggctcggagactagccccacagtcggtgatgaggaaatgctgtgtggggatttgggatccctcttcagtcccagcaaggaggtggcccgaagaagcagccagcccctgccgactgggactctgtacccttccagacagagcccatccactggtcggctggtgttcttggtgaagaacttccctgtggggcagcgggtcctcatggacagctcctttggagagcccaccacacagggcgaggcccgcagggaggaggccatgtgccaggaggagctgcctctctcgtcaaggaggtgctgctggttgtgctgggcagccgccagagcacaccttacctgctggtgcatgtggaccaaaagctgcttctctcggctcagccagggcaatctcaaagtccactttaagaaggtccttcacaacatcagcttccgtgagaagaagccgaagccatccaagaagaaagcaggtggccgcacagaggagagggtcgggcccggggccgcgtggcgtgtttccactacttcgaggacatttatggcagcaccaacacactgtgcacctgcatcccacatgactggcgaggagaaggcatttgagaccattgagagagatgagcagtgcatccacccccaggaggcggccttatctatccagttcatctccctagtctgctgggaggctattcccaatgccaggattgagctgcagaagtgggagcttgtgaccagcacgaagacagtgtcgctgcagcaaggagaccaggtcaggcttcaaaggctacgcgtggccgccgggacctgcctcatgcaggaggaggaggaggtcatgtcctgagggcggatcttgatcatggatgtgactgaggtggtgcccgagcccagccagcccttgacctgcagcctcatggtgtacatgtacctgcctgaagccaaggagagttttgggggcatgtgcctgctgcgctgggcagacttccatgtgggtgcccacatgaacgcattctataggaccctgtgccagggagccactgaggggctcagcaaaaagtcactgccacaccacacaggcctcaacctccgcaccttccggatgctgcgtgtggacctccgcaccctccagaatgctgtgctgcaagctgcacggggagctgctcaaccgctacctgtacctgagcaccatggagcagcaagctggccaagaagatcagcaccatatccgacatcatcctggatgacttgctggagacagatggcgtcactgcccacttctagctccatggatgtcgctgccaccaccacaccgcactacctcccaccaccttttttgaacaaaacacaaggaatatatactttctggaagaccatctgatactatgtatcaagaatctcaaaaatattcatatactataatgcaataaggccatttctaaaaatttaccctgagaagataatccagacctgtgctacaatttccattacagagacatctgttgtaatattgtttacggaagggggaaacagaaaacagcctccatgtccacagaggaatgattaaatatgtggtacacctacaggctggagtgtaaaatggacaca

SEQ ID NO: 122502 - DNA, 427 bp, Homo sapiens
ttttgccaaggatattcagagcggctttatttataattcatatacgtatatgtgtatttagctttagtaaatattgccaagtaattttgcaaagtgctcgtaacactgctttaggttttgtcacggaagaggaagttggaggccccagtaggagacaggaataatcagtagcaggggtgataatgggccattgcaatccaaaggcatgttgtctatgaccaggaatggcaaattgctgatccttgcaatatgtaatgagtggaaaatgctgagactttgccacctggcccattcttaaacatctccttagagagctctgcccggagaagagctacttcacgcgacgacaaccgccgtttccgacctcacaggtccaggcgttcccgacgctctcgctccgacaacgccctccacctggccagcgaac

SEQ ID NO: 122503 - DNA, 903 bp, Homo sapiens
atggcccagaagttcatggctccaaacagggcccggaccctacgggacatctgcactgacagagaggcctatccggtccaggaaagcatgggcagcgggacaagaggccaaaggaaagaggacatgggtggggcagccttgtccacgggggaaggtggggcaagggatgtgaaggcccctctccctgaggccacactctgttctcagatggggcccacaggaaggccttccgggagtctgtgcgacctggctgggagtacattggccggaagatggatgcatcagagctttgattttgatggagggatggaggccagcaagctgccagggcaggagggcgtgaggatccagcccatgagtgaacgcacccggagaagagctacttcacgcgacgacaaccgccgtttccgacctcacaggtccaggcgttcccgacgctctcgctccgacttctccctccacctggccagcgaacgcgaggccatctcccggttaaaagataggccccctctgagagccagggaggactatgaccaatttatgcgccagcggagcttccaggagagcatggggcatgggtcccggagggacctgtacggccagtgccctaggactgtgtcggacctggctttgcagaatgcctttggggaccgctggggaccctacttcgccgagtatgattggtgttccacctgctcctcctcttcagagtctgacaacgagggctatttcctaggagaacccatcccccagccagcgcgcctgcgatacgtcacaagcgatgagctgctgcacaaatacagctcctacggcctccccaaatcttccacattaggtggcagaggacagttgcacagcaggaaaagaccagagagcaaaaacctgtatcatttctttatatga

SEQ ID NO: 122504 - DNA, 387 bp, Homo sapiens
atgggcagctctcaaggggtctacgcagagcttaaggagttagataggaatgttcaaaaagctgtaggacttagagaagtaccaagaatgacgatcagcactggaaagcctgtggcagctgagaggtggggcaagatcatctttgcagatgaatgcacagaagctgaggggcgacactggcacatgaaacacttttgctgcttcgagtgtgagacagtgctgggcggccagcgctacatcatgaaggagggaagaccctactgttgccactgcttcgagtccttgtatgcagaatattgtgacacctgtgcccaacatataggtgaggcaatatttggcagtcagcttggtccttctgtgatgcggtcacctttgttttgggtgtag

SEQ ID NO: 122505 - DNA, 2463 bp, Homo sapiens
atggaagagaaaagcaaacgaagaggtgttttgtggagtcttctgatccttgccttgaagtttggagatgagccccctctagggtcaccgaacagctgtaaatacaagctgaccaccctcaaggagctgggatggagggaggttttctccagtctccagttctgcctttgcacctctgtggcctctcaaatgctcagccagtattttgagtacacccaacctcacccaggagatatatgtcacccagaaacatgtgctctccagaaagtcttcctgacatcatcggggcagtcctcctccacctcctcctcttcccagcaattcgttctgcaaattaatgccatccaaacaatcctagaaaagacccccacccacatctccactcccacccccacacctacacttgccaaccccactgcagtcggattggaggaagacagagagcaagacgttggaacaagcagcaggggtggagcctgggacacaaggatcaagagggaacttgagaaaatgagtgagaagtgcggaggccagatcaatggtggagacatcgctgtgtttgcgtcacgcgctggccacggcgtttgctggcacccgccgtgcttcgtatgcactgtctgcaatgagctcctggtggatctgatctacttttaccaagatgggaagatatactgtggcaggcaccatgctgagtgcctgaagccgcgctgtgctgcctgcgatgagatcatctttgcagatgaatgcacagaagctgaggggcgacactggcacatgaaacacttttgctgcttcgagtgtgagacagtgctgggcggccagcgctacatcatgaaggagggaagaccctactgttgccactgcttcgagtccttgtatgcagaatattgtgacacctgtgcccaacatataggtgaggcaatatttggcagtcagcttggtccttctgtgatgcggtcacctttgttttggggagtggggatagccgcagctgctctggatgctgtgctgattagagctcaccaaaggacccagggatgccatcatgagctctctgcactcttggcatttgagaaagggagtgagaagaaggaggaggaagaaggaggacaagtctccagaagttcttccttgaaagtccaggctcaggaactctcagccactgaagataaaggccacattagtccctttttctgggaagccgtgtatcattacgcatcaggagaatgcaggggtcctggtccaccctacagtcatagcttgaggctatattcccagcaggctctccccacgggaaggggccccagcagctcccagtttccattctgccagttttactgctgctataaaaagagcctgctgtgtgactgccttagcaaaagtcctgccttagaaaaagcaatgagaggtatcgaccaaggtcaaatgacctatgatggccaacactggcatgccactgagacctgtttctgctgtgctcactgcaagaaatccctcctggggcggccattcctcccgaagcagggccagatattctgctcacgggcctgcagtgctggggaagaccccaatggttctgactcctctgattccgccttccagaacgccagggccaaggagtcccggcgcagtgccaaaattggcaagaacaagggcaagacggaggagcccatgctgaaccagcacagccagctgcaagtgagttctaaccggctgtcagccgacgtagaccccctgtcactgcagatggacatgctcagcctgtccagccagacacccagcctcaaccgggaccccatctggaggagccgggaagagccctaccattatgggaacaagatggagcagaaccagacccagagccctctgcagctcctcagccagtgcaacatcagaacttcctacagtccaggagggcaaggggctggggcccagcccgaaatgtggggcaagcacttcagcaaccccaaaaggagctcgtcactggccatgacaggacatgctggcagcttcatcaaggaatgccgagaagactattacccggggaggctgagatctcaggagagctacagtgatatgtctagtcagagtttcagtgagacccgaggcagcatccaagtccccaaatatgaggaggaagaggaagaggaagggggcttgtccactcagcagtgtcggacccgtcatcccatcagttccctgaaatacacagaggacatgacgcccacagagcagacccctcggggctccatggaatccctggccctgtctaatgcaacaggcactaagacctgcagcgtgacattccaagcaaaagagacatgcagataccaggatgctcaatttgggaaagtaaaagccagagtcaaagaaagacaatcactgtggagtaaattccagggctcctgtggaatctgcctttattcccataaatacatacttaaatcaagcagttcctcttag

SEQ ID NO: 122506 - DNA, 1288 bp, Homo sapiens
aaataaaaaccccaaaaatcattatcctgaatcttatgtttcactgaaaaatgattttaccaagttgacttccaggaggcatcgtggtgtggaacaggcactagtgcagctctgccatgtatttgtgtgtgaacatgggcatgttattgttactctgagttctggatttatcgtctatagaaccagagctaactactcctcctctgcacagggagtggggatagccgcagctgctctggatgctgtgctgattagagctcaccaaaggacccagggatgccatcatgagctctctgcactcttggcatttgagaaagggagtgagaagaaggaggaggaagaaggaggacaagtctccagaagttcttccttgaaagtccaggctcaggaactctcagccactgaagataaaggccacattagtccctttttctgggaagccgtgtatcattacgcatcaggagaatgcaggggtcctggtccaccctacagtcatagcttgaggctatattcccagcaggctctccccacgggaaggggccccagcagctcccagtttccattctgccagttttactgctgctataaaaagagcctgctgtgtgactgccttagcaaaagtcctgccttagaaaaagcaatgagaggtatcgaccaaggtcaaatgacctatgatggccaacactggcatgccactgagacctgtttctgctgtgctcactgcaagaaatccctcctggggcggccattcctcccgaagcagggccagatattctgctcacgggcctgcagtgctggggaagaccccaatggttctgactcctctgattccgccttccagaacgccagggccaaggagtcccggcgcagtgccaaaattggcaagaacaagggcaagacggaggagcccatgctgaaccagcacagccagctgcaagtgagttctaaccggctgtcagccgacgtagaccccctgtcactgcagatggacatgctcagcctgtccagccagacacccagcctcaaccgggaccccatctggaggagccgggaagagccctaccattatgggaacaagatggagcagaaccagacccagagccctctgcagctcctcagccagggaactgggccagctccatgcacagagaaccacagaaattcagccatctctggtgtggacgtgagccagctggcagcggaatccctcaggggcttggcttgtggcgattctggcagtggtcacacccttcaaaacttgacaggggccctttactatctgtgctga

SEQ ID NO: 122507 - DNA, 2391 bp, Homo sapiens; identical to SEQ ID NO: 121124

SEQ ID NO: 122508 - DNA, 627 bp, Homo sapiens
tcaacaagatggtgaattgactagtgggtagatccacaggacgggtgtggtcgccatgatcgcgtagtcgatagtggctccaagtagcgaagcgagcaggactgggcggcggccaaagcggtcggacagtgctccgagaacgggtgcgcatagaaattgcatcaacgcatatagcgctagcagcacgccatagtgactggcgatgctgtcggaatggacgatatcccgcaagaggcccggcagtaccggcataaccaagcctatgcctacagcatccagggtgacggtgccgaggatgacgatgagcgcattgttagatttcatacacggtgcctgagggcctgcagtgctggggaagaccccaatggttctgactcctctgattccgccttccagaacgccagggccaaggagtcccggcgcagtgccaaaattggcaagaacattgtcaggacggaggagcccatgcattatgggaacaagatggagcagaaccagacccagagccctctgcagctcctcagccagtgcaacatcagaacttccgacaggtgccacggactcgcgcaccgactccacacgctccacccacatacaaactacaacacacgagaacccgacgcgcat

SEQ ID NO: 122509 - DNA, 1239 bp, Homo sapiens; identical to SEQ ID NO: 121123
  misc_feature (1)...(1239): n = a,t,c or g

SEQ ID NO: 122510 - DNA, 2879 bp, Homo sapiens
atgctcaacatccagtcagtaccaggaattgggcaagggcattatagccgctatcttcacagcaatcccatgcattcaggggactttatttccaatattcatatgaggaagccaaagttcagagagatcatctttgcagatgaatgcacagaagctgaggggcgacactggcacatgaaacacttttgctgcttcgagtgtgagacagtgctgggcggccagcgctacatcatgaaggagggaagaccctactgttgccactgcttcgagtccttgtatgcagaatattgtgacacctgtgcccaacatataggtgaggcaatatttggcagtcagcttggtccttctgtgatgcggtcacctttgttttggggagtggggatagccgcagctgctctggatgctgtgctgattagagctcaccaaaggacccagggatgccatcatgagctctctgcactcttggcatttgagaaagggagtgagaagaaggaggaggaagaaggaggacaagtctccagaagttcttccttgaaagtccaggctcaggaactctcagccactgaagataaaggccacattagtccctttttctgggaagccgtgtatcattacgcatcaggagaatgcaggggtcctggtccaccctacagtcatagcttgaggctatattcccagcaggctctccccacgggaaggggccccagcagctcccagtttccattctgccagttttactgctgctataaaaagagcctgctgtgtgactgccttagcaaaagtcctgccttagaaaaagcaatgagaggtatcgaccaaggtcaaatgacctatgatggccaacactggcatgccactgagacctgtttctgctgtgctcactgcaagaaatccctcctggggcggccattcctcccgaagcagggccagatattctgctcacgggcctgcagtgctggggaagaccccaatggttctgactcctctgattccgccttccagaacgccagggccaaggagtcccggcgcagtgccaaaattggcaagaacaagggcaagacggaggagcccatgctgaaccagcacagccagctgcaagtgagttctaaccggctgtcagccgacgtagaccccctgtcactgcagatggacatgctcagcctgtccagccagacacccagcctcaaccgggaccccatctggaggagccgggaagagccctaccattatgggaacaagatggagcagaaccagacccagagccctctgcagctcctcagccagtgcaacatcagaacttcctacagtccaggagggcaaggggctggggcccagcccgaaatgtggggcaagcacttcagcaaccccaaaaggagctcgtcactggccatgacaggacatgctggcagcttcatcaaggaatgccgagaagactattacccggggaggctgagatctcaggagagctacagtgatatgtctagtcagagtttcagtgagacccgaggcagcatccaagtccccaaatatgaggaggaagaggaagaggaagggggcttgtccactcagcagtgtcggacccgtcatcccatcagttccctgaaatacacagaggacatgacgcccacagagcagacccctcggggctccatggaatccctggccctgtctaatgcaacagagaatcaagatgactgcagttttgtgaatagactgaaggggagcaataatagaccaggtaggaggcaagagttgatggtgacttggaacttcatccaggagagaaatggcagtggcatggaccagtgtgatgatggtggaggaaagatattagatcctgtgtatattttgacagtagagctaacgggatttgccaagggctggaaaatgttcagtgtcaaggaccagagtgtaaatgtattaggctttgcaggctgcctctctgctgatggtggtgccaagcgccaggagcacctatcccgattttccatgcctgacctcagcaaagactctggaatgaatgtgtctgagaagctgagcaacatgggcactcttaactcgtccatgcagttccggagcgcagagtcagttcgcagcctgctctctgcccagcagtaccaggagatggagggaaacctccaccagctcagcaaccccattggctacagagacctgcagtcccacggaaggatgcatcagagctttgattttgatggagggatggcgggcagcaagctgccagggcaggagggcgtgaggatccagcccatgagtgaacgcacccggagaagagctacttcacgcgacgacaaccgccgtttccgacctcacaggtccaggcgttcccgacgctctcgctccgacaacgccctccacctggccagcgaacgcgaggccatctcccggttaaaagataggccccctctgagagccagggaggactatgaccaatttatgcgccagcggagcttccaggagagcatggggcatgtggtcccggagggacctgtacggccagtgccctaggactgtgtcggacctggctttgcagaatgcctttggggaccgctggggaccctacttcgccgagtatgattggtgttccacctgctcctcctcttcagagtctgacaacgagggctatttcctaggagaacccatcccccagccagcgcgcctgcgatacgtcacaagcgatgagctgctgcacaaatacagctcctacggcctccccaaatcttccacattaggtggcagaggacagttgcacagcaggaaaagacagaagagcaaaaactgtatcatttcttaatatgattgggatcagggaatgggagaagatgggagctaagaatgtaaagtcagaaacttaaaaaaaa

SEQ ID NO: 122511 - DNA, 454 bp, Homo sapiens
  misc_feature (1)...(454): n = a,t,c or g
aaaanacccctgccttcctctcccgaacaacccgcgggtcgaaaaggaactgcgcctgccctgtgcccttactgaaatttattttcgtgtaacccatttaccttttatgtggaaatcgaaaagccttttgataatagtagcaaagcaggaaggactgagtgggaacccacaagcccagttgaaagaaaatacatgacgtacttgagtgctcaggacccacgagctgattcaagttgtacagaatggacacttacagatgtgtggaaaatctgagacaggaaatgaagcctcaccagtaagctgaacaggggagatttaatgcaaacatttgtccctggctgggcactgtggctcatgcctgtaatcccagcactttgggggctgaggcgggagggttgcttgaggccaggagtttgagaccagcctgggcaatacagcaagaccccatctcaag

SEQ ID NO: 122512 - DNA, 276 bp, Homo sapiens
atgacgtacttgagtgctcaggaccacgagctgattcaagttgtacagaatggacacttacagatgtgtggaaaatctgagacaggaaatgaagcctcaccagctgaggacgcggggtcaacccctggccacccatgcgcggagtcggatgagggctctgactcggtcaagtgcatcgtgctgcaggtgctccggggcctccagtatctgcacaggaacttcattatccacaggtgggtgacagctaggcagagttggaagcacaaattcggctga

SEQ ID NO: 122513 - DNA, 454 bp, Homo sapiens
  misc_feature (1)...(454): n = a,t,c or g
ccaagcttggcacgaggagagaggcggngccagcgctcggcatggcggagccagatctggagtgcgagcagatccgtctgaagtgtattcgtaaggagggcttcttcacggtgcctccggaacacaggatcgggcccgggacacccagacagatgagattgtcgcactgaagaaggtgcggatggacaaggagaaggatggcatccccatcagcagcttgcgggagatcacgctgctgctccgcctgcgtcatccgaacatcgtggagctgaaggaggtggttgtggggaaccacctggagagcatcttcctggtgatgggttactgtgagcaggacctggccagcctcctggagaatatgccaacacccttctcggaggctcaggtcaagtgcatcgtgctgcaggtgctccggggcctccagtatctgcacaggaacttcattatccacagg

SEQ ID NO: 122514 - DNA, 1350 bp, Homo sapiens
  misc_feature (1)...(1350): n = a,t,c or g
tcataccaccaccttcgtcatcatcaccatcaccttcctcatcactgttttaccataataatcattaccatcactatcatcactattatcaccatcatcaccattgccatcattaccattaccaccatcttcaccatcatcaccatcaccatcatcatcatgatcactgttattaccataataataataataattgtcatcaccatcatcaccattatcaccatcaccatcattagtatcaccattatcaccctcatcaccatcaccatcatcactatcaccatcatcattatcaccatcaccatcatcaccatcatcaccgtcaccattattatcatcatcatcatcatcagcatcatcattaccaccatcttcaccatcatcactatcaccattattaccataataatcanccatcgccatcaccgttattcctgtaataataatcaccattatcatcaccatcacccccatcactatcatcatcatcactgttagcatcaccactatttgtaccaccatcatcatcatcataatcaccatcaccattatcaccatcatcatcactattatcattatcattaccatcacatcatcaccatcaatcaccatcactatcaccattattgccatgatcacaattatcattaccatcaccatcatcactatcatcccattttcatcatcactatcatcattaccattaccattatcaccatcaccatcgtcatcaccaccatcttcaccatcattattgccatcgtcctcatcattaccattatctctcatgttgtgaaacgtctcacacactttttcctcaaaatgcaatttcctctttcgactgtaaatatctcgatggccaagatgatgaagactttgtcgtgtataaactatgcactttgtactattattaagttcattttgtgaggtgatgttttctggatggtcttgatgcctgtggatgttcatcagtgtctgatttttggttcttatgaaggtggtttttgtgtagatcattgttaaatttggaattcctgcacgctgacgggtgcacagctgctggcacacagctggctggcacagaggccgcttctctgggcgcagaccccaggagctgctgctctgaaagaaggcaggagctgatagccagcacggcccaatggcctccacagaagtcgaattgttggttgggaaagagtgggacccagtcatggggttggcgacatttggtagcactggtgtaagtccagtttcacagaacaccaggacatcacggagcctcccacgcctggtgatgctgatgccggcacctgatatgtgattgacggagatcctgccttgtgccaccat

SEQ ID NO: 122515 - DNA, 427 bp, Homo sapiens
  misc_feature (1)...(427): n = a,t,c or g
ncctggcagccttgtgtccatccgtcccttgtaaatgtggccatccaggcccaagatgtccacctcatcatgcttcatggcaatctggatctcttcagtaggatacaggccccggggaaggtgctgcgggcggctgcggtggtaggggtaggtgagggtgtggctgcccccgcagcgccggggcacagttgagtaggtgtaatcagccatatctgtcacccgtttgtagcagggggagcccaggcactgggcgtgcagcagctcgcggattatctggctgctggccttggtggagcccccgaagtggatctgcaccttctcaatgttcatcagcatcttggagtgcatggagcgcaggcgccccacgctttgctccatctgcgccaggtcaccccgagggaaggcgctgcccagcttgaggttgcgg

SEQ ID NO: 122516 - DNA, 517 bp, Homo sapiens
  misc_feature (1)...(517): n = a,t,c or g
ataccattctggaactcttccgtggcctggtaatagatggtgatggctacccgagcatctgtgtcaaaggtgaactcaacattgtagtggactttagctttactggccttcttctcccagggctcttcacttcctcagcacatttgacgagcctcagtgtgtcctttcggatattgacacaggcttctcagagtcttcacgggttcttggggaaggtggggcggcgttaaggaaacgacaaacttggtctgttcccccagaaagttcagatcgctntttttncccttctccaaacaggtaaccttcaggatgagttgagtcaaacttctctcctcccaataatgaagtggctggcaaaatagcttccggacttgggcgggtagcggtacacggaattagacgggatgtccacctcgctccacgcccgcgtgctgccggctcgtcaggcccccaatggccactgcggctgcaagccccggcccggccccggtgcaccgcgccgcagctgcgcgcttca

SEQ ID NO: 122517 - DNA, 2241 bp, Homo sapiens
ttaagcttcctcctgaatgtttatttacacctccgctcactgagcggtgctggaccgcggcccccgcgtgggctcctcgagcccctccccaggaggcatgtccacgtgcctctccagccccctgtttgccaccgcggcggagctgggcgggtgggctgtgttcggctgggagagacggccctcggaggaaggtctatctttctgttgacgagaagaaactgaggtgttgccagccgaaatctgggcgctctgtggccgagagggcagctggccattgctgctgagggatggcggcctgtgcacgtggggcctgggctgctgggacttgcgctttgaggtccctgagcctggggtttccagggcaggaagggaggcatctagaaaggcgcatacacagctaaatgcatgatgggaagtgacaaagcgcaggcttcgggcattgccacgggaggcgggcattcgggggctgaagcggtggggctcagcagagggcactgtgctgagttttgaaggaggaggaggcctgtcttttcggaggatgcctggcagccttgtgtccatccgtcccttgtaaatgtggccatccaggcccaagatgtccacctcatcatgctgtagaagtgaacagataccgtcgccactgtagcagccacagccctcccctggccccttcacacgggacttcatggcaatctggatctcttcagtaggatacaggccccggggaaggtgctgcgggcggctgcggtggtaggggtaggtgagggtgctgagctccccgcagcgccggggcacagttgagtaggtgtaatcagccatatctgtcacccgtttgtagcagggggaagcccaggcactgggcgtgcagcagctcgcggattatctggctgctggccttggtggagcccccgaagtggatctgcaccttctcaatgttcatcagcatcttggagtgcatggagcgcaggcgccccacgctctgctccatctgcgccaggtcaccccgagggaaggcgctgcccagcttgaggctggaacccacagggctccaagagcagcctgaagtcctctgaactatggactcccatcccatatgtcccatatgctgtcccatagcatacttgcggctatgctgccggacctgctccagttcaaacaccgtgtaggggcggatggaatggtgcccaggtaggcctggacccgcgggggtcacggggatggcactccgcatggcagccgcctcgtctgcctggtagagtggggggcgctccctgagctgctgtcgcagcgatttccaccgatcctccagcaactgcttcactgggtccagctccaggcggtccagcttgttgtccatctctgtgagcagcctgtccagcatcttctgccagtcctgctcctgcccgctcatcttggccaccagctcctgcatcatgtggttcagctgctccgtggtggcatcaaactggacacggctcactttggtggccagagcactcttgtcggctttcacatcgatctccatctccaggtgctccctgttggccttttccttttcgagcttctccagaccgtggtacagcatagcaatgtccttctgtttctgccgatggtcctcgatgaggttgctggtggtgatgttgagcttctcgcagtcaccctgcacctgcaggatggcactctgcacacggcccagcagctcctcgtcctgtctctggagcttggccttcttggagggtcgggagacggccaggctgttgcccatgtcttggagttgctcatagcgccgcaccagcgtgctgtcttgatgaaaaaacaaacaaggctgcaggctggacaggtggcctcagggtcgatctggccaggagccaaggtgtgggccttgtgcggggccatgctcatggacaggagcgtggaggaggaggtcagcatgctctcaatgatcatcctgagcttgtccaactggtcctgcaggtaaagggaggcttcagagacagaattttccatggcagccttgcccctgtcttggctctccctcaactcggccagttccttttctatgtcagccgcggtgtctgtgagtacacccagttgcaatctcagatgtccagcgttcagttccttccctccttaatgattcccttctccttgcaggttcatatacagccgttcctcttggggtttctcccggcacacttctgtggccctcgtgccaaactatgcgtgtcgattcctcgctcc

SEQ ID NO: 122518 - DNA, 948 bp, Homo sapiens
atgaaatctctagaagaaaagattggatgcttgctgaaatttttgggtgatttagatgatcagacctgtaaagaagatttacacatcctcttctcaaatcatggtgaaataaaatggatagacttcatcagaggagcaaaagaggggataattctatttaaagaaaaagccaaggaaacattgggtaaagccaaagatgcaaataatggtaacctacaattaaggagcaaagaagtgacttgggaagtactagaaggagagctggaaaaagaagcacttaaaaaaataacagaagaccaacaagaatccctaaacaaatggaagtcaaaaggttgcagatttaaaggaaaaagaaagggtagtaaagctgcccagcctgggtctggtaaaggaaaagtacaatttcaggacaagaaaacaaagtttgctagtgatgatgcacatgatgaaaatggttcaactggacctatgaaaaagaggaagagaagaaacagacaaagaataacctgcatccaaacaaccgaaaacagaaaatgcttaaaagtgaagcaagttaggcctgtggaggctcagtttgaactccagcactgccttactaaatcatctcctccagaagaacagagaagttctctcttcaaggggtctctcaccaacagttttgagagcgaaattttcttcctagaagtgaatgggaattatctctctgtgaaaaaataccaatatgcttgtaaagagagaaaacaaggaaaagagatggagtcaggaggtgcttcttttgtgtctggaaggttggctgtgttttgtggagacttggaacaaggtgaggttggcagccctctccagagacgagcctttatccccagtcatccctcgctggtttctccagaggcccatgtggacaaggaggggccagagaaggaagtggggaggggaggattgcagagataa

SEQ ID NO: 122519 - DNA, 1645 bp, Homo sapiens
ccggcggcgctgggaggtggagtcgttgctgttgctgtttgtgagcctgtggcgcggcttctgtgggccggaaccttaaagatagccgtaatggctgaaaatggtgataatgaaaagatggctgccctggaggccaaaatctgtcatcaaattgagtattattttggcgacttcaatttgccacgggacaagtttctaaaggaacagataaaactggatgaaggctgggtacctttggagataatgataaaattcaacaggttgaaccgtctaacaacagactttaatgtaattgtggaagcattgagcaaatccaaggcagaactcatggaaatcagtgaagataaaactaaaatcagaaggtctccaagcaaacccctacctgaagtgactgatgagtataaaaatgatgtaaaaaacagatctgtttatattaaaggcttcccaactgatgcaactcttgatgacataaaagaatggttagaagataaaggtcaagtactaaatattcagatgagaagaacattgcataaagcatttaagggatcaatttttgttgtgtttgatagcattgaatctgctaagaaatttgtagagacccctggccagaagtacaaagaaacagacctgctaatacttttcaaggacgattactttgccaaaaaaaatgaagaaagaaaacaaaataaagtggaagctaaattaagagctaaacaggagcaagaagcaaaacaaaagttagaagaagatgctgaaatgaaatctctagaagaaaagattggatgcttgctgaaattttcgggtgatttagatgatcagacctgtagagaagatttacacatacttttctcaaatcatggtgaaataaaatggatacgacttcgtcagaggagcaaaagaggggataattctatttaaagaaaaagccaaggaagcattgggtaaagccaaagatgcaaataatggtaacctacaattaaaggaacaaagaagttgacttggggaagtactagaaggagaggtggaaaaagaagcactgaagaaaataatagaagaccaacaagaatcccctaaacaaatggaagtcaaaaggtcgtagatttaaaggaaaaggaaagggtaataaaagctgccccagccctgggtctggtaaaggaaaagtacagtttcagggcaagaaaacgaaatttgctagtgatgatgaacatgatgaacatgatgaaaatggtgcaactggacctgtgaaaagagcaagagaagaaacagacaaagaagaacctgcatccaaacaacagaaaacagaaaatggtgctggagaccagtagtttagtaaaccaattttttattcattttaaataggttttaaacgacttttgtttgcggggcttttaaaaggaaaaccgaattaggtccacttcaatgtccacctgtgagaaaggaaaaatttttttgttgtttaacttgtctttttgttatgcaaatgagatttctttgaatgtattgttctgtttgtgttatttcagatgattcaaatatcaaaaggaagattcttccattaaattgcctttgtaatatgagaatgtattagtacaaactaactaataaaatatatactatatgaaaagagcaaaaaaaaaaaaaaaaa

SEQ ID NO: 122520 - DNA, 597 bp, Homo sapiens
atgctcgacatcactaatgatcagggaaatgcaagtcaaaaccacaatgcgataccaccttactcctgcaagaatggccataatcaaaaaatcaaggccgggggtctgtggaccacagttcacagcctcctattgttccagttggaacagaggactcagcagggctatggcccaatcactcaccccaagacccctctccaccctccagcactgcttgcagtggatcgtggaagtcggtcctcggtgccagccacagactccctgcccagtgctcatgacagacagcagcagttccacacttgggtctgcagcaggctcctggcaacagtgagagcagacccagctgatgggcagcagccgcaggcgagggcggacgtgtgtgggtgtaggggaacgggttttattaacctcgtaatgatccacttaatgggctttgaagtcgggcgcatccagcagctagagcaggtggccccgaggccacagggtgtgagctgggaagtggactcctctgaccacctgcagggcagccccagagtggagcctccagggacctgggaccttcgagtgctctgctcgcagggccagtcggaaggctga

SEQ ID NO: 122521 - DNA, 939 bp, Homo sapiens
atgaatagccatttcttaaaagaagatatccaaatggccaataaacatatggaaaaatgctcacacattactaatgatcagggaaatgcaaatcaaacccacagtgcgataccaccttacttctgcaagaatgcccataataaaaaaatcaaaaaaatagtagatgttggcatggatgtggtgaacacggaacacttctacactgctgattatcctggttcctatattgttcgtcccagttctagtatcagacatttcttcaaagagcctgattcctttcagaatggtaggaaaacttacatctggctgctgaatgagcacattgtatcttctccctcattggcaatgctaggaagtatatcgcatggtctagctgtccgccagcctcgggtcctccttgcagccctcgccctggttttgtccgccttccctgcctcctcttctgggggagttagattgagttgtaacaagaacatgccactgtctcactggctgcagcgtgtggtccccttaccagaggtaaggaagagatggatctccactcatgttgtagacagaatgtttatgtcctctccaaattcttatgttgaaaccctaacccctaatgtgatggtatgtggagatgggcctttggtagtgaggatgcgaagagaaggtggctgtctgcaaccagaagagagccctcaccagaaaccggcagagctaagacttaggggactggcagactattgcaaaaagggcacggggcagagggactatgttgtgagcctgcgaaagaagtttgtgtggggactgtgggcagtgaacgcgttgggaacaatatggaaaactgggagccgccttggaatctacagggccggacagcagcaaaactctttgtgtatctgcgttcctttcaacaagtgtgacttcctcaatggcatcattcgtgagcgttaa

SEQ ID NO: 122522 - DNA, 645 bp, Homo sapiens; identical to SEQ ID NO: 115300

SEQ ID NO: 122523 - DNA, 1326 bp, Homo sapiens
atgctcaacatcactaatgatcagggaaatgcaaatcaaaaccacagtgcgataccgccttacttctgcaagaatggccataataaaaaaatcaaaaaaatagtagatgttggcatggatgtggtgaacacagaacacttctacactgctgtaacctatggaaagaaagaaatgtctcatatgtttctgcctaaattggtctttaatactttagcgattctcttgagtttggattataaaatagtttttggtctttttgtattttctgctgtaagcctgtatgattatgtaatgaagaattccgcgaggcggaggccgcacgagaaaaaaaaactcagaaaacccaacgacaggatcggagcacgaaagaacgagaagaagagcgagcaggggagagcgcgcggagtcagagaagagcaaaagcgaagacaaaagagaaaagagaaccagcccgaagaagaaaacggggcgggaacgcgaaagaaccgaggacgaaggtcgaggagggcctgcacaactacaaggcggcagagcgagggaaggcggacaaaagcacacagagcgccggcgccgccggcccatagaaacggaacggcggcgaggcgcaggaaaaacaagaggctaggggaggaccgagggcagaccgggcaagggacgcgagcgtgggggaaggctgaccaaggatgcaaacaaaggaaggagggggcaagaaggcagagaggaacgaaaagcggccagaaggacaggacaggtgcgaacaacagggacgaaaggcggggggagcgggagacgcagaaatcgagagcagtgagagataggaaaagaaacaaacggagccggcgagcgcagcgcgggtcaggagcagagcgaggctgcagcgggagcgaaccgggggccacgagacacaggacagaggaacaaacaccgaagcgggaagaccgacgacggacagagagcgaggaaacgaggagggaatcgggagacgggaagggcgggacggaaacgcgaacggcaaggaggcagatacggaaggaggagccgccggaggggagacaagaagccagagaagaaagagaagaaaagaaaacgggagagaggaagggagaggagaggagagaaaagaagaggacaagaagaagagaaagaagaacgaaaaaagagaaagaagaaacagagggcaaaggcacccataaccatgcataccacacgacaggcccccctcaccttgcctcctcccctctcactcttatgccagcccctgccattccccaccccctgtgtagactgcaagactcaacaagtgacttgctgagcaaaccctgctga

SEQ ID NO: 122524 - DNA, 496 bp, Homo sapiens
aactaaataagcttgtggtcaatgtttcatctttatcatgttacaacgttccgtaaaagcttgttaggacttttgttcttcttcagttttagaaaagtggttaatcccaaggacccaatgtgacctttgatgtactgaccctggaaagttaaatatggaatcactcaattactattctttttgtaaatttctaaacaccataaagcatttaatgaactggaattgataggtgaactgtgtcattttaataagcataatgtaatcacgtcatattttgttttgtttgcaggcagaaatttagataaggatatccttaaacagctgtttatagctactgtgacagaaacagaaaagcagtggacaacacatttcaaagaagatcaagtttgtacataacactagtggcatttcttatcaaaaggattggataataaaaataagtttctactgggaaaaaaaaaaaaaaaaaaaggcgcctcgggccgaaaaaaaaaaa

SEQ ID NO: 122525 - DNA, 1385 bp, Homo sapiens
  misc_feature (1)...(1385): n = a,t,c or g
tttatccccctgggaatttttatagtttcaggtcttaggtttangtccttaatccatcttgagctgattttttgtatagggctggacgttcgcttaggcaaggatttcatgaccaacaacctgaaaggaaatgcaataaaaacaaagataaatttctgggacttaattaaactaaagaatttttgcaaggcaaaaaggaatagtcagcagagcaaacagataacaaacagagtgggagaaaaccttcataatctgtacatctgacaaaggactaacatccagaatctacaacaaactcaaacaaatcagcaagaaaaaaacaaacaatcccatcataaagtgggctaaggatatgaatagacagttctcaaaagaagatatacaaatggccaacaaacatatgaaaaaatgctcaacatcactaatgatcagggaaatgcaaatcaaaaccacagtgcgataccaccttacttctgcaagaatggccataataaaaaaatcaaaaaaatagtagatgttggcatggatgtggtgaacacggaacacttctacactgctggaaaagaagtcattatacgaaaaagatacgtgcacacgcatgtttatagcagcacaattggcaattgcaaaaacgtggaaccaacccaaaggcccatcaatcaatgcgtggataaaggattggtgtcaatcaaagacaaatcacaacaagtgattgtcccgggtgtcccatgagcctctatgatctggaggagactccagtcgagctggaaggatgacactgagagaacaaatcgattggtcctccttgggcagaaatttaggataaggggatatcccttaaacagctgtttatagctactgtgacaggaaacaggaaaagcagtgggacaacacgtttcccaagaagatccaagtttgtacataaccactagaggcatttccttatccaaaaggattggataataaaaataagtttctactgggtaatattccaagcatttatttattactttagttaccgaattcccaatatactttaaaaatggtatttgttttacagcatacctaaaatggtagcaaatccggtactgtaaaacatttaacattcatacagttatatataatatccttttttttaaagaatggtatttcacaaaaatgtcttttgaaattggctttggagtttaccatatactgaacatgaaagtttataataatgatgatacaactttcaacattgtcattttttcttagaactttcagctgattgcaagagatataatgattacattgttattaaatttttttaacacaagtaaagtgacaccattttatgacatgaaataaaaggttatgactgtttattgatgttgatgttgacggcc

SEQ ID NO: 122526 - DNA, 1672 bp, Homo sapiens
tttttttttttttttttaccagtatagaaatttatttgaattcaaaataatatggctatatttataataatataataattatctaaagcaaatatcatcattggctctgaaatgcgtctaaagatgtcattcttaagtcaaaaaatacgttgggaagattgtccaagaaagaaaaaaatataaaaacaagtctgctgagtgtcgggaggtgggaggggatatccaccctttgtgggaggcggagcccaaataggaaacaatccaccaacaattctcctgctttatttccagctccctggaaaattaaaccaagtaacccctggtagttgcagtaaccattttggttgaacagggacaaacttcctgattggacacagattagtaattcacctggcatttccccttccgctaacttctctcttcacaccaattccttttctttccctttaaggatgggtttcatcctgttgacaaaagatttggttttatttggtaaagtaaagcagataatatcctgattgaagtattcaatgatttaggttgaggatgcttgggggatcaaactttgtaaaaaaggtccaattaacctagttagccagagactatccagtggcttgccagaaaaaaaattcggataatatgtttgttaaaaagacaaaaagaataagcggtgaaaaatccttagggattactgtgaccctagacaatccaaaagcaggataggtgacctttgattaaatcccatttacattgtggagtgagctaaaaggaggctcccaagacagagtttggttcccaacagtgtcccgtggccaaagggcacactcaaaagtgtctcctcctctcgtaggaactggaacacggaatgaagaagtctttctttgagtagccctttgcaacacatcatcctgtagatctgatgggccagactgcccaagaaggattgggctctttgtgctggtagcagagtcttgtgccaatcccagatccttaagccaatgaagtgttgttccaaaatccaccctgaatagttaattagccgagggaacgccatccatcactcccaggtacaggattataagtgtcacttgaccaacaccgtcctgagctcatattttaggattttagcccagtagttttgggtcaaagcccttaacctggattcccaagattcatagcttcagcagttccaatcatactaatagctaacagcatgttgttgcaagatctttgccgctggcaagatattgcctgactccagagacaaagccattgatggaaacaatccagaaacagggttctcatcgtccaggccttcttgctgcccagtcccaacagctccacagtacaccacgttggagcccatgcaccccagcaactcttgggcagcagcaaattcatcttcaactcctcccaccataaacgtgaggttcccagatcgtgcagctcctacacctgaatcatttgggggtaaagggatagaagcaaaagaatatattttttgttccttcttagtaatggctgtctgaatatctctggtcgttggaagtttactcatgtgtttacctcttcttgaatcaattttggtaacatttttttctagaaaatcacctatttcttctggactttccatttttctgcccacaaacttataattccttatttcatccat

SEQ ID NO: 122527 - DNA, 399 bp, Homo sapiens
tttttttttttttttttttgagacggagtctcgctctgttgcccaggctggagtgcagtggcgcgatctcagctcactgcaagctccgcctcctgggttcacgccattctcttgcctcagcctcctgagtagctgggactacaggcgtctgccaccacgcccggctaattttttgtatttttagtagagacggggtttcaccatgttagccaggatggtctcaatctcctgacctcgtgatccgctggcctcggcctcccaaagtgctgggattcagaaaaactcttttttttttttggagacaagagtttccgcttttgttgcccaggctggagtacaatggtgtgatctcggctcaccgcaacctccgcctcccgggttcaagtgattctcctgtct

SEQ ID NO: 122528 - DNA, 491 bp, Homo sapiens
cggccgccgctttttttgttttttttgagacggagtttcgctctgtcgcccaggctggagtgcagtggcgcgatctcgactcactgcaagctccgcctcctgggttcacgccattctcctgcctcagcctcccgtgtagctgggactacaggcgcgtgccaccatgcccggctaatttttgtatttttagtagagacggggtttcaccgtgttagccaggatggtctcgatctcctgacctcgtgatccacccgtctcggcctcccaaagtgctgggattacaggcaatgagttgatttttaactactgggtttaggccaggcaggcccaggcctggttttgggcctggcgctgggctgcctgtctttggttttacttccttgttgttttttcttaaaacaggtactgagtatcaaacaatataaaacaatataagaaggtctctctcttccctcaattctagctgcaagttttgagcactagacagcaga

SEQ ID NO: 122529 - DNA, 2248 bp, Homo sapiens
agttcctccatttatcgtttcttcgtcatgtcgggacgcggcaagcagggaggcaaagctcgcgccaaagccaagacccgctcttctcgtgccggtctccagttccccgtgggccgagtgcaccgactgctccgcaagggcaactatgctgagcgggtcggggccggcgcgccggtgtacctggcggcggtgctggagtacctgactgccgagatcctggagctggcgggcaacgccgcccgcgacaacaagaagacccgcattatcccgcgccacttgcagctggccatccgcaacgacgaggagctcaacaagctgctgggcaaagtcaccatcgcacagggcggtgtcctgcccaacattcaggccgtgctactgcccaaaaagactgagagccaccacaaggcgaagggcaagtaactatctgtactagtttgtggcagctcaagtaaaatcgagtccaaaccaacggctcttttcagggccacccacgtcttctctaaaagaacttaacatttattccatgtgaaagaaagtgagacatggacaagactctagtcataaattacccatctttttgaaaacagtgtagcgaacaccgcagatttaaaagaaaaactagagggaaggtggtccagattttaccacgcttaaaagttaagatgtgaacaaatctcttaggccattacttaattttaaacttaatcagtgtgtgtccacagagcaccagtggcttcgtgagttcttgaagcactttggcccaaaagagttatcgcccgggctagaatttagcagacagctgttccacgcgggccagggcggcatgaagaagtcccgccgctactggcccggcacagtggccctgcgcgacgttcggcgctaccagaactccgagctgctgatcagcaagctgccgctcctgcgagagctcggcggtgacgccgctgcacgagagcgaggctgaagaactttgtgacacaatagtccacctccctgcaaggctctgtcagagactcacatctttcctgatggatagctgtgaagcattctcttacccaccctactgcatgttgcaaagtattcctttaaaatgaagtgagtaaaatactgggatgacgttatctggagccaagaagatggctcatttggaaaggcctaatatcccaagttgcttacctagaagaacttgacaggatagttaataataaaccttaaaacccatgaagaaatctgaggtaaagtgttagcacacagactgttaaaatgtctgcctcacagataggagggaaaatatatagaggattataatatggttcaacaaatgttgatgagtattagaaatgtacattagaaatattagaaatgtttatgactattagaaaagtacagggtattgggcgttcctgacacaaactgaggcctcctagcaagactggcagttttctgtaaaggagggttatttactacggtagtgcaaataacttttggtgttgtagctaaataaggaatactcatgccaagatcatcgaattgtgcctcctccctctgttcactgaactctgatgtaattttttttttttttttttgagacggagtctcgctctgtcgcccaggctggagtgcagtgggcgctatctcggctcactgcaagctccgcctcccgggttcacgccattctcctgcctcagcctcctgagtagctggggctacaggcgtctgccaccatgcccagctacttttttgtatttttagtagatacggggtttcaccgtgttagccaggatggtcttgatgtcctgacctcgtgatccaccggcctcggcctcccaaagtgctgggattaccggcgtaagccaccacgcccggcccactctgaagtaatcttaagaagacgttaactcatttttcttgtgtattgtagacacttttggctgtctggtaacatggaaaatctcagaatgatgttttaagtatataaaatgcccaaacaaagttaaattacagttatcaaagtatttttaaaacttcatagtgataaatgagactatatagttatattgttaatatagttaacacattacatgatttggtgagcctaattgctgttactaattagaggagtaaaaatgtttcacgataactcagcaattgtaatgagaaatgaaacatctaatgtcttttgggttacaaagtaacaggtactgagatttgtggcctaaattcataataaagtgaaatgttcaagttc

SEQ ID NO: 122530 - DNA, 3309 bp, Homo sapiens
ggaagaggaggcttcatggctgaggaggtcgcagcgccatgaagtccctgtctctgctcctcgctgtggctttgggcctggcgaccgccgtctcagcaggacccgcggtgatcgagtgttggttcgtggaggatgcgagcggaaagggcctggccaagagacccggtgcactgctgttgcgccagggaccgggggaaccgccgccccggccggacctcgaccctgagctctatctcagtgtacacgaccccgcgggcgccctccaggctgccttcaggcggtatccccggggcgcccccgcaccacactgcgagatgagccgcttcgtgcctctccccgcctctgcgaaatgggccagcggcctgacccccgcgcagaactgcccgcgggccctggatggggcttggctgatggtcagcatatccagcccagtcctcagcctctccagcctcttgcgaccacagccagagcctcagcaggagcctgttctcatcaccatggcaacagtggtactgactgtcctcacccacacccctgcccctcgagtgagactgggacaagatgctctgctggacttgagctttgcctacatgccccccacctccgaggccgcctcatctctggctccgggtccccctccctttgggctagagtggcgacgccagcacctgggtaagggacatctgctcctggctgcaactcctgggctgaatggccagatgccagcagcccaagaaggggccgtggcatttgctgcttgggatgatgatgagccatggggcccatggaccggaaatgggaccttctggctgcctagagttcaaccctttcaggagggcacctatctggccaccatacacctgccatacctgcaaggacaggtcaccctggagcttgctgtgtacaaaccccccaaagtgtccctgatgccagcaacccttgcacgggccgccccaggggaggcacccccggaattgctctgccttgtgtcccacttctacccttctgggggcctggaggtggagtgggaactccggggtggcccagggggccgctctcagaaggccgaggggcagaggtggctctcggccctgcgccaccattccgatggctctgtcagcctctctgggcacttgcagccgcccccagtcaccactgagcagcatggggcacgctatgcctgtcgaattcaccatcccagcctgcctgcctcggggcgcagcgctgaggtcaccctggaggtagcaggtctttcagggccctcccttgaggacagcgtaggccttttcctgtctgcctttcttctgcttgggctcttcaaggcactgggctgggctgctgtctacctgtccacctgcaaggattcaaagaagaaagcagagtgagggcactcactgccatcctgtggaagccaccatcatctctggcccaagcttctgtagtagctccctaaaataataccctatcatctgctcctaatccctccaatctctctccactgagtgctggaatgccttttttttttttctttcacttatataagggataattttttcctttttttttttttttgagacggagctcacctcttccgcccaggctgcagtgcagtggcatgatcttggcttactgcaacctccgcctcctgggttcaagcaattctgtggcttcagcctccggagtagctgggattacaggcacatgccaccacacccagtgaatttttgtatttttagtagagacggggtttcaccatgttggccaggctggtcttgaattcctgacctcaggtgatctgcccacctcagcctcccaaagtgctgggattacaggcgtgacgaccacaccaggcccgagaaatgcttttttaaaaaacacacatcttatggcattcaccttcttggagctctaggaacgtggttctcaatttttctctcaggactcttaaaaatcatcaaggtaccccaaaaagcttttgggtatgtgggttatagctatcaatatttatggtactagaacttaaaagtgagaaaaatttaaaacacgagaatacataggcacacattctattcatcgtgggaaccatggtgtcaatacatatcatgtagcttctgaaaaactccactgtacacttatagaatgaagaaggcaaaaaactttttttttttttttttgagacgggagctcgcctcctgtggcccaggctggagtgcagtggcgggatctcggcttcactgcaaagtccgcctcccgggttcacgccattctcctgcctcagcctctctgagaagctgggactacagggcgtcctgccaccatgcctggctaatttttttttgtatttttttagtagagacggggtttcaccgtttttagccgggatggtctcgatctcctgacctcgtgatcaggcccgcctcggcctcccaaaagtgctgggattacaggcgtgagccaccgcgcccggcctgaaaataatctttctttttttctttttttctgagacagagtctcgctctgttgcccaggctggagtgcagtggcacgatctcggctcacggcaccgtccgcctcccgggttcacgccattctcctgcctcagcttcccgagtagctgggactacaggggcccgccaccacgcccggctaactttttgtgtttttagtagagacggggtttcaccgtgttagccaggatggtctcgatctcctgaccttgtgatctgcccgcctcggcctcccaaagtgctgggattacaggcgtgagccatcgtctgcgcttctatttcgatcaccaagatgtggctccggaatgcggggcttacttcttccatgaattggccaaggagaagcgcaagggtgttgagcgtctcctgaagatgcaaaaccagcgtggtggccctgctgtcttccaggacatcctgaagccaggtcaagatgagtggggtaaaaccctggaagccatggaagccgccatggccccggggaaaaatctcaaccagagtcttttggatcttcatgcactgggttccgcccctacagacccccatctctgtgacttcctggagagtcacttccgagatgaggaagttacctttatgcctcggaagagtgcagacctccatgcagcgggtgaggctgccagcctaggtggggtgtcattgaatgtcatgaagggagccagccttcatgcactctgcctgcgtctcctgaacagctttggaccaggagttgctaccttgtgcggagaacgtgtggtgcataagaacaaccgagcctctgctcttcgaaaatgtatattctggccag

SEQ ID NO: 122531 - DNA, 2271 bp, Homo sapiens
atggccgggcctccgagcggcccagggcggccggaagtttgcggggcggggcggacgcgggtggccaaggcccgtttccggcggcgtcgcgcgtttgcgagcctcgggtggtcctcagggagggaggtggtaacatttggcgatgtggctgtgcacttctctcgggaggagtggcagtgtctggaccctggccagagggccctctacagggaagtgatgctggagaaccacagcagtgtggctggactagttgggggaaccctgaaggaagcttctaaacagaggccttggctggcccatggatcaactgctcatctctgtactgaccggcacaaagaggcaggattcctggttttcaagcctgagctgatctctcggctggagcagggagaagagccatgggtcctcgacctgcagggagcagaggggacagaggcaccaaggacctccaagacagattctacgattaggactgaaaatgagcaggcctgtgaggacatggacatcctaaaatcagaatcctatgggacagtggtcagaatctccccacaggactttcctcagaatcctggctttggagacgtttctgattctgaggtctggttagacagtcatctgggcagtcccgggctgaaagtgacaggctttaccttccaaaataactgtttgaatgaggagactgtggttcccaagaccttcaccaaggacgcaccccagggatgtaaggagctgggaagcagcggcctggattgtcagcctcttgaaagtcagggagagagtgcggaagggatgtcccagagatgcgaggagtgtggcaaaggcatcagagccacttcagatatcgctctgcattgggaaattaatacacagaaaattagcagatgtcaagaatgccaaaaaaagttatctgactgcttgcaggggaaacatacaaataactgccatggagagaagccgtacgaatgtgcagagtgtgggaaagtcttcaggctctgctcgcagcttaatcagcatcagagaatccacacgggagagaaaccctttaaatgcactgagtgtggaaaagccttccgcctgagctcaaaacttattcagcatcaaagaatccacactggggagaagccctacagatgtgaggaatgtggaaaagcttttggtcagagctcaagcctcatccaccatcagagaatccacacaggagagaggccctatggttgtcgtgagtgtgggaaagccttcagccagcagtcgcagctggttagacaccagagaactcacactggggagaggccctacccttgcaaggagtgtgggaaggccttcagccagagctccaccctagcccagcatcaaaggatgcatactggggagaaagctcaaattctaaaagcctcagacagtccaagccttgttgcacatcagagaattcacgctgtagagaaaccatttaagtgtgatgagtgtgggaaagcttttaggtggatctctcgcctgagtcagcatcagctgattcacactggagagaagccttataaatgcaacaagtgtacaaaagcctttggttgtagttcacggcttattcgccatcagagaactcacactggagaaaaaccatttaaatgtgatgagtgtggcaaaggctttgttcagggctcacaccttattcagcatcagcgaatccacactggagagaaaccctatgtgtgtaatgactgtggaaaagccttcagtcagagttccagccttatttaccatcagagaatccataaaggagagaagccctacgaatgcctccaatgcggaaaagccttcagtatgagcacacagcttacaatacatcaaagggttcacactggagagaggccctataaatgtaatgaatgtgggaaagccttcagtcaaaactcaacccttttccaacaccagataattcatgcaggggtgaagccctatgagtgcagtgagtgtggaaaagccttcagccggagctcatatcttattgaacaccagagaatacacactagggcccagtggttttacgaatatgggaatgccctggaagggtccacctttgtgagccgtaaaaaggttaatactataaagaaactgcatcagtgtgaagactgtgagaagatatttaggtggcgttcacacctaattatacaccagagaattcacaccggggagaagccttataaatgcaatgactgtggcaaagcttttaatcgtagctcaaggcttacccagcatcaaaaaattcacatgggatag

SEQ ID NO: 122532 - DNA, 2660 bp, Homo sapiens
atggccgggcctccgagcggcccagggcggccggaagtttgcggggcggggcggacgcgggtggccaaggcccgtttccggcggcgtcgcgcgtttgcgagcctcgggtggtcctcagggagggaggtggtaacatttggcgatgtggctgtgcacttctctcgggaggagtggcagtgtttggaccctggccagagggccctctacagggaagtgatgctggagaaccacagcagtgtggctggaataggtgaggatgcaccttggggccccttcccctgcatcatcagtcagcacccacccagccaggcctccatcagagggccctgtgtgtacacagttgctgatgtaccagtaactggaattgcagtcattcccccagcagcagtttgcttctccaggctcaaagattgtgacaccaggactgaagacaaggagtttcttcacaaggaagacattcatgaagatttggaatcacaggcagaaatatcagaaaactatgctggtgatgtttcccaggtacccgagcttggagatctgtgtgatgatgtatcagaaagagactggggagtccccgaaggcaggaggctgccacagtccctctcccaggagggggacttcacaccagctgccatggggctccttaggggccccttaggggagaaagatctggactgtaatggttttgacagtcgcttcagtctgagcccaaacctgatggcatgtcaggaaatccctacagaagagaggccacatccatatgacatgggtggccagagtttccagcacagtgtggacctaactggtcatgagggggttcccacagctgaaagtccactcatatgtaatgagtgtgggaaaaccttccaaggaaatcctgaccttattcagcgtcaaacagtcccacactggggaggctttcttttatgtgtgatgattgtgggaaaaccttcagccagaactcagttcttaaaaaccgtcatcgatctcatatgagtgagaaagcttaccagtgcagcgaatgtgggaaagccttccgagggcactcagacttttctaggcatcagagtcaccacagcagtgagaggccttatatgtgtaatgaatgtggaaaagccttcagccagaactcgagccttaaaaagcaccaaaaagtctcacatgagtgagaagccctatgaatgcaatgaatgtgggaaggcttttagggcggagctcaaacctcatccaacatcaaagaatccattctggggagaaaaccgtatgtgtgcagtgagtgtgggaaggccttcaggcgaagctcaaacctcatcaaacaccacaggactcacacaggagagaagccttttgagtgtggctagtgtgggaaagccttcagccagagtgcacacctgaggaagcaccagagggtccacactggagagaagccttatgagtgtaatgattgtggcaagcccttcagtcgggtctccaacctcattaagcaccacagggttcacactggagagaagccctataaagtccagtgcctgtggaaaagcatttagtcagagctccagccttattcagcatcggagaattcacactgggagaaaagcctcacgtgtgtaatgtatgtgggaaaagcctttagttattagcttcagtgctccgaaagcaccagattcatccacacggggagaggaaggccgtacagatgcagtgtctgtgggaaggccttcagccacagctcagccctcattcagcaccagggcgtgcacacaggcgacaagccctacgcctgccacgagtgtgggaagacctttggtcgcagctccaacctcatccttcaccagcgagtccacactggagagaagccctatgaatgtactgaatgtggaaaaaccttcagccagagctcaaccctcattcagcatcagaggattcataatggggctgaagcccccataaatgtaaccagtgtggtaaagccttcaactcaaagctccaaattttccattcacccccaaaaagttcatattggggaaaaaaccctccccttgtgttgaatgtggtaagggtttcagccaaagctcccacttctttcagcatcagatacatccacacgggcgaggcgcccctacaaatgcagtgagtgtgggaaagccttcagtcagcgttcggtcctcatccagcaccagaaggattcacactggggtgaagccctatgactgtgctgcttgtgggaaaaccttcagcccaacggatcaaagttggatcaaacaccagttgattcacacccagggaataggctgttgggctggcaggaattgaaaccgagcatagtttcctctccaactcctctttggcccattgtctcagcctctgcccacttcccagaccgaaagcctggactcagctcactgcctacatccagtggccgcatagccctgggaccctcctttgaaacatcctttacaggctcccttctcactgccactgctcttgcctcttgtgatgtcttgggtttgggcttgtttttacagcttgtgaacggactgcacgtttgttacaagggagaagattatggagggctgcatattcatgaatagggttttttattataatgaaaagttcccaaaaaagtaaagtgacgtttggtttgagaaaaaaaaaaaaaa

SEQ ID NO: 122533 - DNA, 458 bp, Homo sapiens
  misc_feature (1)...(458): n = a,t,c or g
ccccaattgagtacattacattaggccgngcggnggaacgcgcggtctttgtctcttgctgccgctggagctccagatctcttgttcactgctctgtgttctctgctcatagaggcccagcctttgaggccctttgacctgcaggtattgggagatccacagccaagagccaggaccccctagaagtctagaaatgccagaactgatcacctgtctggagcaaggaaaaaaacctctgaccgtgaagagacatgagatgattgccaaacccccnnnnnnnnnnnnnnnnnnnnnnnnnnnnnnnnnnnnnnnnnnnnnnnnnnnnnnnnnnnnnnnnnnnnnnnnnnnnnnnnnnnnnnnnnnnnnnnnnnnnnnnnnnnnnnnnnnnnnnnnnnnnnnnnnnnnnnnnnnnnnnnnnnnnnnnnnnnnnnnnnnnnnnnnnnnaagcgtacattatg

SEQ ID NO: 122534 - DNA, 409 bp, Homo sapiens
  misc_feature (1)...(409): n = a,t,c or g
aaatgaaagggggagtaatgggagataccccatactttcaataagtagcctccaggcattcccttccaccagaggagcaattgttttttaaatagccctttggcgcccagtctattactaaaccatatgagtcattttttaatattactgcatgtgagttaacatagtcttcccaaattaaagttttagatgggccctcaaaatttttagggcatggttttcctgcaggtttatatggaaagtatnnnnnnnnnnnnnnnnnnnnnnngtggcctacactgcctttcagtttacctaggcctccaaagcactttagcctgtggggcttgccagaactcgggttccagctgctggaatggacagttcccctctggctagggttgatctaatgttccctctgggttactgg

SEQ ID NO: 122535 - DNA, 429 bp, Homo sapiens
gcgtccgcggacgcgtgggcgcggcctttgtctcttgctgccgctggagctccagatctcttgttcactgctctgtgttctctgctcatagaggcccagcctctgaggccctttgacctgcaggtattgggagatccacagccaagagccaggaccccctagaagtctagaaatggtattgttctctccaagccagaactgatcacctgtctggagcaaggaaaaaaacctctgaccgtgaagagacatgagatgattgccaaacccccaggtaggtgcaagtgaaaatgaatacaacagatgacacaaatgagaggtcgcaacatccaagagaaggccagtccttaaaatgtgacctgggaagctgtgttctaaaggaaatagttcctgggcagctgttttttgtttgtttggttggttggctgggtg

SEQ ID NO: 122536 - DNA, 1456 bp, Homo sapiens
atgcatgaggaggaaggggaaagtggagattctcgtgtgtatatgtctactcaatgcacacatgttactctgaataagtttctgggcttcatagtatctgaatcagtttcaggtctgaacatacaagagtccatgaaagaggtactgagggggcagagccttaagcataatccaatcagggaggctggtctggaaaccctccaatcaggcaggcagctggagcgaagaggacggctttctggtatggcgcggcctttgtctcttgctgccgctggagctccagatctcttgttcactgctctgtgttctctgctcatagaggcccagcctctgaggccctttgacctgcagacaactctgactgcagctgaatgccattatacaggcaaaaaattctccctaaatgaaggcaagccagtgttacggaaaaactcccaaaccaatacctgggaacctggaacaattataacatggggaagagggtatgcttgtgtttcaccaggagatcaatcccctgtctgggtgcccactgagagactcaaacttcgtgtgaatagtgacaaagaaagccacagggaaaagacatccaagtcagagaccgccttcatacctgcacaggatcttgcttacaataggttttatttaataattctcctccttacactttctgtctcaccagtttcccctcaaactgatttacctgctacataaaattattcttattgggcttatgtgccttttcctccacttattcgacctctcacctggatggatgctcctgcagaaatctatactaacgatagtgtatatatgcctggagctacagatgaccattgccccactcgaccaagagaagaaggcactgcatttaatgttactatgggttataaataccctcctctgtgccttggacatgcacatgtagatggttgtattcatctacaagctcaaatctgggctgcttatcttccggagagattagctacaagagaacagggacatttgatctccagcctctctctttctcctttaagacaaatgaaagggggagtaataggagataccccaaactttcaatataaacctgtaggaaaaccatgtcctaaaaattttgagggcccatctaaaattttaatttgggaagactgtgttaactcacatgtagtagtactaaaaaatgacgcatatggtttagtaataggatgggcaccaaagggctattttaaaaaacaattgctcctctggtggaagggaatgcctggaggctacttattttatttctcattgggaggacaaggatcatcatcctactttgcataggagggtcagctcattctttcccttataatgggaagataagggcattacccctccgaggcctcatatgatattccccattctgagcctggaacactcagaactttggaaattggctattgccatgtctggactgtga

SEQ ID NO: 122537 - DNA, 1394 bp, Homo sapiens
tcctctactgctgcaccgtgggtaaggggtggctgccaagcttgctaggcggagcctgcgccaacccatctccctcctcccccctctactgcgccacaaccggaaaggaacagctgctgtatcagccagcaatcattcagcgtcccttagtcactccagacagcgacaggccccgcggtcgccatgcccaccgcctccatgccatgcccaccgccgccatgcctaccgccgccaaagtccaccaccgccatgcctacccgctgccaatgcccaccgccgccaatacccactgtcgccgccttccccctacctcccagccacttcctacggactctccccgcgccgcgaccaccaacacaacccccaccactgtcacaccgactcatccccctgaacaaaggactttagggcccaaattccgtttatttagtactccaagtcctaaaaacttggaatatctgatgaataaaagtggccgctccccaggctgtctcttgagagaagccaccggcacagctgaccttgcccgctccatcgcgtcactgaccgctcctcagacagatgcgtcaggcatctccggcggccgctccactctgcgccagactcgctgcagcagcggcaggcttcgcacacatccccgcctgagcatgcgcgccagcctgcctctgcggccgcgcaggcgtgcttgtttgccgcagtgcagggacaaggaacttctaattaccaagcggaaataccgaaagaagaaggattttgctgcaggtctagaagatgtcacagaatttcaaggaagagaggagaacccgcgtcatacctttatctatagccttcccctaggtcttcagaagcatcaagttttaactgtggacattggatttggtggaacagcaatcatgactggcattgctcgggtaccacttgctggagctgctggaggccctggggttggtagggcagctggtagaggagtaccagctggtgtgccaattccccaggcccctgctggattggcaggccctgtccgaggagttgggggaccatcccagcaggtaatgactccacagggaagaggcactgtagcagctgctgctgttgctgcgactgccagcattatggctcctccacctggtatgagaccacccatgggcccaccaattgggcttccccctgctcgagggacgccaataggcatgccgcctccgggaatgagaccccctccaccaggcattagagattgcggtggaagtctaaccccccttggagatgtctgccttaaagggtctttggccagggtcctctgtagagccatagtccagatctactctatttgtgtgctccttacaacatcagaacagcaactctcaatccggattcatccccagaatgccgtctga

SEQ ID NO: 122538 - DNA, 752 bp, Homo sapiens
tcctctactgctgcaccgtgggtaaggggtggctgccaagcttgctaggcggagcctgcgccaacccatctccctcctcccccctctactgcgccacaaccggaaaggaacagctgctgtatcagccagcaatcattcagcgtcccttagtcactccagacagcgacaggccccgcggtcgccatgcccaccgcctccatgccatgcccaccgccgccatgcctaccgccgccaaagtccaccaccgccatgcctacccgctgccaatgcccaccgccgccaatacccactgtcgccgccttccccctacctcccagccacttcctacggactctccccgcgccgcgaccaccaacacaacccccaccactgtcacaccgactcatccccctgaacaaaggactttagggcccaaattccgtttatttagtactccaagtcctaaaaacttggaatatctgatgaataaaagtggccgctccccaggctgtctcttgagagaagccaccggcacagctgaccttgcccgctccatcgcgtcactgaccgctcctcagacagatgcgtcaggcatctccggcggccgctccactctgcgccagactcgctgcagcagcggcaggcttcgcacacatccccgcctgagcatgcgcgccagcctgcctctgcggccgcgcaggcgtgcttgtttgccgcagtgcagggacaaggaacttctaattaccaagcggaaataccgaaagaagaaggat

SEQ ID NO: 122539 - DNA, 1371 bp, Homo sapiens
gaagcgtgcctgctgctgcatgcagagtctggcgcagagtggagcggcccccggagatgcctgacgcatctgtctgaggagcggtcagtgacgcgattggagcgggcaagggatcgcttacacctgagacgaactacagaacagcacgtaccagaggtggaagtccaagtcaaacgcagaaggactgcctcactgagcaaccaagagtgtcagttgtacccgaggcgttctcagcagcagcaaagtacctgtggtgggatttccaggctgaactgaggcaggcattcttagctgagacaccaagaggtggttaaagccatattgtgagttagcgaggaatctgatttccaagcaaaaaccaggctccattctactctttgaagcttctgccccagcttgcatttgtttcttaggggaacccgcgtcataccttttatctatagccttcccctaggtcttcagaagcatcaagttttaactgtggacattggatttggtggaacagcaatcatgactgttggcaagagtagcaagatgctgcagcacattgactatagaatgagatgtatcctgcaagatggccgaatcttcattggcacctttaaggcttttgacaagcatatgaatttgatcctctgtgattgtgatgagttcagaaagatcaagccaaagaatgcgaagcaaccagagcgtgaagaaaagcgggttttgggtctggtgttgctgcgtggggagaacttggtatccatgactgtggaggggccaccccccaaagatactggcattgctcgggtaccacttgctggagctgctggaggccctggggttggtagggcagctggtagaggagtaccagctggtgtgccaattccccaggcccctgctggattggcaggccctgtccgaggagttgggggaccatcccagcaggtaatgactccacagggaagaggcactgtagcagctgctgctgttgctgcgactgccagtattgctggagccccaacacagtacccaccaggacggggcactccgcccccacccgtcggcagagcaaccccacctccaggcattatggctcctccacctggtatgagaccacccatgggcccaccaattgggcttccccctgctcgagggacgccaataggcatgccgcctccgggaatgagaccccctccaccaggcattagaggtccacctcccccaggaatgcgtccaccaagaccttagcatactgttgatccatctcagtcactttttcccctgcaatgcgtcttgtgaaattgtgtagagtgtttgtgagctttttgttccctcattctgcattaataatagctaataataaatgcatagagcaattaaactgtg

SEQ ID NO: 122540 - DNA, 1266 bp, Homo sapiens
atgctgatgcagtgggagggcctgggggtcctggaatggcaggctgcgatggcctccctggaggctttggcagtgacatcaggccaaggttgtggctgtggctggggccaaggctctggagctcatagaggggcactaagcatcatcttggcctctgtgcccaagaagctgctgctgatggctgctacgccttggccagggaccgcactgccaccctgggccacctttgatgccatctctaagactgctagcaactggatccctgacctctggaaagagactgtattcaccaagtttccctaccaggaattcactgaccatctctcaagacccacaccagagtctctaagcagaagacgcaggttccagctgtggctacaacggccgcccgtcagaccatggagggacaggccccagtcgagtatatatgacccttttgcgggaatgaaaacgccaggccagcggcagcttatcaccctccaggagcaggtgaagctgggcattgtcaacgtggatgaggctgtgctccacttcaaagagtggcagctcaaccagaagaaacgatcggagtcctttcgtttccagcaggctgcttccttcaaagtactagccaggcccgaccctgcttaccctcagagatcagatgggattgggcgcgttcagggtgttatggctatagaccctggtgacttggagatcacggtcccaattcggcactcacagcacctgcctgcaaaagtggagtttggagtctatgagagtggccccaggaaaagtgtcattccccctaggacggagctgagacgaggagactggaaaacagacagcacctccagcacagcaaattctggctgtgactcagtcactgacactgagcctgaggacgagaaggttgtttcctactcgaagcagcagaacctgccgacggtgacttcacctgggaacctgatggtggtgcagccggaccgcattcgctgtggggttctgcagtcggtccctgcaacactgggtggacaaaatgtgaaggtggagcagtgtgtcaccatggatgctcatgatccatccaaagtggagtaccttcatagagttaattctcacaataataacttcaaagatgaagaaactgagacccctggagccatagttgggctggtagccaatgctgatgaaatagcagacacaagccgtggggtaattctagattttgcaaaagagaaattttttgaagttgatgaaagtgatgttggaaaactgtatcacaagtaa

SEQ ID NO: 122541 - DNA, 986 bp, Homo sapiens
ggaattcccgggtcgacgatttcgactggcttcctaagtcacggctcagctaagagattgaggaaaatgtccgtgaaaggagcgaccccgaagccagagccagagccagagcatgtcataaaaaactacacggaagagctgaaagtgcccccagatgaggactgcatcatctgcatggagaagctgtctgcagcgtctggatacagcgaagtgactgacagcaaggcagtcgggcccctggctgtgggctgcctcaccaagtgcagccacgccttccacctgctgtgcctcctgaccatgtactgcaacggcaataagggccctgagcaccccaatcccggaaagccgttcactgccagagggtttccccgccagtgctaccttccagacaacgcccagggccgcaagcctccaggggcttccagaacccggagacactggctgacattccggcctccccacagctgctgaccgatggccactacatgacgctgcccgtgtctccggaccagctgccctgtgacgaccccatggcgggcagcggaggcgcccccgtgctgcgggtgggccatgaccacggctgccaccagcagccacgtatctgcaacgcgcccctccctggccctggaccctatcgtacagaacctgctaaggccatcaaacctattgatcggaagtcagtccatcagatttgctctgggccagtggtactgagtctaagcactgcagtgaaggagttagtagaaaacagtctggatgctggtgccactaatattgatctaaagcttaaggactatggaatggatctcattgaagtttcaggcaatggatgtggggtagaagaagaaaacttcgaaggcttaatgatgtcaccatttctacctgccacgtctcggcgaaggttgggactcgactggtgtttgatcacgatgggaaaatcatccagaagaccccctacccccaccccagagggaccacagtcagcg

SEQ ID NO: 122542 - DNA, 384 bp, Homo sapiens
  misc_feature (1)...(384): n = a,t,c or g
ctggctgccttctcctgagagtcggagccatagccagagccctgcccaggccgagccggagctgcagcccgagcgcggtggtgccctcagccccgtcctcttgtcctcctcagcctcggtgccttggaatttgtgtcgctgagtcagcaagcctttcagatttgcccggtttttgttgtttgtggtttgtatcaagatgggaactcaaacaagtcattcctcctaaggagctggtgtcttcatccagaagggacagtttgtgccagctctccagagagaaaaggatctggcactgttctggagtggcctgtancatacactgaaccaccagccagctgcatttgttgtcctggaagtcattgccaactctgccagtcacactgg

SEQ ID NO: 122543 - DNA, 857 bp, Homo sapiens
atgggtttagactggattattcgctttgtggcggtcttcttacatcatgccagcttcttcgtggggagaggcaggacgctgcttatgtacttctctcttctaggagcgaccccgaagccagagccagagccagagcaggtcataaaaaactacacggaagagctgaaagtgcccccagatgaggactgcatcatctgcatggagaagctgtctgcagcgtctggatacagcgatgtgactgacagcaaggcagtcgggcccctggctgtgggctgcctcaccaagtgcagccacgccttccacctgctgtgcctcctggccatgtactgcaacggcaataagggccctgagcaccccaatcccggaaagccgttcactgccagagggtttccccgccagtgctaccttccagacaacgcccagggccgcaagagctggtgccctacacaccacagataacagcttgggacctggaagggaaggtcacagccaccaccttctccctggagcagccgcgctgtgtcttcgatgggcttgccagcaccaacgataccgtctggctcgtggtggccttcagcaatgcctccaggggcttccagaacccggagacactggctgacattccggcctccccacagctgctgaccgatggccactacatgacgctgcccgtgtctccggaccagctgccctgtgacgaccccatggcgggcagcggtggtgcccccgtgctgcgggtgggccatgaccacggctgccaccagcagcccttctgcaacgcgcccctccctggccctggaccctatcggtgggtggtccccaccggagccctgggactggggctgtgcttggggtag

SEQ ID NO: 122544 - DNA, 1278 bp, Homo sapiens
cccacgcgtccgcttgtcctgagagtcggagccacagccagagccctgcccaggccgagccggagctgcagcccgagcgcggtggtgccctcagccccgtcctcttgtcctcctcagcctcggagcgaccccgaagccagagccagagccagagcaggtcataaaaaactacacggaagagctgaaagtgcccccagatgaggactgcatcatcttcaatggagaagctgtccacagcgtctggatacagcgatgtgactgacagcaaggcaatcgggtccctagctgtgggccacctcaccaagtgcagccatgccttccacctgctgtgcctcctggccatgtactgcaacggcaataaggatggaagtctgcagtgtccctcctgcaaaaccatctatggagagaagacggggacccagccccagggaaagatggaggtattacggttccagatgtcgctccccggccacgaggactgcgggaccatcctcatagtttacagcattcccccatggcatccaggggcctggagcaccccaatcccggaaaagccgtttcactgccagagggtttccccgcccagtgctaccttccagaacaacgcccagggcccgcaaagtccttaagagctccctgaaggtgggcctggaagaaggcggctcatcttcacagtggggcacgtcccagcacctacgggtgagacggacaccgtggtatggaacgagattccaccacaagacagagatggaccgcaacattacgggccacggctatcccgaccccaactacctgcagaacgtgctggctgagctggctgcccagggggtgaccgaggactgcctggagcagcagtgacctcgcaccccaggcacgccccgcctctggtggccaccccgctgccccatggctggctgggtggccaggcaggaagtgccccagcccgaagaggctggaaggttttttaaaggttgtgggttgtcccccacttgaagccggggctccccttgcctgccctctctctcctcctccccctctgggaagttgggcagccctgggcagttgtaatcatggggggttaaaaatccagctacctcagtgcgcagggcccgtctgtcctctgggggctgcttcgtggcacgcggtgctcggggcctggtgtggggcgagtagagacttccccagcctggacgggcgtgggttctgggtcaagcttcttttacctcaattttgtttgcaataaatgctctatagccaaagccaaaaaaaaaaaaaaaa

SEQ ID NO: 122545 - DNA, 4656 bp, Homo sapiens
atggaatactatgcagccatagaaaatgatgagttcatgtcctttgtagggacatggatgaaattggaaatcatcattctcagtaaactatcgcaagaacaaaaaaccaaacatcgcatgttctcactcatagattttggtttcagtaacctcttcactcctgggcagctgctgaagacctggtgtggcagccctccctatgctgcacctgaactctttgaaggaaaagaatatgatgggcccaaagtggacatctggagccttggagttgtcctctacgtgcttgtgtgcggtgccctgccatttgatggaagcacactgcagaatctgcgggcccgcgtgctgagtggaaagttccgcatcccattttttatgtccacagggctggtacccgagctggacaaaagactgaaggcaggctgtttgtccattgcagaatgtgagcatttgatccgccatatgttggtgttagatcccaataagcgcctctccatggagcagatctgcaagcacaagtggatgaagctaggggacgccgatcccaactttgacaggttaatagctgaatgccaacaactaaaggaagaaagacaggtggaccccctgaatgaggatgtcctcttggccatggaggacatgggactggacaaagaacagacactgcagtcattaagatcagatgcctatgatcactatagtgcaatctacagcctgctgtgtgatcgacataagagacataaaaccctgcgtctcggagcacttcctagcatgccccgagccctggcctttcaagcaccagtcaatatccaggcggagcaggcaggtactgctatgaacatcagcgttccccaggtgcagctgatcaacccagagaaccaaattgtggaggcaagtagcaacctgtgggagctgtcagctgaaaccactttctttgccatatccttgcttcccttccttctgatttctaactcgatgccggatgggacactgaatttggacagtgatgagggtgaagagccttcccctgaagcattggtgcgctatttgtcaatgaggaggcacacagtgggtgtggctgacccacgcacggaagttatggaagatctgcagaagctcctacctggctttcctggagtcaacccccaggctccattcctgcaggtggcccctaatgtgaacttcatgcacaacctgttgcctatgcaaaacttgcaaccaaccgggcaacttgagtacaaggagcagtctctcctacagccgcccacgctacagctgttgaatggaatgggcccccttggccggagggcatcagatggaggagccaacatccaactgcatgcccagcagctgctgaagcgcccacggggaccctctccgcttgtcaccatgacaccagcagtgccagcagttacccctgtggacgaggagagctcagacggggagccagaccaggaagctgtgcagaggtacttggcaaataggtccaaaagacatacactggccatgaccaaccctacagctgagatcccaccggacctacaacggcagctaggacagcagcctttccgttcccgggtctggcctcctcacctggtacctgatcagcatcgctctacctacaaggactccaacactctgcacctccctacggagcgtttctcccctgtgcgccggttctcagatggggctgcgagcatccaggccttcaaagctcacctggaaaaaatgggcaacaacagcagcatcaaacagctgcagcaggagtgtgagcagctgcagaagatgtacggggggcagattgatgaaagaaccctggagaagacccagcagcagcatatgttataccagcaggagcagcaccatcaaattctccagcaacaaattcaagtaggccctcactctttgctttctccaacttgtttggagtttgctttcaggctgatttgcctgtgcattttggaggagaccactcagtgcaaagtggatttgaggttaaggattcagccttcaagcccaccccccaaccaccccaacaaccatctcttcaggcagcccagtaatagtcctccccccatgagcagtgccatgatccagcctcacggggctgcatcttcttcccagtttcaaggcttaccttcccgcagtgcaatctttcagcagcaacctgagaactgttcctctcctcccaacgtggcactaacctgcttgggtatgcagcagcctgctcagtcacagcaggtcaccatccaagtccaagagcctgttgacatgctcagcaacatgccaggcacagctgcaggctccagtgggcgcggcatctccatcagccccagtgctggtcagatgcagatgcagcaccgtaccaacctgatggccaccctcagctatgggcaccgtcccttgtccaagcagctgagtgctgacagtgcagaggctcacagttctctgtaccagtgggttctccctactgaggaggaggagctgttcccaggaagtctagtacttgttacatggatgtctggtactcccttttgtgtctgcagcttgaacgtgaatcggttctcccctgctaactacgaccaggcgcatttacacccccatctgttttcggaccagtcccggggttcccccagcagctacagcccttcaacaggagtggggttctctccaacccaagccctgaaagtccctccacttgaccaattccccaccttccctcccagtgcacatcagcagccgccacactataccacgtcggcactgcagcaggccctgctgtctcccacgccgccagactatacaagacaccagcaggtaccccacatccttcaaggactgctttctccccggcattcgctcaccggccactcggacatccggctgcccccaacagagtttgcacagctcattaaaaggcagcagcaacaacggcagcagcagcagcagcagcagcaacagcaagaataccaggaactgttcaggcacatgaaccaaggggatgcggggagtctggctcccagccttgggggacagagcatgacagagcgccaggctttatcttatcaaaatgctgactcttatcaccatcacaccagcccccagcatctgctacaaatcagggcacaagaatgtgtctcacaggcttcctcacccaccccgccccacgggtatgctcaccagccggcactgatgcattcagagagcatggaggaggactgctcgtgtgagggggccaaggatggcttccaagacagtaagagttcaagtacattgaccaaaggttgccatgacagccctctgctcttgagtaccggtggacctggggaccctgaatctttgctaggaactgtgagtcatgcccaagaattggggatacatccctatggtcatcagccaactgctgcattcagtaaaaataaggtgcccagcagagagcctgtcatagggaactgcatggatagaagttctccaggacaagcagtggagctgccggatcacaatgggctcgggtacccagcacgcccctccgtccatgagcaccacaggccccgggccctccagagacaccacacgatccagaacagcgacgatgcttatgtacagctggataacttgccaggaatgagtctcgtggctgggaaagcacttagctctgcccggatgtcggatgcagttctcagtcagtcttcgctcatgggcagccagcagtttcaggatggggaaaatgagggtgaggagccttatgcatggggcactccagagaagttcctggaggggcctccctccatcttccgtaactgctcctctcttcgtaggaagagctcatggggaggtcccccacggcccttcaggatgaaagctgcggtgctgaccttggccgtgctcttcctgacggggagccaggctcggcatttctggcagcaagatgaacccccccagagcccctgggatcgagtgaaggacctggccactgtgtacgtggatgtgctcaaagacagcggcagagactatgtgtcccagtttgaaggctccgccttgggaaaacagctaaacctaaagctccttgacaactgggacagcgtgacctccaccttcagcaagctgcgcgaacagctcggccctgtgacccaggagttctgggataacctggaaaaggagacagagggcctgaggcaggagatgagcaaggatctggaggaggtgaaggccaaggtgcagccctacctggacgacttccagaagaagtggcaggaggagatggagctctaccgccagaaggtggagccgctgcgcgcagagctccaagagggcgcgcgccagaagctgcacgagctgcaagagaagctgagcccactgggcgaggagatgcgcgaccgcgcgcgcgcccatgtggacgcgctgcgcacgcatttggccccctacagcgacgagctgcgccagcgcttggccgcgcgccttgaggctctcaaggagaacggcggcgccagactggccgagtaccacgccaaggccaccgagcatctgagcacgctcagcgagaaggccaagcccgcgctcgaggacctccgccaaggcctgctgcccgtgctggagagcttcaaggtcagcttcctgagcgctctcgaggagtacactaagaagctcaacacccagtga

SEQ ID NO: 122546 - DNA, 2778 bp, Homo sapiens; identical to SEQ ID NO: 116394

SEQ ID NO: 122547 - DNA, 1842 bp, Homo sapiens
atgccccgagccctggcctttcaagcaccagtcaatatccaggcggagcaggcaggtactgctatgaacatcagcgttccccaggtgcagctgatcaacccagagaaccaaattgtggaggcaagtagcaacctgtgggagctgtcagctgaaaccactttctttgccatatccttgcttcccttccttctgatttctaactcgatgccggatgggacactgaatttggacagtgatgagggtgaagagccttcccctgaagcattggtgcgctatttgtcaatgaggaggcacacagtgggtgtggctgacccacgcacggaagttatggaagatctgcagaagctcctacctggctttcctggagtcaacccccaggctccattcctgcaggtggcccctaatgtgaacttcatgcacaacctgttgcctatgcaaaacttgcaaccaaccgggcaacttgagtacaagatgagtggcttgcccctttctccccgccttcccctcatctcatggtccgtcctccccactctgttcctggcaggagcagtctctcctacagccgcccacgctacagctgttgaatggaatgggcccccttggccggagggcatcagatggaggagccaacatccaactgcatgcccagcagctgctgaagcgccacggggaccctctccgcttgtcaccatgacaccagcagtgccagcagttacccctgtggacgaggagagctcagacggggagccagaccaggaagctgtgcagaggtacttggcaaataggtccaaaagacatacactggccatgaccaaccctacagctgagatcccaccggacctacaacggcagctaggacagcagcctttccgttcccgggtctggcctcctcacctggtacctgatcagcatcgctctacctacaaggactccaacactctgcacctccctacggagcgtttctcccctgtgcgccggttctcagatggggctgcgagcatccaggccttcaaagctcacctggaaaaaatgggcaacaacagcagcatcaaacagctgcagcaggagtgtgagcagctgcagaagatgtacggggggcagattgatgaaagaaccctggagaagacccagcagcagcatatgttataccagcaggagcagcaccatcaaattctccagcaacaaattcaacagcctgctcagtcacagcaggtcaccatccaagtccaagagcctgttgacatgctcagcaacatgccaggcacagctgcaggctccagtgggcgcggcatctccatcagccccagtgctggtcagatgcagatgcagcaccgtaccaacctgatggccaccctcagctatgggcaccgtcccttgtccaagcagctgagtgctgacagtgcagaggctcacaggttgaaatgggaaacgagggagaaaggacttgaagatgactccagtgtttctagtaacacaggtggtgatgtcactaatgagggtaaaagcactgaaagcgcagattttggtttcagtaacctcttcactcctgggcagctgctgaagacctggtgtggcagccctccctatgctgcacctgaactctttgaaggaaaagaatatgatgggcccaaagtggacatctggagccttggagttgtcctctacgtgcttgtgtgcggtgccctgccatttgatggaagcacactgcagaatctgcgggcccgcgtgctgagtggaaagttccgcatcccattttttatgtccacaggatatttccacttattgggttctcattgcaatgtggttttaaatgccaaggataaagtaggctttgcatcttag

SEQ ID NO: 122548 - DNA, 3879 bp, Homo sapiens
atggagctgaaagccaaggctcgagaactatgggaagaatgcagaagcctcaggagccgatgtgatcaactgaaagaaagggtatcagtgatggaagatgagatgaatgaaatgaagcgagaagggaagtttagagaaaaaagaataaaaagaaacgaacaaagcctccaagaaatatgggactatgtgaaaagaccaaatctacgtctgattggtgtacctgaaagtgacggggagaatggaaccaagttggaaaacactctgcagggtattatccaggagaacttccccaatctagcaaggcaggccaacattcagattcaggaaatacagagaacaccacaaagatactcctcgagaagagcaactccaagacacataattgtcagattcaccaaagttgaaatgaaggaaaaaatgttaagggcagccagagagaaaggtcgggttacccacaaagggaagcccatcagactaacagtggatctctcggcagaaactctagaagccggaagagagtgggggccaatattcaacattcttaaagaaaagaattttcaacccagaacttcatatccagccaaactaagcttcataagtgaaggagaaataaaatactttacagacaagcaaatgctgagagattttgtcaccaccaggcctgccctaaaagagctcctgaaggaagcactaaacatggaaaggaacacccgcaaatgtaaaagatcagaaattataacaaactgtctctcagaccacagtgcaatcaaactagaactcaggaataagaaactcactcaaaaccgctcaactacatggaaaccgaacaacctgctcttgaatgactactgggtacgtaacgaaatgaaggcagagataaagatgttctttgaaaccaacgagaacaaagacagaacataccagaatctctgggacacattcaaagcagtgtgtagagggaaatttatagcactaaatgcccacaagagaaagcaggaaagatccaaaattgacaccctaacatcacaattaaaagaactagaaaagcaagagcaaagacattcaaaagctagcagaaggcaagaaataactaaaatcagagcagagctgaaggaaatagagacacaaaaaacccttcaaaaaattaatgaatccaggagctggttttttgaaaggatcaacaaaattgatagaccgctagcaagactagtaaagaagaaaagagagaagaatcaaatagacgcaataaaaaatgataaaggggatatcaccaccaatcccacagaaatgcaaactaccatcagagaatactacaaacacctctatgcaaataaactagaaaatctagaagaagtggataaattcctcaacacatacaccttcccaagactaaaccaggaagaagttgactctctgaatagaccaataacaggctctgaaattgtggcaataatcaatagcttaccaacgaaaaagagtccaggaccagatggattcacagccgaattctaccagaggtacaaggaggaactgccgggcagaagagacacaaccaaaaaagagaattttagaccaatatccttgatgaacattgatgcaaaaatcctcaataaaatactggcaaaccgaatccagcagcacatcaaaaagcttatccaccatgatcaagtgggcttcatccctgggatgcaaggctggttcaatatacacaaatcaataaatgtaatccagcatataaacagaaccaaagacaaaaaccacatgattatctcaatagatgcagaaaaggcctttgacaaaattcaacaacctttcatgctaaaaactctcaataaattaggtattgatgggacatatttcaagataataagagctatctatgacaaacccacagccaatatcatacttaatgggcaaaaactcgaagcattccctttgaaaactggcacaagacagggatgccctctctcaccactcctattcaagatagtgttggaagttctggccagggcaattaggcaggagaaggaaataaagggtattcaattaggaaaagatgaagtcaaattgtccctgtttgcagatgacatgattgtatatctagaaaaccccattgtctcagcccaaaatctccttaagctgataagcaacttcagcaaagtctcaggatacaaaatcaatgtgcaaaaatcacaagcattcttatacaccaataacagacaaacagagagccaaatcttgagtgaactcccattcacaattgcttcaaagagaataaaatacctaggaatccaacttacaagggatgtgaaggacctcttcaaggagaactacaaaccactgctcactgaaataaaagaggatacaaacaaatggaagaacattccatgctcatgggtaggaagaatcaatatcataaaaatggccatactgcccaaggtaatttatagattcaatgccatccccatcaagctaccaatgaccttcttcacagaattggaaaaaactactttaaagttcatatggaaccaaaaaagagcccgcattgccaagtcaatcctaagccaaaagaacaaagctggaggcatcacgctacctgagttcaaactatactacaaggctacagtaaccaaaacagcatggtactggtaccaaaacagagacatagatcaatggaacagaacagagccctcacaaataacgccgcatatctacaactatctgatctttgacaaatctgagaaaaataagcaatggggaaaggattccctatttaataaatggtgctgggaaaactggctagccatatgtagaaagctgaaactggatcccttccttacaccttatacaaaaattaattcaagatggattaaagacttaaacgttagacctaaaaccataaaaaccctagaagaaaacctaggcattaccattcaggacataggcatgggcaaggacttcatgtctaaaacaccaaaagcaatggcaacaaaagccaaaattgacaaatgggatctaattaaactaaagagtttttgcacagcaaaagaaactaccatcagagtgaacaggcaacctacaaaatgggagaaaattttcgcaacctactcatctgacaaagggctaatatccagaatctacaatgaactcaaacaaatttacaagaaaaaaacaaacaaccccatcaaaaagtggacgaaggatatgagcatacacttcttaaaagaagacatttatgcagccaaaaaacacatgaaaaaatgctcaccatcactggccatcagagaaatgcaaatcaaaatcacaatgagataccatctcacaccagttagaatggcaatcattaaaaagtcaggaaacaacaggtgctggagaggatgtggagaaattggaacacttttacactgttggtgggactgtaaactagttcaacccttgtggaagtcagtgtggcgattcctcagggatctagaactagaaataccatttgacccagccatcccattactgggtatatacccaaaggactataaatcatgctgctataaagacacgtgcacacgtatgtttattgcagcactattcacaatagcaaagacttggagccaacccaaatgtccaacaacgatagactggattaagaaaatgtggcacatatacaccatggaatactatgcagccataaaaaatgatgagttcatgtcctttgtagggacatggatgaaattggaaatcatcattctcagtaaaccattgcaagaacaaaaaaccaagcaccgcatgttctcactcatagtatcttcaaaagtaattaggcggctgtcccagaagttgcctttgaagattgttgcaatgtgtatacctgtcaaaaggaattga

SEQ ID NO: 122549 - DNA, 4068 bp, Homo sapiens
atggggaaaaaacagagcagaaaaactggaaactctaaaaagcagagcgcctctcctcctccaaagaaacgcagttcctcaccagcaacggaacaaagctggacggagaatgactttgatgagctgagagaagaaggcttcagacgatcaaattactccgagctacgggaggaaattcaaaccaaaggcaaagaagtggaaaactatgaaaaaagtttagaagaatgtataactagaataaccaatacagagaactgcttaaaggagctgatggagccgaaaacaaaggctcgagaactacgtaaagaatgcagaagcctcaggagccgatgctatcaactggtagaaagggtatcagcgatggaagatgaagtgaatgaaatgaaagacacacataggctcaaagtaaaaggatggaggaagatctaccaaggaaatggaaaacaaaaaaaggcaggggttgcaatcctagtctctgataaaacagactttaagccaacaaagatcaaaagagacaaagaaggccattacatgatggtaaagggatcaattcaacaagaagagctaactatcctaaatatatatgcacccaatacaggagcacccagattcataaagcaagtcctgagtgacctacaaagagacttagactcccacacattaataatgggagactttaacaccccactgtcaacattagacagatcgacgagacagaaagtcaacaacaatacccaggaattgaactcagctctgcaccaagcagacctaatagacatctacagaactctctaccccaaatcaacagaatatacatttttttcagcaccacaccacacctattccaaaattgaccacatacttggaagtaaagctctcctcagcaaatgtaaaagaacagaaattataacaaactatctctcagaccacagtgcaatgaaactagaactcaggattaagaatctcactcaaaactgctcaactacatggaaactaaacaacctgctcctgaatgactacggggtacaaaacaaaatgaaggcagaaataaagatgttctttgaaaccaacgagaacaaagacacaacataccagaatctctgggacgcattcaaagcagtgtgtagagggaaatttatagcactaaatgcccacaagagaaagcaggaaagatccaaaattgacaccctaacatcacaattaaaagaactagaaaagcaagagcaaacacattcaaaagctagcagaagtcaagaaataactaaaatcagagcagaactgaaggaaatacagacacaaaaaacctttcaaaaaattaatgaatccaggagctggttttttgaaaggatcaacaaaattgatagaccactagctagactaataaagaaaaaaagagagaagaatcaaatagacgcaataaaaaatgataaaggggatatcaccaccgatcccacagaaatacaaactaccatcagagaatactacaaacacctctacgcaaataaactagaaaatctagaagaaatggatacattcctcgacacatgcactctcccaagactaaaccaggaagaagttgaatctccgaatagaccaataacaggatctgaaattgtggcaataatcaatagcttaccaaccaaaaagagtccaggaccaaatggattcacagccgaattctaccagaggtacaaggaggaactggtaccattccttctgaaactattccaatcaatagaaaaagagggaatcctccctaactcattttatgaggccagcatcaccctgataccaaaggcgggcagagacacaaccaaaaaagagaattttagaccaatatccttgatgaacattgatgcaaaaatcctcaataaaatactggcacaccgagtccagcagcacatcaaaaagcttatccaccatgatcaagtgggcttcatccctgggatgcaatgctggttcaatatatgcaaatcaataaatgtaatccagcatataaacagaaccaaagacaaaaaccacatgattatctcaatagatgcagaaaaggcctttgacaaaattcaacaacccttcattctaaaaactctcaataaattaggtattcatgggacatatctcaaaataataagagctacctatgacaaacccacagacaatatcaaactgaatgggcaaaaactggaagcattccctttgaaaactgacacaagacagggatgccctctctcaccactcctattcaacatagtgttggaagttctggccagggcaattaggcaggagaaggaaataaagggtattcaattaggaaaagaggaagtcaaattgtccctgtttgcagatgacatgattgtatatctagaaaaccccattgtctcagcccaaaatctcctaaagctgataagcaacttcagcaaagtctcaggatacaaaatcaatgtacaaaaatcacaagcattcttatacaccaacaaaagacaaacacagagccaaatcatgagtgaactcccattcacaattgcttcaaagagaagaaaatacctaggaatccaacttacaagggatgtgaaggacctcttcaaggagaactacaaaccactgctcaaggaaataaaagaggatacaaacaaatggaagaacattccatgctcatcggtaggaagaatcagttttgtgaaaatggccatactgcccaaggtaatttacagattcaatgccatccccatcaagctaccaatgcctttcttcccagaattggaaaaaactactttaaagttcatatggaaccaaaaaagagcccgcatagccaagtcaatcctaagccaaaagaacaaagctggaggcatcacactacctgacttcaaactatactacaaggctacagtaaccaaaacagcatggtactggtaccaaaacagagatatagatcaatggaacagaacagagccttcagaaataacgccgcatatctacaactatctgatctttgacaaacctgagaaaaacaagcaatggggaaaggattccctatttaataaatggtgctgggaaaactggctagccatatgtagaaagctgaaactggatcccttccttacaccttatacaaaaatcaattcaagatggattaaagacttaaacgttagacctaaaaccataaaaaccctagaagaaaacctaggcattaccattcaggacataggcatgggcaaggacttcatgtctaaaacacaaaaagcaatggcaacaaaagccacaattgacaaatgggatctaattaaactaaggagcttctgcacagcaaaagaaactaccatcagagtgaacaggcaacctacaaaatgggagaaaatttttgtaatctactcatctgacaaaggactaatattcagaatctacaatgaactcaaacaaatttacaagaaaaaaacaaacaactccatcaaaaagagggcgaaggacatgaacagacacttctcaaaagaagacatttatgcagccaaaaatcacatgaaaaaatgctcatcatcactggccatcagagaaatgcaaatcaaaaccacaatgagatatcatctcacaccagttagaatggcaatcattaaaaagtcaggaaacaacagatgctggagaggatgtggagaaataggaacacttttacactcttggtgggactgtaaactagttcaaccattgtggaagtcagtgtggcgattcctcagggatctagaactagaaataccatttgacccagccatcccattacggggtatatacctgaaggactataaatcatgctgctataaagacacatgcacatgtatgtttattgcggcattattcacaatagcaaagacttggaaccaagccaaatgttcaacaatgatagactggattaagaaaatgtggcacatatacaccatggaatactatgcagccataaaaaatgatgagttcatgtcctttgtagggacatggatgaaattggaaatcatcattcttagtaaactatcacaagaacaaaaaaccaaacaccgcatattctcactcataggtgggaattga

SEQ ID NO: 122550 - DNA, 2229 bp, Homo sapiens; identical to SEQ ID NO: 120663

SEQ ID NO: 122551 - DNA, 3300 bp, Homo sapiens; identical to SEQ ID NO: 118076

SEQ ID NO: 122552 - DNA, 2227 bp, Homo sapiens; identical to SEQ ID NO: 116398

SEQ ID NO: 122553 - DNA, 2871 bp, Homo sapiens; identical to SEQ ID NO: 116399

SEQ ID NO: 122554 - DNA, 2205 bp, Homo sapiens
atgaaggcagaaataaagatgttatttgaaaccaacgagaacaaagacacaacataccagaatctctgggacacattcaaagcagtgtgtagagggaaatttagaacactaaatgcccacaagagaaagcaggaaagatccaaaattgacaccctaacatcacaattaaaagaactagaaaagcaagagcaaacacattcaaaagctagcagaaggcaagaaataactaaaatcagagcagaattgaaggaaatagagacacaaaaaacccttcaaaaaattaatgaatccaggagctggttttttggaaggatcaacaaaattgatagaccactagcaagactaataaagaagaaaagagagaagaatcaaatagacgcaataaaaaatgataaaggggatatcaccactgatcccacagaaatacaaactaccatcagagaatactacaaacacctccatgcaaataatctagaaaatctagaagaaatggataaattcctcgacacatacactctcccaagactaaaccaggaagaagttgaatctctgaatagaccaataacaggatctgaaattgtggcaataatcaatagcttaccaaccaaaaagagtccaggaccagatggattcacagccaaattctaccagaggtacaaggaggaactgagaataaaatacttaggaatccaacttacaagggacgtgaaggacctcttcaaggagaactacaaaccactgctcaaggaaataaaagaggatacaaacaaatggaagaacattccatgctcatgggtaggaagaatcaatatcgttaaaatggccatactgcccaaggtaatttatagattcaatggtatccccatcaagctaccaattactttcttcacagaattggaaaaaactactttaaagttcatatggaaccaaaaaagagcccgcgtcgccaagtcaatcctaagccaaaagaacaaagctggaggcatcatgctacctgacttcaaactatactacaaggctacagtaaccaaaacagcatggtactggtaccaaaacagagatatagatcaatggaacagaacagagccctcagaaataatgccacatatctacaactatctgatctttgacaaacctgagaaaaacaagcagtggggaaaggattccctatttaataaatggtgctgggaaaactggctagccatatgtagaaagctgaaaatggatcccttccttacaccttatacaaaaattaattcaagatggattaaagacttaaacgttagacctaaaaccataaaaaccctagaagaaaacctaggcaataccattcaggacataggcatgggcaaggacttcatgtctaaaactccaaaagcaatggcaacaaaagccaaaattgacaaatgggatctaattaaactaaagagcttctgcacagcaaaagaaactaccatcggagtgaacaggcaacctacaaaatgggagaaaatttttgcaacctactcatctgacaaagggctaatattcagaatctacaatgaacttaaacaaatttacaagaaaaaaacaaacaaccccatcaaaaagtgggcaaaggatatgaacagacaattctcaaaagaagacatttatgcagccaaaagacacatgaaaaaatgctcaacatcactggccatcagagaaatgcaaatcaaaaccacaatgagataccatctcacaccagttagaacagcgatcattaaaaagtcaggaaacaacaggtgctggagaggatgtggagaaataggaacacttttacactgttgctgggactgtaaactagttcaaccattgtggaagtcagtgtggcgattcctcagggatctagaactagaaataccatttgacccagccatcccattactgggtatatacccaaaggactataaatcatgctgctataaagacacatgcacacgtatgtttactgcggcactattgacaatagcaaagacttggaaccaacccaaatgtccaacaatgatagactggattaagaaaatgtggcacatatacaccatggaatcctatgcagccataaaaaatgatgagttcatgtcctttgtagggacatggatgaaattggaaatcatcattctcagtaaattatcgcaaggacaaaaaaccaaacaacgcatattctcactcatagatgggaactga

SEQ ID NO: 122555 - DNA, 2166 bp, Homo sapiens
atggttggtcaaggcctcaacctcgtgggggtcaagcctcccggaaagcggggacctccagaggtgcagggccacaatgcagatgagaacaaccatacagaagatcgacaaggaaacagaagacatgaacacagtatagatcagttggctgtaactgatgtccactcaacaacagcagaatacacattcttaagtactcgtggaggcttctccaagatagaccacatgttaggctgtaaaacaaatcttaacaaatataaggagattgaaatcatacaaagtatcttctccaatcacaatgaaataaaacaagaaatcaatagcagaaggaaaacaagaaagtccacgaatttgtgggaactaagcagtgccctcttaatgaatgggtcagagaagaaaacacaagtgaatttagataatatctggaaactaatgaaagcaaaaatgcaacatatcacacttatggaatgcagtgaaagtagaaagaataaaatacctaggaatccaacttacaagggacgtgaaggacctcttcaaggagaactacaaaccactgctcaaggaaataaaagaggatacaaacaaatggaagaacatcccatgctcatgggtggaagaatcaataccgtgaaaatggccatactgcccaaggtaatttacagattcaatgccatccccatcaagctaccaatgactttcttcacagaattggaaaaaactactttaaagttcatatggaaccaaaaaagagcccgcatcgccaagtcaatcctaagccaaaagaacaaagctggaggcctcacactacctgacttcaaactattctacaaggctacagtaaccaaaacagcatggtactggtaccaaaacagagatatagatcaatggaacagaacagagccctcagaaataatgccgcatatctacaactatgtgatctttgacaaacctgagaaaaacaagcaatggggaaaggattccctatttaataaatggtgctgggaaaactggctagccatatgtagaaagctgaaactggatcccttccttacaccttatacaaaaatcaattcaagatggattaaagacttaaccgttagacctaaaaccataaaaaccctagaagaaaacctgggcattaccattcaggacataggcatgggcaaggacttcatgtctaaaacaccaaaagcaatggcaacaaaagccaaaattgacaaatgggatctaattaaactaaagagcttctgcacaggaaaagaaactaccatcagagtgaacaggcaacctacaaagtggaagaaaatttttgcaacctactcatctgacaaagggctaatatccagaatctacaatgaactcaaacaaatttacaagaaaaaaacaaacaaccccatcaaaaagtgggtgaaggacatgaacagacacttctcgaaagaagacatttatgcagccaaaaaacacatgaaaaaatgctcaccatcactggccgtcagagaaatgcaaatcaaaaccacaatgagataccatctcacaccagttagaatggcaatcattaaaaagtcaggaaacaacaggtgctggagaggatgtggagaaataggaacacttttacactgttggtgggactgtaaactagttcaaccattgtggaagtcagtgtggcaattcctcagggatctagaactagaaataccatttgacccagccatcccattactgggtatatacccaagagactataaatcatgctgctataaagacacatgcacacgtatgtttattgcagcattattcacaatagcaaagacttggaaccaacccaaatgtccaacaatgatagactggattaagaaaatgtggcacatatacaccatggaatactatgcagccataaaaaatgatgagttcatgtcctttgtagggacgtggatgaaattggaaatcatctttctcagtaaactattgcaagaacaaaaaaccaaacaccgcatattctcactcatagacagcaaacctgcaccacaagattcaggtgccataataggtttgcaagaacctgagcctatgaccctagcccaagacctactgcatctgaaatccagtgccactgaagctgcttgcagggccatcagtcctgacaccaagagggatccccttggctaa

SEQ ID NO: 122556 - DNA, 2004 bp, Homo sapiens
atgcctcacatccaggtcatgctgatgcaagagatggactcccacagccttgggaagctctgcccctatggctttgcagagtacagccccacttctagctgctttcatgggtttgtgttgagtgtctgtggctcttccagggacaaagccacccagagagttgatgctcttgtcagacaggtcatagtcaatggaggcattgttcttgatcagtttgccgtccatgatagggtagccctggccgatcttatagatcttcttgttgatctcagtgccatgatgctttgtggtgtgccaacaactggtgacccctttgtagcctttgcccttggtcaccccgatgactttgatcatctcatcttgcccaaacacttggttgacaggtacctgctgctcgagcctcttctgggcccagtccagcttctcagccacagtgcctctgttcacctagatctccatcagttctgctctgattttagttatggaatccaacttacaagggacgtgaaggacctcttcaaggagaactacaaaccactgctcaaggaaataaaagaggatacaaacaaatggaagaacattccatgctcatgggtaggaagaatcaatatcatgaaaatggccatgctgcccaaggtaatttatagattcaatgccatccccatcaagctaccaatgactttcttcacagaattggaaaaaactactttaaagttcatatggaaccaaaaaagagcccgtatcgccaagtcaagccttagccaaaagaacaaagctggaggcatcacactacctgacttcaaactatactacaaggctacagtaaccaaaacagcatggtactggtaccaaaacagagatatagatcaatggaacagaacagagccctcagaaataacgccgcatatctacaactatctgatcttcgacaaacctgagaaaaacaagcaatggggaaaggattccctatttaataaatggtgctgggaaaactggctagccatatgtagagagctgaaactggatcccttccttacaccttatacaaaaattcattcaagatggattaaagacttaaatgttagacctaaaaccataaaaaccctagaagaaaacctaggccttaccattcaggacataggcatgggcaaggacttcatgtctgaaacaccaaaagcaatggcaacaaaagccaaaattgacaaatgggatctaatgaaactaaagagcttctgcacagccaaagaaactaccatcagagtgaacaggcaacctacaaaatgggagaaaattttcacaacctactcatctgacaaagggctaatatccagaatctacaaagaactcaaacaaatttacaagataaaaacaaacaaccccatcaaaaagtgggcaaaggacacgaacagacacttctcaaaagaagacatttatgcagccaaaaaacacatgaaaaaatgctcaccatcacgggccatcagagaaatgcaaatcaaaaccgcaatgagataccatctcacaccagttcgaatggcgatcattacaaagtcaggaaacaacaggtgctggagaggatgtggagaaataggaacacttttacactgttggtgggaatgtaaactacttcaaccattgtggaagtcagtgtggcaattcctcagggatctagaactagaaataccatttgacccagccatcccattactgggtatatacccaaaggactataaatcatgctgctataaagacacatgcacacgtatgtttattgtggcactattcacaatagcaaagacttggaaccaacccaaatgtccaacaatgatagactggattaagaaaatgtggcacatatacaccatggaatactacgcagccataaaaaatgatgagttcatgtcctttgtagggacacggatgaaattggagatcatcattctcagtaaactatcgcaaggacaaaaagccaaacaccgcatattctcactcataggtgggaattga

SEQ ID NO: 122557 - DNA, 3166 bp, Homo sapiens
caaatgtaaaagatcagaaattataacaaactgtctctcagaccacagtgcaatcaaactagaactcaggaataagaaactcactcaaaaccgctcaactacatggaaaccgaacaacctgctcttgaatgactactgggtacgtaacgaaatgaaggcagagataaagatgttctttgaaaccaacgagaacaaagacagaacataccagaatctctgggacacattcaaagcagtgtgtagagggaaatttatagcactaaatgcccacaagagaaagcaggaaagatccaaaattgacaccctaacatcacaattaaaagaactagaaaagcaagagcaaagacattcaaaagctagcagaaggcaagaaataactaaaatcagagcagagctgaaggaaatagagacacaaaaaacccttcaaaaaattaatgaatccaggagctggttttttgaaaggatcaacaaaattgatagaccgctagcaagactagtaaagaagaaaagagagaagaatcaaatagacgcaataaaaaatgataaaggggatatcaccaccaatcccacagaaatgcaaactaccatcagagaatactacaaacacctctatgcaaataaactagaaaatctagaagaagtggataaattcctcaacacatacaccttcccaagactaaaccaggaagaagttgactctctgaatagaccaataacaggctctgaaattgtggcaataatcaatagcttaccaacgaaaaagagtccaggaccagatggattcacagccgaattctaccagaggtacaaggaggaactgccgggcagaagagacacaaccaaaaaagagaattttagaccaatatccttgatgaacattgatgcaaaaatcctcaataaaatactggcaaaccgaatccagcagcacatcaaaaagcttatccaccatgatcaagtgggcttcatccctgggatgcaaggctggttcaatatacacaaatcaataaatgtaatccagcatataaacagaaccaaagacaaaaaccacatgattatctcaatagatgcagaaaaggcctttgacaaaattcaacaacctttcatgctaaaaactctcaataaattaggtattgatgggacatatttcaagataataagagctatctatgacaaacccacagccaatatcatacttaatgggcaaaaactcgaagcattccctttgaaaactggcacaagacagggatgccctctctcaccactcctattcaagatagtgttggaagttctggccagggcaattaggcaggagaaggaaataaagggtattcaattaggaaaagatgaagtcaaattgtccctgtttgcagatgacatgattgtatatctagaaaaccccattgtctcagcccaaaatctccttaagctgataagcaacttcagcaaagtctcaggatacaaaatcaatgtgcaaaaatcacaagcattcttatacaccaataacagacaaacagagagccaaatcttgagtgaactcccattcacaattgcttcaaagagaataaaatacctaggaatccaacttacaagggatgtgaaggacctcttcaaggagaactacaaaccactgctcactgaaataaaagaggatacaaacaaatggaagaacattccatgctcatgggtaggaagaatcaatatcataaaaatggccatactgcccaaggtaatttatagattcaatgccatccccatcaagctaccaatgaccttcttcacagaattggaaaaaactactttaaagttcatatggaaccaaaaaagagcccgcattgccaagtcaatcctaagccaaaagaacaaagctggaggcatcacgctacctgagttcaaactatactacaaggctacagtaaccaaaacagcatggtactggtaccaaaacagagacatagatcaatggaacagaacagagccctcacaaataacgccgcatatctacaactatctgatctttgacaaatctgagaaaaataagcaatggggaaaggattccctatttaataaatggtgctgggaaaactggctagccatatgtagaaagctgaaactggatcccttccttacaccttatacaaaaattaattcaagatggattaaagacttaaacgttagacctaaaaccataaaaaccctagaagaaaacctaggcattaccattcaggacataggcatgggcaaggacttcatgtctaaaacaccaaaagcaatggcaacaaaagccaaaattgacaaatgggatctaattaaactaaagagtttttgcacagcaaaagaaactaccatcagagtgaacaggcaacctacaaaatgggagaaaattttcgcaacctactcatctgacaaagggctaatatccagaatctacaatgaactcaaacaaatttacaagaaaaaaacaaacaaccccatcaaaaagtggacgaaggatatgagcatacacttcttaaaagaagacatttatgcagccaaaaaacacatgaaaaaatgctcaccatcactggccatcagagaaatgcaaatcaaaatcacaatgagataccatctcacaccagttagaatggcaatcattaaaaagtcaggaaacaacaggtgctggagaggatgtggagaaattggaacacttttacactgttggtgggactgtaaactagttcaacccttgtggaagtcagtgtggcgattcctcagggatctagaactagaaataccatttgacccagccatcccattactgggtatatacccaaaggactataaatcatgctgctataaagacacgtgcacacgtatgtttattgcagcactattcacaatagcaaagacttggagccaacccaaatgtccaacaacgatagactggattaagaaaatgtggcacatatacaccatggaatactatgcagccataaaaaatgatgagttcatgtcctttgtagggacatggatgaaattggaaatcatcattctcagtaaaccattgcaagaacaaaaaaccaagcaccgcatgttctcactcatagtatcttcaaaagtaattaggcggctgtcccagaagttgcctttgaagattgttgcaatgtgtatacctgtcaaaaggaattga

SEQ ID NO: 122558 - DNA, 2748 bp, Homo sapiens; identical to SEQ ID NO: 116383

SEQ ID NO: 122559 - DNA, 13931 bp, Homo sapiens
atgtactcacatgtgatcacggtgtgccggcatgtgaagaatggggacattctgctactgaaccgacagcccacactgcacagaccctccatccaggcccaccgtgcccgcatcctgcctgaagagaaagtgctgcggctccactatgccaactgcaaggcctataatgccgactttgatggagacgagatgaatgcccatttcccccagagtgagctgggccgggccgaggcctacgtcctggcctgcactgatcagcagtaccttgttcccaaggatggccaaccattggcgggactgatccaggatcacatggtttcaggggcaagcatgactactcggggttgctttttcacccgggagcactatatggagctggtgtaccgaggactcacggacaaagtggggcgcgtgaagctcctttctccttccatcctgaagccctttccgctgtggacaggaaaacagcatataaacagaaccaaagacaaaaaccacatgattatctcaatagatgcagaaaaggcctttgataaaattcaacaacccttcatgctaaaaactctcaataaattaggtattgatgggacgtatctcaaaataataagagctatctatgacaaacccacagccagtatcatactgaatgggcaaaaactggaagcattccctttgaaaactggcacaagacagggatgccctctctcaccactcctattcaacatagtgttggaagttctggccagggcaatcaggcaggagaaggaaataaagagcattcagttaggaaaagaggaagtcaaattgtccctgtttgcagatgacatgattgtatatctagaaaaccccactgtctcagcccaaaatctccttaagctgatgagcaacttcagcaaagtctcaggatacaaaatcaatgtgcaaaaatcacaagcattcttatacaccaataacagacaaacagagagccaaatcatgagtggactcccattcacaatcacttcaaagagaataacatacctaggaatccaacttacaagggatgtgaaggacctcttcaaggagaactacaaaccactgctcaaggaaataaaagaggatacaaacaaatggaagaacattccatgctcatgggtaggaagaatcaatatcgtgaaaatggccatactgcccaaggtaatttatagattcaacaccatccccatcaagctaccaatgactttcctcacagaattggaaaaaactactttaaagttcatatggaaccaaaaaagagcccacattgccaagtcaatcttaagccaaaagaacaaagctggaggcatcatgctacctgacttcaaactatactacaaggctacagtaaccaaaacagcatggtactggtaccaaaacagagatatagaccaatggaacagaacagagccctcagaaataatgccgcatatctataactatctgatctttgacaaacctgacaaaaacaagcaatggggaaaggattccctatttaataaatggtgctgggaaaactggctagccatatgtagaaagctgaaactggatcccttccttacaccttatacaaaaattaattcaagatggattaaagacttacatgttagacctaaaaccataaaaaccctagaagaaaacctaggcaataccattcaggacataggcatgggcaaggacttcatgtcgaaaacaccaaaagcaatggcaacaaaagccaaaattgacaaatgggatctcattaaactaaagagcttctgcacagcaaaagaaaccaccatcagagtgaacaggcaacctacagaatgggagaaaatttttgcaacctactcatctgacaaagggctaatatccagaatctacaatgaactcaaacaaatttacaagaaaaaaacaaacaaccccatcaaaaagtgggcaaaggatatgaacagacacttctcagaagaagacatttatgcagccaaaaaacacatgaaaaaatgctcatcatcactggccatcagagaaatgcaaatcaaaaccacaatgagataccatctcacaccagttagaatggtgatcattaaaaagtcaggaaacaataggtgctggagaggatgtggagaaataggaacacttttacactgttggtgggactgtaaactagttcaaccattgtggaagtcggtgtggcaattcctcagggatctagaactagaaataccatttgacccagccatcccattactgggtatatacccagaggattataaaccatgctgctataaagacacatgcacacgtatgtttattgcggcactattcacaatagcaaagacttggaaccaacccaaatgtccaacaatgatagacgggattaagaaaatgtggcacatatacaccatggaatactatgcagccataaaaaaggatgagttcatgtcctttgtagggacatggatgaagctggaaaccatcattctcagcaaactatcgtcttcgctgaaacatgggcactcgtgggaagtgctttctgttccccaggctcagttattttcatatcttcagctgctgctattacattcccatctcttggaaggagccagagccagagaaatacagggttcctctgtggccaagggaaaaatgcctgccaagaatgctgaacttctggtgaagaaccagatgatttcttggattggccagattaattccaggcccaaggagcaaaagaatcctaaaacagagacagaggctgtgagaagcgaaaggcgctgtggatgttgctgccctagcgtttggaagcccgaacattcacatgacttgcttcaatctcatagagagccagcagctgagctgtgggtccaagtgtcaggacacctcgcccatatctctgtgtgcgaaaggatgtgcatgatgtggtcccaatcctcaggcccagtgctacttctctattcatgccgagagcagcaggccagggaggccagaaagcaggtgggacagagaaatcttcaggcccatgaaaagatgatgtgtagagattacagccaccaaatggcttcagaattattcactgagtgcaatagacctgtcgaaaagggtgtccacatttgtcaaaaaggaacactttccagttccaaaattagaggtgaaacctgttgtacccagctctgccgaacattccacactcctcagtggaggaaggagttggctccatctaggcgaggtctgaggatctggaaggtgctcagctcccatagctattggcacgtttatttacatgcagatctaacacctacagaggacttaagttcacagaggcatgaggtggagagtaacaaagcatctgctattcaacaagaagagctaactatcctaaatatatatgcacccaatacaggaggacccagattcataaagcaagtcctgagtgacctacaaggagacgtagactcccacacaataataatgggagactttaacaccccactgtcaacattagacagatcaacaagacagaaagttaacaaggatacccaggaattgaactcagctctgcaccaagcagacctaatagacatctacagaactctccaccccaaatcaaaagaatttacatttttttcagcaccacaccacacctattccaaaattgaccacatacttggaagtaaagctctcctcagcaaatgtaaaagaacagaaattataacaaactgtctctcagaccacagtgcaatcaaactagaactcaggattaagaaactcactcaaaactgctcaactacatggaaactgaacaacctgctcctgaatgactactgggtacataacgaaatgaaagcagaaataaagatgttctttgaaaccaacgagaacaaagacacaacataccagaatctctgggacacattcaaagcagtgtgtagagggaaatttatagcactaaatgcccacaagagaaagcaggaaagatccaaaattgacaccctaacatcacaattaaaagaactagaaaagcaagagcaaacacattcaaaagctagcagaaggcaagaaataactaaaatcagagcagaactgaaggaaataaagacaaaaaaaaaaaccctccaaaaaattaatgaatccaggagctggttttttgaaaggatcaacaaaattgatagaccgctagcaagactaataaacaagaaaagagagaagcatcaaatagacgcaataaaaaatgataaaggggatatcaccaccgatcccacagaaatacaaactaccatcagagaatactacaaacacctctacgccaataaactagaaaatctaggagaaatggataaattcctcgacacatacaccctcccaagactaaaccaggaagaagttgaatctctgaatagaccaataacaggctctgaaattgtggcaataatcaatagtttaccaacaaaaaagagtccaggaccagatggattcacagccgaattctaccagaggtacaaggaggaactggtaccattccttctgaaactattccaatcaatagaaaaagagggaatcctccctaactcattttatgaggccagcatcattctgataccaaagccgggcagagacacaacaaaaaaagagaattttagaccaatatccttgatgaacattgatgcaaaaatcctcaataaaatactggcaaaccgaatccagcagcacatcaaaaagcttatccaccatgatcaagtgggcttcatccctgggatgcaaggctggttcaatatacgcaaatcaataaatgtaatccagcatataaacagaaccaaagacaaaaaccacatgattatctcaatagatgcagaaaaagcctttgacaaaaattcaacaacgcttcatgctaaaaacttttaataaatttgctattgatgggacgtatctcaaaataataagagctatctatgacaaacccacagccaatatcatcctgaatgggcaaaaactggaagcattccctttgaaaactggcacaagacagggatgccctctctcaccactcctactcaacatagtgttggaagttctggcctgggcaattaggcaggacaaggaaataaagtgtattcaattaggaaaagacgaagtcaaattgtccctgtttgcagatgacatgattgcatatctagaaaaccccattgtctcagcccaaaatctccttaagctgataagcaacttcagcaaagtttcaggatacaaaatcaatgttcaaaaatcacaagcattcttatacaccaataacacagacaaacaagagagccaaatcatgagtgaactcccattcacaactgcttcaaagagaataaaatacctaggaatccaacttacaagggatgtgaaggacctcttcaaggagaactacaaaccactgctcaatgaaataaaagaggatacaaacaaatggaagaacgttccatgttcatgggtaggaagaatcagtatcgtgaaaatggccatactgcccaaggtaatttatagattcaatgccatccccatcaagctaccaatgactttcttcacagaattggaaaaaactactttaaagttcatatggaaccaaaaaagagcccacatcaccaagtcaatcctaagccaaaagaacaaagctggaggcatcacgctacctgacttcaaactatactacaaggctacagtaaccaaaacagcatggtactggtaccaaaacagatatatagaccaatggaacagaatagagccctcagaaataatgccgcatatctacaactatctgatctttgacaaacctgacaaaaacaagaaatggggaaaggattccctatttaataaatggtgctgggaaaactggctagccatatgtagaaagctgaaactggatcccttccttacaccttatacaaaaattaattcaagatggattaaagacttaaatgttagacctaaaaccataaaaaccctagaagaaaacctaggcaataccattcaggacacaggcatgggcaaggacttcatgtctaaaacaccaaaagcaatagcaacaaaagccaaaattgacaaatgggatctaattaaactaaagagcttctgcacagcaaaagaaactaccatcagagtgaacaggcaacctacagaatgggagaaaatttttgcaacctactcatctgacaaagggctaatatccagaatctacaatgaactcaaacaaatttataagaaaaaaacaaacaaccccatcaaaaagtgggcgaaggatatgaacagacacttctcaaaagaagacatttatgcagccaaaaaacacatgaaaaaatgctcaccatcactggccatcagagaaatgcaaatcaaaaccacaatgagataccatgtcacaccagttagaatggcaatcattaaaaagtcaggaagcaacaggtgctggagaggatgcggagaaataggaacacttttacactgttggtgggactgtaaactagttcaaccattgtggaagtcagtgtggcgattcctcagggatctagaactagaaataccatttgacccagccatcccattactgggtatatacccaaaggattataaatcatgctgctataaagacacattcacacgtatgtttattgcggcactattcacaatagcaaagacttggaaccaacctaaatgtccaacaacgatagactggattaagaaaatatggcacatatataccatggaatactatgcagccataaaaaatgatgagttcatgtcctttgtagggacatggatgaaactgccaaccatcattctcagcaaactatcgcaagaacaaaaaaaccaaacaccgcgtattctcactcataggtgggaattgaacaatgagaacacatggacacagaaaggggaacatcacactctggggactgttgtggggtggggagaggcgggagggatagcattgggagatatacctaatgctagatgacacattagtgggtgcagcgcaccagcatggcacatgtatacatatgtaactaacctgcacaatgtgcacatgtaccctaaaacttagagtataataaaaaaaagaaaaaaaaaagaaaaaaaaaggtatcttgattctctctgaaattttttattatttctgatgtttttttccaggcttgtaatgtgtcaaggccacttatctgcagctaccttagaagtagtataattgatctatgttctctcaaaagcaattttttcctagtcacagaactatttcttcttttactactttatttgttctagttattacagaatcaaagaacttcttgaaaagagaatactttcccatgataaccaattactttagaaatactctgcatgacactataattgaaattagatgctaagttttgtccctcagtggctgaacacccccaaccttttaaaaaacaaaaacttcaaaaataaaaattcaatatttctttttgtaagccatctcttgattttgctatcaccacagaaaaatttgtagagatttgaccccaatacatcaagtactgcagaggcaccaagaccttttctgcttctaaaactgcatttgtggatgtcaccagtctcttaggctgaaactgaaactgcccatgctacaaccttggcgaagtatggagacacctgtgaggacctttttactttttgaaaaatggcaagccaaggacttaacaactgccaactaaaacacaaatccttcacttcacaaaataaaattagatgatcattttaaaaacattaccaaatgtgcaagctgaatatgaagagaaagcctaactcaggaatatcttccagcccagtttgcatttccatataaactgaacctgcaccccctccctccttcaaatgtttgcctttcaatattttgttaggcaggcaagagtcaagagtcatgccaactctagtaatgtggcctctgttcaaacacctaccacagtgtggcaaagggaaaacagcatgggctaagagtggcctggattcaaatcacagtccttttatttactttctatgtgcccttgagttgtttactttagccccctgggccataatttctttctctgtaaaatgagaatacttgcatgaatatgaaacactgagcagttaataaatacgtgcttaataaatgttaggttctttgttatccctgccagttcatcactttcagttcatccattgccagattctctaacttgctggccaaggtatgttgataatttcctatagctgccactcttctattatcaccctcttcccatagcctctgcaaaatgactgcccatccattaagcctagggcaagccagtctcattccatgatagcatgcctcgccacagaagctttttgcactttaagtcagagtgccaaaggcaggcgttgaaattcattctttggcattcttaaggtatagaccagagcaaaggcagagctactcagccactgctccctggcctccaggcagactgctggtccccagctctccaagataggcccttgatctgtgtcccaggcaacacacagcaatctcatgacatttctgggacatattttctactgggatcacagcagctttctagggctctcaataatcttccaatgtttgcatcggtgattgtggtattttcccccaagaaaaccagagtcaaaccatgtttctttaaagggactgtggccctattagccatgctttcatggccaaaatctgcacacctgtctgctttattcaggatagagcagggaggccacagccctgaaacaagggctcaaaaatcacttcctaggtgaggtcagtaaggcctcacagagactactattgggggcaagcagcaggtgaaatgatggtcacttgactcttttactcctggtttcttagcaacctggcctttgagactgggtacagtggagtgagttcaaaccgggccacctggatatgccttgatttagaatggcatcaagtttccactcaattactttcaaaaaggctctcagtgtacttggccttacatgttcctaactcaccaataaaccatgtttggaattcagtcttgaaaatgactactgcctttcagtagcactgttccaaatgcatctctgagtgggtttgcacatgagtgtgcatgtactcactctctatctctctcatctaggctttatctgtcagtactataatcagtgcactaacagggccttggtagaagagtgcaagtaggaaagctctttccctcacactgggcaacattataattatacagacgctacagacaagctacggcccaggcatctgcatagaaacaagtactgatgctctttccagcaacttcccttcaacaaacaggaattagaaatgtccattcctcagatttctgccccattacaccaatttttaggtcctttccaataatagagatagcaaatgaaagggacctggcaagggtttatgtcctaacatttttcacttggtggcaaatattcaagaaaaagggtaaaagccaacccccagaaatgatggccactaaagccacaaaccacaaggtcccttgctaaataagtgtgatataatggggaaaaaaaacttgcataggagcctgggacctgaaatcttgtactggtgtgatcactaccttgctctgcctcagttcccccgactggaaactgggcagttgttagactaaatgattttgaaaagcccttccaatcaagggcttatatggattgtaaaaagagtattttaactcaagtgctgtggttcttgacttttttgggtcacgagcccatttgaaatttagcagaacattatggactatctccccagaaagggcatattgtcatggaattgtgcataccatctcaggggcatcatggagtttctgagtccatggacactgggttaagaactgcttttttcaggagataaaagagtttatgtgcagaaggcaaacatgaagcagcagtgacagctgcctggcctcaatccaccttaacaatttttctagcatttgaccccaaaatagaactcctacaggaccaaacacagtctcctttttttaaaaggaaatgtgttcagcttttgtttgtttcttgattgcttgacaggaagctgtcaaaaaaaaggagaaagaataatccaaatagacctaggcttttacatgcaaaacatgctttgcagatttgtcctaagtggctgcatgtaacagcaggaaggccaccttcctaagtccacatggaggtgctgtgggggcatcactcatcccactcatagcctcgcaggagcagacgggctcttggcaacatactgcagcaccagagcgctgacatggcaccagtgtccatatcctcagtaggagacatgttgagattctccaatgttcagcaaacatttctattcccttccaaccaaggtaagcaatggccccaactcaagtggccttcagttcaaggtaagacccctgagatcagtctttagccccaaatctctcagagttcaatggccctctgaggaagcaggaagttcagggaagagttgaaaactgagctcccctcttcaactcaggtaagtggatatcttggttttggcagagtctggcttgagggagtccagctcttcacagtgttataggaactcaaaacagaccttctgaggggatgaagacagaatacaaaggagatataaacacctgtctaggacatatgctccttattttatggcctcccagagagagtctgaaagtgcaaggctaggaaggagctgctcttcaacacaaaatgactccgcacacaaaggtttgaagaagaaagactctttcagaacctggaaagggtcctctgaggccaaggcttttaaaacctgtagcctcaactttcatctccaggaagtctgccttgagaacttcctgttttccgggaagctgtttcaaaaaacctggtcctggaagccaccacagatgatgtgatttcccccgcattgccagccacaatatctggctttggttctggcttttggggagtagctgcccggcagggaggatctgggggcctcactggggggcggatgatggttggcttttctcctggaggccgcactttgctgaaactgtcagcatccccctccttgtggtgggccaggggccggggagctggtctctttatgtggaaagagggggtcttggtgggcccagagcctggcatgggtccattggtggcctttggggtgatcttggtccctccatcctgcagcctagacaccaacttccccacgtccacctctgggcagggctccaacttgccatccaaaataggcctgcttggggacttcctcccaggatcagtttccccactcctctgaataggtagtttggggtgttgtggtggcttggggggttctatgctgctggtgatagtaccattcggtgtttgatgttggatttcatcttcgctttcatccagggaagaagtatagaaaaccgtcctttctcgcagcaagcgctttgaaatcgtgattggtttgtgccttcttgctgtcacccgaggcggaggcactggcggtgcagcgctttcctcaggtggacctaaatagatcttgccaaagtgctcgattagtatttccaccactatgttctggaatttgatgttcatcatggcggccacagtgtcctcctgagctctcatcagggtgggcccaaagattactcccatgttggagggggtcataagattctctttgctgtgctcacacacattgaccaagtgtcttatcagaagttccagcatctctcggttcttttctggtagcttatataccagggagtgaatagctcctaggcggtaatccaggttgtcagacttggcagcagagaccagctctttgtgaagtctataggtcatgacaggttcagaaagattcctgaggtagaatttcaaggagctggtgattgtcttaatgtcccagtcactattatgaaaatcaacatctcctgggcatttaggatcaaaaaaggcattcagcagcttctgaacctgaatattgctgcccacagtgcggtacaacccttctgtcttgatccctttggtctcaataatattgatgcacttcctgacaaacttgaagcccacttcatttagctccatttcttgctgttttgttatagggctgtggtagataggttctttcccatccatggcttccatccatagccttctgttagcttctgaaagggcctgcagagtgatggttcctggcctttcattagtttctatgtcaaaacagaacctcttgtcgatagactccgtcttccttctcacacagtacttcagtgttaagtccaagggcccctgcttagcacctggcttctgctccataggcgtcatggtcagtgttttggtctctttctcatactggcaatagtatttcacccaggatattcctaaagcccatttctcttgtgtatagagatagccttcaatagttggctgtcctggaagtttgcatgtctggggagcttctttcatccttttcttaagttcttccatctcttcccgggtactggagaaatgatttcttgtattctgtaaactgagttggagctgttgtttgtatgggaggaaatcctgtgtgagctccacagtcaggctgttagaaatgaacagactatgaagaaaggccaagacaggctccacaatattgaacttcttggactcctgaacttcctggatttgataaacataatcaagagaggactcgaaaaaattgtgcctctccttgtccacctgtaggtctgcctcttgtaactgagattctttcttttttgaagacaggtgtaagtgccgatccagtaaagaataaaacctctcaccatccttttcaaatttctttttccgctccttggtgaagcctatttgttccttccggaaattttccaagggtttaatcagcaaatcactagcattgtgtaccatcatcatcctctcattttctacctcgttgagcaattcagcaaattccttgaaggattcagcgatgttaatttcatcatcagtcagagtgtctccaatgaaatcaaactgaaatgactgcagcgtctgggaaaatttctgaacagcagaagaataatttctcatagcgctgataagcgcgttgccgtctttgattacgtctttgatgaatttgttggtcctctccagttcctgctcataacacttgagcctctcgcggaaatcggggctgtccaggtagcagtcgctgaactccagcgggggatgacccatggttctgtttcagtgagactcctgaggagcgctggctggtccggacagagaacaggcgccccggcgatggcttcagggccagggagagctaactatcgcagtcggatcccggcagggtgctgcctagcaagcagcatgtcccttaggcatcgccttcccagataagcagcaaaaaccgcagcccgacttgcctccggagacgggccggatccttcctgagcaattgcaaacgtgacattgggcccgcccaaggtgtaggcgaggttagagctggagctgggaacagcctctttacaggctcctcgctccggagcgagcggaagattccttggccgaatccgcgggcaacccggattgcactgtcccctcccctttcttaaagccaacgcctgcgccccgccccagcgaagcccgaggaccaaaccggagcgctctggctccttcctcaactgttttccttgtaccttagagtttcctgaccagggcccgctggctgctaagacttcttcctggtgcaagggaccggccggccggccgtccttttaggcgccggaagggttaagccagggcggcaatgaaacgtagcctcgctccatagacactgcagcgggaagaggagggcgagagcgcgacgcaca

SEQ ID NO: 122560 - DNA, 410 bp, Homo sapiens
aatcccatacttaccttaatccacctaacatggagactggtatgatttatgtggtccagggcatatatggctatcatcattatatgcaggatcgcatagatgacaatggctggggctgtgcttatcgatctctgcagactatctgctcttggttcaaacatcagggatacacagagaggtccattccaacacacagagaaattcagcaggctctagtcgatgccggggacaaaccagcaacatttgtcggatcgcggcaatggattggatctattgaggtgcagctggtactaaaccaattgatcggtataacgtcaaaaatcctgtttgtcagtaacacccgaaaaaacaagaaagtaggaaacattgtctcctagctcattatttgaccgtagtgttggaagtagttc

SEQ ID NO: 122561 - DNA, 1011 bp, Homo sapiens
atggaaggtgaggaggacatgaagttggtttgggccatgtttaagacctcacatcaaatagtaaatatagatcttatgctggaaatgtcaacctccctggcagctgtaacgcccatcattgaaagggaaagcggaggacaccattatgttaatatgactttacctgtcgatgcagttatatctgttgctccagaagaaacatggggaaaagttcgtaaactcctggttgatgcaattcataatcaactaactgacatggaaaaatgtattttgaaatatatgaaaggaacatctattgtggtccctgaaccactgcactttttattaccagggaaaaaaaatcttgtaacaatttcatatccttcaggaataccagatggccagctgcaggcctataggaaggagttacatgatcttttcaatctgcctcacgacagaccctatttcaaaaggtctaatgcttatcactttccagatgagccatacaaagatggttacattagaaatccacatacttaccttaatccacctaacatggagactggtatgatttatgtggtccagggcatatatggctatcatcattatatgcaggatcgcatagatgacaatggctggggctgtgcttatcgatctctgcagactatctgctcttggttcaaacatcagggatacacagagaggtccattccaacacacagagaaattcagcagctgtcttgtgtatggatgttttatatttttaaatacatcaaggctctagtcgatgccggggacaaaccagcaacatttgtcggatcgcggcaatggattggatctattgaggtgcagctggtactaaaccaattgatcggtataacgtcaaaaatcctgtttgtcagtgttggaagtagttcatctgatagaaaatggtttctttctagccaaggttcagaaattgcctctcaaggacgggaactggctaatcatttccaaagtgaaggaactccagttatgatcgagtatatctga

SEQ ID NO: 122562 - DNA, 1530 bp, Homo sapiens
  misc_feature (1)...(1530): n = a,t,c or g
ttttttaacagttacaggtaaattttttttaatgatttttatgatgaattacatacatagaattaaaagttcaaaaacctaccttaaagggtaagatacgttacttttctatgctagtaggaattcaaatccttgaatgataaagccatttagagtcttattccaaggtcctgctgacagagcctgatgtcacgatttccatgacataatcttgtaactttgtaaaaggctttcctttcccgtcttctctatccagggctggtgcggatggaagggcccagatttttggaacaaggatgcatactataacttatgtcttcctcagcgaccaaatatgatttaaaatatcttgggagtcaaagactgcagtagaagtggtaattataaaattttgtgaataaagaatccagtttaatttttcacattaaatcctggttctagtttgaccatttaaattatgacctttttcaaaggttgtaaatactgcacggagaatgtattttttagacgttcctttaataacttaaaagacaaagcatacacaaccagcatattataggcatgtagaatacatgggttcttaaatggatcttcacttgggaagaaagtttttcgtccttctcagaaggagattagacacaacatatggtaaaancccaaaagcaggagcttaatagatttgccatgaaaatgaaggcgttccttcaagacttccttcataaccccacgtgacatcagcacttcctttttcccactgggtattttctacacttccgaggactccgtttctgtctgaggcacgggcaacacaatcattcctgtcaggggtgttcacttgcttttattgtctgcatacatttaattgttgtaagaaacttggcacagtctggaaatccacatggaccaagcgagatcttcagctgtttgcccgttcttattacataaatcaatttgggcatcactggctacaagcaggcttaggcactccaggcttccaacttttgctgccttgtgtagtggagcttctcctaaaacatcctgctggttgaggtcagcgcccgtttgcagctgccagagaagaaagcaagcaaggccgcttcctgcggctaagtggacaggcgactgcttgcagggatccgggggtgcgttgaccgaggcccctgtctccagcaaatgcttcagaccatccacctttgtccagtcccgcgcccctccgggctggaaacctccccgcccttcacaaccagctctgaccaggcagcgcccagtggtccgtccccgcattaacgagaagacgaatctagaagcttgagcctgcaagacaaaagctcgggctctgtgagcccgaatctcacctcggggttgcaatccagcaacagcatttcccgccaaacctggactggatctaattaacacaagtgatgagtaaatgcatggtgctgtgcgagtcagatgtttggttttccattcctgagttactccacttagaataatagtctcaaattccatccaggttgctgtgaaggccat

SEQ ID NO: 122563 - DNA, 1701 bp, Homo sapiens
aaatcttgtaacaatttcatatccttcaggaataccagatggccagctgcaggcctataggaaggagttacatgatcttttcaatctgcctcacgacagaccctatttcaaaaggtctaatgcttatcatctttccttatgagccatacaaagatggttacattagaaatccacatacttaccttaatccacctaacatggagactggtatgatttatgtggtccagggcatatatggctatcatcattatatgcaggatcgcatagatgacaatggctggggctgtgcttatcgatctctgcagactatctgctcttggttcaaacatcagggatacacagagaggtccattccaacacacagagaaattcagcaggctctagtcgatgccggggacaaaccagcaacatttgtcggatcgcggcaatggattgggatctaattgagggtgcagctggtactaaaccaattgatcggtataacgtcaaaaatccctggtttgtccagcccaaggttccagaaattgccctctccaaggaccgggaactggcttaatccattttccaaagtgaaggaactccagttatgatcgggggaggagttttggcccacacaatactaggagttgcatggaatgagattacagggcagataaaagtttctgattctagatccacattataccggtgctgaagacctgcaagttattttgggaaaagggctggtgcggatgggaagggcccagatttttggaaacaaaggatgcatactataacttatgtcttcctcgagcgaaccaaaatatgatttaaaatatcttggagtcaaagactgcagtagagtggtattataaatttgtgaataaagaatccagtttaatttttcacattaaatcctggttctagtttgaccatttaaattatgacctttttcaaaggttgtaaatactgcacggagaatgtattttttagacgttcctttaataacttaaaagacaaagcatacacaaccagcatattataggcatgtaaatacatgtgttcttaaatggatcttcacttggaagaaaagtttttcatccrtctcagaaggagattagacacaacatatggtaaagccaaaagcaggagcttatagatttgcatgaaatgaaggcggtcttcagacttcctcataacccacgtgacatctgtttttaaaaacacgttaacattaaaaacrtttttttaaaaagagttttawccccaaacttccaccatgcagmcccatttttggtctctagactctggtaagtataaccagtactaaaatgttaatgagaatgaaccaatcctactagaaatacgagtgtcagtattaaatggaataataaatgctatgcaaacaagagatcactgcgggaggaaaaaagcagcagctctgagttacttaccagcacttccttttcccactggtattttttacacttccgagactccgtttctgtctgagcacggcaacacaatcattcctgtcagggtgttcacttgcttttattgtctgcatacatttaattgttgtaagaaacttggcacagtctggaaatccacatgaccaagcgagatcttcagctgtttgcccgttcttattacataacctgaaaacaggataaaaacggagtgaaatgaaacattgaacttaagtcttttttttatatctta

SEQ ID NO: 122564 - DNA, 882 bp, Homo sapiens
cgcccagctggcgggaggttgatcttcagtctctgaaggggagtcctgatgaggagaatgaagagattgaggacctatccgacgcagccttcgccgccctgcatgccaaatgtgaggagatggagagggcacggtggctgtggaccacgagtgtgccaccccagcggcggggcagcaggtcctacaggtcatcagacggccggacaaccccccagctgggcagtgccaacccctccaccccccagcctgcctcccctgatgtcagcagtagccactctttgtcagaatactcccatggtcagtcccctaggagccccattagcccggaactgcactcagcacccctcacccctgtggctcgggacactctgcgacacttagccagtgaggatacccgttgttccacaccagagctggggctggatgaacagtctgtccagccctgggagcggcggaccttccccctggcgcacagtccccaggcggagtgtgaggaccagctggatgcacaggagcgagcagcccgctgcactcgacgcacctcaggcagcaagactggccgggagacagaggcagcgcccacctcgcctcccattgtccccctcaagagtcggcatctggtggcagcagccacagctcagcgcccgactcacagatgagcgggagacagccatctaaacagactcactaactattggcattaaagcttcagaaatctctgcgtttgatattcaaacatcatatgccggaaattttcacagtttttagtgaacttaaggaatttagatcctactttggtatttttttttcttgttttaatttttgttttgtttttgtttccatgttttcttgtcacacaccttgagcacttccttccgttgg

SEQ ID NO: 122565 - DNA, 1991 bp, Homo sapiens
tcgaaccgcaccggattgccagtccacgatttcggcaggcatttgattcagatggcactgaccgtactttatgatttttgtctgatattgaagaggaagaactgaccagaggtgatcccgagcagcgtcatgtacccctgagacgcaagtcagaatggaaatgggctgcagaccgggcagctattgacagccgctggaactggcttcaggctcatgtttctgacttggaatatcgaattcgtcagcaaacagacatttacaaacagatacgtgctaataaggggttgataggtcttggggaggtacctcccccaagagcatacaacagacttatttcttccgcttagttctgaggtgaagacagatcatgggactgataaattgattgagtctgtttctcagccattggaaaaccatggtgcccctattattgggtcatatttcagagtcactgtctaccaaatcatgtggagcactcagacctgtcaatggagttattaacactcttcagcctgtcttggcagaccacattccatggtgactgctctgatgctgaggaacaattacataagaagcaacgactgaatctcgtctcttcatcatctgatggcacctgtgtggcagcccggacacgtcctgtactgagctgtaagaagcggaggcttgttcgacccaacagcatcgttcctctttccaagaaggttcaccggaacagcacaatccgccctggctgtgatgtgaatccctcctgcgcactgtgtggttcaggcagcatcaacaccatgcctcccgaaattcactatgaagcccctctgttggaacgtctttcccagttggactcttgtgttcatcctgttctagcatttccagatgatgttcccacaagcctgcatttccagagcatgctgaaatctcagtggcagaacaagccttttgacaaaatcaaacctcccaaaaagttatcgcttaagcacagagcacccatgccgggcagtctgccagattcagctcgtaaggacaggcacaaattggtcagctccttcctaacaacagccaagctgtcccatcaccaaacccggcctgacaggacccacaggcagcacttagacgatgtgggggccgtgcccatggtggagcgagtgacagcgccaaaagcagagcgcttgctcaacccaccaccacccgtgcatgacccaaaccacagcaaaatgagattgcgagaccattcatctgagagaagtgaagtgttgaagcatcacacagacatgagcagttcgagctacttggcagccacccaccatcctccacacagtcccttggtgcgacagctctccacctcctcagattcccctgcacccgccagctctagctcacaggttacagccagcacatcgcagcagccagtaaggaggagaaggggagagagctcatttgatattaacaacattgtcatcccaatgtctgttgctgcaacaactcgcgtagagaaactgcaatacaaggaaatccttacgcccagctggcgggaggttgatcttcagtctctgaaggggagtcctgatgaggagaatgaagagcctgcctcccctgatgtcagcagtagccactctttgtcagaatactcccatggtcagtcccctaggagccccattagcccggaactgcactcagcacccctcacccctgtggctcgggacactccgcgacacttagccagtgaggatacccgttgttccacaccagagctggggctggatgaacagtctgtccagccctgggagcggcggaccttccccctggcgcacagtccccaggcggagtgtgaggaccagctggatgcacaggagcgagcagcccgctgcactcgacgcacctcaggcagcaagactggccgggagacagaggcagcgcccacctcgcctcccattgtccccctcaagagtcggcatctggtggcagcagccacagctcagcgcccgactcacagatga

SEQ ID NO: 122566 - DNA, 817 bp, Homo sapiens
ttagctgggcgtggtgacagcaatgccctgataaatacccgagtcggtacgtataggagtggccgtagaaacaggcagacatcgcttgacactggcggaggcagacggttgcatgtgagccgatgatcgtgaccatttgcacatccagacctggtgcgcaaaagctccagtctttttgcagcctggctcgagttggctcagcacaaaaggtaaaaagatgcagagaccccagcctcggatgaacctcctctgcgccaacccgctgtccgatttgaatttcttcagcacgcgccccctgactctctccagcctctgggcagccctggtcacagttgagggccgtcgtcagacactggtcagccagctgcaggaaggtggccacggcgtcagccatgagctgctgtgcaagatcttgggccccaaacacgaggctctgcatccccagaaagccaaacggtgctgccagctgccccaagcgcccccggctccgctcggcctcacggtagcatgtctgcatcagcgccaagtcccacggcatctccccaaatgagtaaacctccctgcgcagccgcgtgcctgaggggctctggcgcaggcggtgggacagtcggtccatgccttgagccaggagggtccgcaccgcctcgagcgaggcttccacggtgcgcagcagggtctgcacgacccggggcagctgcgggtccacctcccggcgcaggcacgactcgagcggtcccctgatatccgagatggggatgtgcaggggccctcgcgagggggacgcgagcagggacgctgagcgccctcttctacccat

SEQ ID NO: 122567 - DNA, 795 bp, Homo sapiens
atgcggatgtgcctgcgactacccacgctgatgaccaagtgcactaactggcatgttaccggccacctgtgcagacccacaatagagaaccgacaccggaaccgggacgggggacacaacaacagcatgaatggaaacacgatggccggcggagcagcccgcattggcggagagaaggctcttccgagcggcacccagaggagctttcgcgggcatcgccgcaccttcaccggcagccccaccccaacccgggtccctcgggattctgcccgagcctacgccggcgcaagcgtgggcagcgaggaaccagctgagaggcaggatcaaagagcgtgggagttgaagacaagggaaaactgggggacagaggcgaaaactcggatccgaaaggggatacgcgacgataatgaaacacggcatacattgatgcgttccaagtcccattcgctacatccatctcctggcacaaggaaacacacattcatgaaaatcaaacggatggcaataatggacaaattgaaatccccacatacatccaatcgatcgattgatgggcaagtgacaaccgatcggcacccatatgatgccaatcctgtgcaactccgcacctacaccgtcatccccaccccaacccggttcccacttgattctgcccggtccaactccggcgcaagcgggggcatcgatgaaccatcagagatgcatgaacaaagagcatgggaggagaagacaagggaaaacggggggacagaggcgaaaacgcggaaccgaaagggggactgtaaccacaagtag

SEQ ID NO: 122568 - DNA, 549 bp, Homo sapiens
ccaagaagtttaatccagctggggagagagtctgtaccatcctggtggatccttccattccttccactgcctatcctagctatggagttccccacagctgaggtccttctctcagccttccacatttgtaagttcctccaggccaagttctatcagctgtcccttgaacggcccgtggaaaggctgctcctgacctccctgcagagcacaatgtgctcagccacagcaggcaacctgagaaagttgtatacactcctgagcaactgcatccctccagcctgggagggtgagactccatctaaaaaaaataaaataaatggcaacccctggtctaagataagagataaaacatcaggtggtgaggttgaggtttggggcttggtagcagttgccccagtcatgagatgactcacttaacccgtctcctttaagtgagctgggctgggaggcttcctacaggggaagaggcccctctggggagctgactcagccaggctccctgaacttttttccttgtcccatcctggggtcaataaaactgaatgttgc

SEQ ID NO: 122569 - DNA, 1623 bp, Homo sapiens
  misc_feature (1)...(1623): n = a,t,c or g
cgcaccggcatttccgggtcgacgatcccgtgcagaaatggcgacggagcctggctgtgggcccatctttggaaataagatctgggaatgattgtctagcctccagcctcaacttacttgatgcttgagagactcaaagccccgtggtcagctgccctgcaaagaaagtattttgaccttggcatttggacagctcccatctctcccatggccctgacaatgctgaatgggctcctgattaaggactcaagcccacctatgctgctgcaccaggttaacaagactgcccagttagataccttcaactaccagagctgctttatgcaaagtgtctttgaccatttccctgagatcttatttatccaccggacctataacccaaggggtaaggtcttatataccttcctggtggatggacctcgggtgcagctggagggtcatcttgcccgagcagtctactttgccatccctgccaaggagggacacttgaggcctgtcccagatgttccaagtattcaagaagtttaatccagcatgggagagagtctgtaccatcctggtggatcctcatttccttccactgcctatcctagctatggagttccccacagctgaggtccttctctcagccttccacatttgtaagttcctccaggccaagttctatcagctgtcccttgaacggcccgtggaaaggctgctcctgacctccctgcagagcacaatgtgctcagccacagcaggcaacctgagaaagttgtatacactcctgagcaactgcatccctccagccaagctgcccgagcttcactcacactggctgctcaacgaccgcatctggctggctcaccgctggagaagccgagctgagagcagccactacttccagagcctcgaggtcaccacccacatcctcagccagttctttggtaccaccccatctgagaaacaaggtatggcttctctgttccgttacatgcagcagaactctgcagacaaggcaaacttcaaccagggcctgtgtgcccagaacaatcatgctccctcagacaccatccccgaaagccccaaactggagcagctggtagaatcccacatccagcactccctcaatgccatctgcacagggccagcagcccaactgtgcctgggcgagcttgctgtggtccagaaatccacacacctcattggctctggctcagaaaagatgaacatacagatcctggaagatacccataaggtgcagccccagccccctgccagctgcagctgctactttaaccaggccttccacctgccctgccgccacatcctagccatgctcagtgcccgccgccaggtgctccagcccgacatgctgccggctcagtggacggcaggctgtgctaccagtctagacagcatcctgggcagcaagtggagtgagaccctggataagcacctggcagtgactcacctcaccgaggaggtgggtcagctgttgcagcactgcaccaaggaggagtttgagcggaggtacagcaccctgcgggaactggccgacagctggattgggccttatgagcaggtccaactctgattattctcgatgcccagagatgctcatgcaccttgntgaacaat

SEQ ID NO: 122570 - DNA, 326 bp, Homo sapiens
tgcctgactcagatgtacttcctcatctccttgccaacgtggacacctttctgctggccatcatggcactggaccactattggccatctgcagcgccctgcggtactgctccatcatcacccccggctcattcacacttctactgtgacgcctacctgctcatgaagattgcctgctcaatacatgtcaatcagcatgtgttcctgggggccgtggtcctgttcctggtccctgtgcgctcatcttggtctcctacatccgcattgctgcagccatctccggattccctctcctacaagaaggcgcaaggcatgttccatatgtag

SEQ ID NO: 122571 - DNA, 677 bp, Homo sapiens
  misc_feature (1)...(677): n = a,t,c or g
gacgatctcttatccccagtgcctgactcagatgtacttcctcatctcctttgccaacgtggacacctttctgctgcccatcatggcactggaccactatgtggccatctgcagcgccctgcagtagtgctccatcatcacccccggctctgtcaggggctgnccgtgctagcgtgagcaggctccagcctcatctccccggtccacacggtcatcatgagcagactggccttctgctcctccgcccagatttcacacttctaccgtgacgcctacctgctcatgaagattgcctgctcacatacatgacaatcagcatgtgttcctgggggctgtggtcctgttcctggctccctgtgcgctcatcttggtctcctacatccgcattgctgcagccatcctccggattccatctcctacaagaaggcgcaaggcatgttccatatgtagctcccacctgtctctggtcaccctgttctatggaactgtcctggggatctgcatatgacccccagactccttctcagcccaggacgccatagcaaccatcatgtacactgtggtgacctctatgctaaaccccttcatctacagtctgatgaacaaggaggtccaggaggctgtgagaaggctcttcagtaggggctcacactcatcatggtgctggtgagacgaaa

SEQ ID NO: 122572 - DNA, 3597 bp, Homo sapiens
atggtggccgcagcggcggcaactgaggcaaggctgaggaggaggacggcggcgacggcagcgctcgcgggcaggagcggcgggccgcactgtgtcaacggcggtcgctgcaaccctggcaccggccagtgcgtctgccccgccggctgggtgggcgagcaatgccagcactgcgggggccgcttcagactaactggatcttctgggtttgtgacagatggacctggaaattataaatacaaaacgaagtgcacgtggctcattgaaggacagccaaatagaataatgagacttcgtttcaatcattttgctacagagtgtagttgggaccatttatatgtttatgatggggactcaatttatgcaccgctagttgctgcatttagtggcctcattgttcctgagagagatggcaatgagactgtccctgaggttgttgccacatcaggttatgccttgctgcatttttttagtgatgctgcttataatttgactggatttaatattacttacagttttgatatgtgtccaaataactgctcaggccgaggagagtgtaagatcagtaatagcagcgatactgttgaatgtgaatgttctgaaaactggaaaggtgaagcatgtgacattcctcactgtacagacaactgtggttttcctcatcgaggcatctgcaattcaagtgatgtcagaggatgctcctgcttctcagactggcagggtcctggatgttcagttcctgtaccagctaaccagtcattttggactcgagaggaatattctaacttaaagctccccagagcatctcataaagctgtggtcaatggaaacattatgtgggttgttggaggatatatgttcaaccactcagattataacatggttctagcgtatgaccttgcttctagggagtggcttccactaaaccgttctgtgaacaatgtggttgttagatatggtcattctttggcattatacaaggataaaatttacatgtatggaggaaaaattgattcaactgggaatgtgaccaatgagttgagagtttttcacattcataatgagtcatgggtgttgttgacccctaaggcaaaggagcagtatgcagtggttgggcactctgcacacattgttacactgaagaatggccgagtggtcatgctggtcatctttggtcactgccctctctatggatatataagcaatgtgcaggaatatgatttggataagaacacatggagtatattacacacccagggtgcccttgtgcaagggggttacggccatagcagtgtttacgaccataggaccagggccctatacgttcatggtggctacaaggctttcagtgccaataagtaccggcttgcagatgatctctaccgatatgatgtggatacccagatgtggaccattcttaaggacagccgatttttccgttacttgcacacagctgtgatagtgagtggaaccatgctggtgtttgggggaaacacacacaatgacacatctatgagccatggcgccaaatgcttctcttcagatttcatggcctatgacattgcctgtgaccgctggtcagtgcttcccagacctgattccaccatgatgtcaacagatttggccattccagcagtcttacacaacagcaccatgtatgtgttcggtggtttcaatagtctcctcctcagcgacatcctggtattcacctcggaacagtgtgatgcgcatcggagtgaagccgcttgtttagcagcaggacctggtattcggtgtgtgtggaacacagggtcgtctcagtgtatctcgtgggcgctggcaactgatgaacaagaagaaaagttaaaatcagaatgtttttccaaaagaactcttgaccatgacagatgtgaccagcacacagattgttacagctgcacagccaacaccaatgactgccactggtgcaatgaccattgtgtccccaggaaccacagctgctcagaaggccagatctccatttttaggtatgagaattgccccaaggataaccctatgtactactgtaacaagaagaccagctgcaggagctgtgccctggaccagaactgccagtgggagccccggaatcaggagtgcattgccctgcccgaaaatatctgtggcattggctggcatttggttggaaactcatgtttgaaaattactactgccaaggagaattatgacaatgctaaattgttctgtaggaaccacaatgcccttttggcttctcttacaacccagaagaaggtagaatttgtccttaagcagctgcgaataatgcagtcatctcagagcatgtccaagctcaccttaaccccatgggtcggccttcggaagatcaatgtgtcctactggtgctgggaagatatgtccccatttacaaatagtttactacagtggatgccgtctgagcccagtgatgctggattctgtggaattttatcagaacccagtactcggggactgaaggctgcaacctgcatcaacccactcaatggtagtgtctgtgaaaggcctgcaaaccacagtgctaagcagtgccggacaccatgtgccttgaggacagcatgtggagattgcaccagcggcagctctgagtgcatgtggtgcagcaacatgaagcagtgtgtggactccaatgcctatgtggcctccttcccttttggccagtgtatggaatggtatacgatgagcacctgcccccctgaaaattgttcaggctactgtacctgtagtcattgcttggagcaaccaggctgtggctggtgtactgatcccagcaatactggcaaagggaaatgcatagagggttcctataaaggaccagtgaagatgccttcgcaagcccctacaggaaatttctatccacagcccctgctcaattccagcatgtgtctagaggacagcagatacaactggtctttcattcactgtccagcttgccaatgcaacggccacagtaaatgcatcaatcagagcatctgtgagaagtgtgagaacctgaccacaggcaagcactgcgagacctgcatatctggcttctacggtgatcccaccaatggagggaaatgtcagccatgcaagtgcaatgggcacgcgtctctgtgcaacaccaacacgggcaagtgcttctgcaccaccaagggcgtcaagggggacgagtgccagctatgtgaggtagaaaatcgataccaaggaaaccctctcagaggaacatgttattatactcttcttattgactatcagttcacctttagtctatcccaggaagatgatcgctattacacagctatcaattttgtggctactcctgacgaacaaaacagggatttggacatgttcatcaatgcctccaagaatttcaacctcaacatcacctgggctgccagtttctcagctggaacccaggctggagaagagatgcctgttgtttcaaaaaccaacattaaggagtacaaagatagtttctctaatgagaagtttgattttcgcaaccacccaaatatcactttctttgtttatgtcagtaatttcacctggcccatcaaaattcaggtgcaaactgaacaatga

SEQ ID NO: 122573 - DNA, 671 bp, Homo sapiens
gctctctgtgcaccccaaccgggcaagtgcttctgcacaacaaaggggtcaagtggcacgagtgccagctatgtgaggtagaaatcgataccaagcaaaccctctcagaggaacatgttataatactcttcttattgactatcagttcactttcagtctatcccaggaagatgatcgctattacacagctatcaattttgtggctactcctgacgaacaaaacagggatttggacatgttcatcaatgcctccaagaatttcaacctcaacatcacctgggctgccagtttctcagctggaacccaggctggagaagagatgcctgttgtttcaaaaaccaacattaaggagtacaaagatagtttctctaatgagaagtttgattttcgcaaccacccaaatatcactttctttgtttatgtcagtaatttcacctggcccatcaaaattcaggtgcaaactgaacaatgaggacgcatggacacaggaaggggaacatcacacaccagggcctgttgtggggtggggggaaggggaagggatagcattaggggatatacctaatgttaaatgacgagttaatgggtgcagcacaccaacatggcatatgtatacatatgtaacaaacctgcatgttgtgcacatgtaccctaaaacttaaagtataatt

SEQ ID NO: 122574 - DNA, 8561 bp, Homo sapiens
atggtggccgcagcggcggcaactgaggcaaggctgaggaggaggacggcggcgacggcagcgctcgcgggcaggagcggcgggccgcactgggactgggacgtgaccagggctgggaggccggggctgggggccgggctgcgcctcccgcggctgctgtctccaccgctgcggccacggctgctgctgctgctgttgttgctcccgccgccgctgttgctgctgctgctgccctgtgaggccgaggccgcggcggcggcggcggcggtgtcgggctcagccgcagccgaggccaaggaatgtgaccggccctgtgtcaacggcggtcgctgcaaccctggcaccggccagtgcgtctgccccgccggctgggtgggcgagcaatgccagcactgcgggggccgcttcagactaactggatcttctgggtttgtgacagatggacctggaaattataaatacaaaacgaagtgcacgtggctcattgaaggacagccaaatagaataatgagacttcgtttcaatcattttgctacagagtgtagttgggaccatttatatgtttatgatggggactcaatttatgcaccgctagttgctgcatttagtggcctcattgttcctgagagagatggcaatgagactgtccctgaggttgttgccacatcaggttatgccttgctgcatttttttagtgatgctgcttataatttgactggatttaatattacttacagttttgatatgtgtccaaataactgctcaggccgaggagagtgtaagatcagtaatagcagcgaaactgttgaatgtgaatgttctgaaaactggaaaggtgaagcatgtgacattcctcactgtacagacaactgtggttttcctcatcgaggcatctgcaattcaagtgatgtcagaggatgctcctgcttctcagactggcagggtcctggatgttcagttcctgtaccagctaaccagtcattttggactcgagaggaatattctaacttaaagctccccagagcatctcataaagctgtggtcaatggaaacattatgtgggttgttggaggatatatgttcaaccactcagattataacatggttctagcgtatgaccttgcttctagggagtggcttccactaaaccgttctgtgaacaatgtggttgttagatatggtcattctttggcattatacaaggataaaatttacatgtatggaggaaaaattgatccaactgggaatgtgaccaatgagttgagagtttttcacattcataatgagtcatgggtgttgttgacccctaaggcaaaggagcagtatgcagtggttgggcactctgcacacattgttacactgaagaatggccgagtggtcatgctggtcatctttggtcactgccctctctatggatatataagcaatgtgcaggaatatgatttggataagaacacatggagtatattacacacccagggtgcccttgtgcaagggggttacggccatagcagtgtttacgaccataggaccagggccctatacgttcatggtggctacaaggctttcagtgccaataagtaccggcttgcagatgatctctaccgatatgatgtggatacccagatgtggaccattcttaaggacagccgatttttccgttacttgcacacagctgtgatagtgagtggaaccatgctggtgtttgggggaaacacacacaatgacacatctatgagccatggcgccaaatgcttctcttcagatttcatggcctatgacattgcctgtgaccgctggtcagtgcttcccagacctgatctccaccatgatgtcaacagatttggccattcagcagtcttacacaacagcaccatgtatgtgttcggtggtttcaatagtctcctcctcagcgacatcctggtattcacctcggaacagtgtgatgcgcatcggagtgaagccgcttgtttagcagcaggacctggtattcggtgtgtgtggaacacagggtcgtctcagtgtatctcgtgggcgctggcaactgatgaacaagaagaaaagttaaaatcagaatgtttttccaaaagaactcttgaccatgacagatgtgaccagcacacagattgttacagctgtacagccaacaccaatgactgccactggtgcaatgaccattgtgtccccaggaaccacagctgctcagaaggccagatctccatttttaggtatgagaattgccccaaggataaccccatgtactactgtaacaagaagaccagctgcaggagctgtgccctggaccagaactgccagtgggagccccggaatcaggagtgcattgccctgcccgaaaatatctgtggcattggctggcatttggttggaaactcatgtttgaaaattactactgccaaggagaattatgacaatgctaaattgttctgtaggaaccacaatgcccttttggcttctcttacaacccagaagaaggtagaatttgtccttaagcagctgcgaataatgcagtcatctcagagcatgtccaagctcaccttaaccccatgggtcggccttcggaagatcaatgtgtcctactggtgctgggaagatatgtccccatttacaaatagtttactacagtggatgccgtctgagcccagtgatgctggattctgtggaattttatcagaacccagtactcggggactgaaggctgcaacctgcatcaacccactcaatggtagtgtctgtgaaaggcctgcaaaccacagtgctaagcagtgccggacaccatgtgccttgaggacagcatgtggagattgcaccagcggcagctctgagtgcatgtggtgcagcaacatgaagcagtgtgtggactccaatgcctatgtggcctccttcccttttggccagtgtatggaatggtatacgatgagcacctgcccccctgaaaattgttcaggctactgtacctgtagtcattgcttggagcaaccaggctgtggctggtgtactgatcccagcaatactggcaaagggaaatgcatagagggttcctataaaggaccagtgaagatgccttcgcaagcccctacaggaaatttctatccacagcccctgctcaattccagcatgtgtctagaggacagcagatacaactggtctttcattcactgtccagcttgccaatgcaacggccacagtaaatgcatcaatcagagcatctgtgagaagtgtgagaacctgaccacaggcaagcactgcgagacctgcatatctggcttctacggtgatcccaccaatggagggaaatgtcagccatgcaagtgcaatgggcacgcgtctctgtgcaacaccaacacgggcaagtgcttctgcaccaccaagggcgtcaagggggacgagtgccagctatgtgaggtagaaaatcgataccaaggaaaccctctcagaggaacatgttattatactcttcttattgactatcagttcacctttagtctatcccaggaagatgatcgctattacacagctatcaattttgtggctactcctgacgaacaaaacagggatttggacatgttcatcaatgcctccaagaatttcaacctcaacatcacctgggctgccagtttctcagctggaacccaggctggagaagagatgcctgttgtttcaaaaaccaacattaaggagtacaaagatagtttctctaatgagaagtttgattttcgcaaccacccaaatatcactttctttgtttatgtcagtaatttcacctggcccatcaaaattcagattgccttctctcagcacagcaattttatggacctggtacagttcttcgtgactttcttcagttgtttcctctctttgctcctggtggctgctgtggtttggaagatcaaacaaagttgttgggcctccagacgtagagagcaacttcttcgagagatgcaacagatggccagccgtccctttgcctctgtaaatgtcgccttggaaacagatgaggagcctcctgatcttattggggggagtataaagactgttcccaaacccattgcactggagccgtgttttggcaacaaagccgctgtcctctctgtgtttgtgaggctccctcgaggcctgggtggcatccctcctcctgggcagtcaggtcttgctgtggccagcgccctggtggacatttctcagcagatgccgatagtgtacaaggagaagtcaggagccgtgagaaaccggaagcagcagccccctgcacagcctgggacctgcatctgatgctggggccagggactctcccacgcacgagctagtgagtggcacaccagagccatctgcagggaagggcgtggcggggaaatggctgtgcggtgcgggacggaagactggaaaccctcaaagcatctgactcacctgcatgatcacaagctttctttgacggtttctcccatccgtgttccagcatctaaccttttacttttgcataggaaatacttgatttaattacaggtccagggatgagctgatggttgctggaggaggccagtgtagagccagtgagagaactaggaatgacactcaggttcactgtggaaaactgttcttgggactgtctcaactgtgcaaaaaacaaaagatggagtgtttacaagtagacattcgtcatcagttgttcttgaacatggtcttttaaaaactagtcagatgaattaacttgttttcatctgaagcctgctatcttttttaaaagatgtgctatttattcttgcacgatttaggcaattatctctcttccagggagtacctttttttctagttgagaattaataatggtccatctcttttgatcatatcaagctaggatagaaggggggctattttaaatgtcaaggtcagcagtgttactttgaatgtaaactggtataataggtagttttctatagtaacttgattaatttagtcttaatccatttgaaactctctcttcctttctctctgcctgtccctctccttctccatctcaccctccctctctcacacatacacacacaaacacatacacacaacactaagtgcctagactttaaatagatctagcaattggaaagttagtaagcctaagtttttacataattgcattcctacattcttgtaaaatttaaatagctaccattggcaatctgctttttttctaaaatctgatttgcagccaggaaagaattttctcacccaaggaacatttgatctagcagcagggatgagaggaaagcagaaatgaatgaactgtgaaagctcctgtttttattatcaaaaaggacactgtcaagaaggcgccccctgcccccacccccgtgtcaccctaggcctgataagcgatcagaggaaaggactcattcatgtcacgcttccttgagcagaaaagagcactgagagcacttgggacccctggatcagagagcatctgtgtgtcctgcagcctcctctgaacttgtggttcattctcaggctggggtggactcagatgccaggaaagggacagcctcccattgtcaggcagaagctgcccaaagcctggagaaggacttgtttgccctctttcccccaggaggggctcgacccacccaccctccctctcagaccaaggtggtggctgtgaggagggcagcaaatgctgacaaggatgaaaagcacatggaaaaaaatggacgaggagggaaaactctgccaaatggaaaatgaccaaatttaagagggtgggacagtcccctgctcctctcccagagggcactgcttggaaattgtgttttccccatttatggtgctctgtattctggcattatgcagcagcctcccagaagctctcttctgcttcaaaacctgggatctctggcattaccctattgggatggaccgctggacagcaatgctcgagtttgtgaatttggagagatactcaaaagagctaaaactgcagcattttacctttaaatgcagtgcctagagagagagtattgtctcttccccaacactaaccccactcccatgaagaattgcctggaaagatgttttcaaggaatttgaaccataaaacactatctgatgcacagaacacctctactttgagactcacctctcataaagcttctttttcacattactgttaaagaccagacgttctagaaaagacccctcctctcatgagctcccccatccctgctacagaacacagcacccatggcgcctgcagtggactggccccttaattcccacaggcccccccagcaaggccaaagggaggcccctgggtattgtcctcctacaaggaagatcctctttgtttgttcaaaggaccagttttcctaggccaaagaagtctcttccccatgttagtcctatgccttgaaatatcatgcaccatgacccacagccatctggttatgtcttatttttttcctaaaagataatgtttatttttaaaaaggaaggaagaagcaagtgaagtttcattctgctccagcggtggggaagccgctgaatccacctgcttctcctttgcaaccgacagcaaacagctttctccggcctcagggcagaaaaagggaatggcagggagtaagaggcgctgggctcggagcctgtttccaagaaggaattggttgtcatctggcagtgttgcgcgtcacaagagagcctgtatataaattaaaatagtcaagacaacactgaccttgcacttgtacataactatacagtagtgtccagaatgttcagacattcggagtgtacataaaacagaaaaaatcttcatgtatttttattaaatataacaatgtctgagtttcacctaagatgtttttgtgccatatgctggatatccaggttctcgccaggccccgatacatgaataacaaacccaagaaacgcatccccattgtgtgatgtgttcagatgcatctggcaccaattaggtatttcttaaaacaggactcatctgtcagagtgcacatgaaaaatcaggcagggaatcgaaacgacagcgctggaggagactcaggaagcagaggcgtccctgccgctgcccttggccctgcaagcacatcatgaccctttctggcagcctcttggtgctctgggtagtgagggatgaccagtcttgtcctgagaaatgtttctcttagtctttaagttcaaagactaacctgtagcaatcagactttccaaaagggggttctccattttttgtagttttgtctaaatttttaatgaccatttcctggaatcagtttattatactgaaaactgggggtgggagtagggagctagtttgttgataaatagttcccatttccccgtggagaatttgacataccctggactcctgtgtgcctcctgccatccctgcacacagcctggggagaagcctgtgcctccccgtgtggagagaaggcaaccccagatcccctgagctaacccggaggaaaggcagtcctggacagaagactgtcagcagaaggaaagtactggactacccgtgggtaagtcctgccattcaagactggagacacctgggaaataaaaagagcagggcactgctggtgggaagaggcattttaccttccagtgcaaatcctgctcctttgatttaatggggtgtactggggccaggggctgattcacttccttgggagatggtggtgttttcatgaacatctttgatccttccatttcatttattcatccatccattcaacaagtatttgctaaacactaacttaagctaatgctagggtagtgactgagatgtaaaaatagattttagaattaaaacaaaatccaagtcctcacacccctgtcatcccaggagatctttccttgtggtggtttctgtgagaattggccatcctgaggacacagccaggacggcagaggcctcctggcctcagggcatgccctgcctaccttctgaaatgtttaccccattgaccaaacttggctccagccattgcggtggtttctagatagccaggcccaccaagagatattgccccttgatgagagtcaaacaccctgcctacaaggagatgttttgaaatggagaggaaaattggcacctcatcttttaaaggcagtaatggaattgattttcagtaactgaatttgtgcacaaaacattctaaacactagtgaagcctgtttcgttgaactaattctggctctggaaatgtttttgttttatagttatttacgatttcgtttgtttggattcaagcttagtttgttaatatgtataatttagcatctattacactcatgtaaatatggagtaagtattgtaaactatttcattgcggggattgtgggtgttatacatacatttaggactgcaattttttggtattttttgtattgtaaaataacagctaatttaagcaggaacaagagaactaagggaggtctgtgcattttaaacacaaatgtgaagaacttgtatataaacaaaagtaaatactataatacaaacttccttctgaaataaaagtagatctggt

SEQ ID NO: 122575 - DNA, 3490 bp, Homo sapiens
atggattatggagtcttaactagactaactggatcttctgggtttgtgacagatggacctggaaattataaatacaaaacgaagtgcacgtggctcattgaaggacagccaaatagaataatgagacttcgtttcaatcattttgctacagagtgtagttgggaccatttatatgtttatgatggggactcaatttatgcaccgctagttgctgcatttagtggcctcattgttcctgagagagatggcaatgagactgtccctgaggttgttgccacatcaggttatgccttgctgcatttttttagtgatgctgcttataatttgactggatttaatattacttacagttttgatatgtgtccaaataactgctcaggccgaggagagtgtaagatcagtaatagcagcgatactgttgaatgtgaatgttctgaaaactggaaaggtgaagcatgtgacattcctcactgtacagacaactgtggttttcctcatcgaggcatctgcaattcaagtgatgtcagaggatgctcctgcttctcagactggcagggtcctggatgttcagttcctgtaccagctaaccagtcattttgggactcgagaggaatattctaactttaaagctcccccagagcatctcataaagctgtggtcaatggaaacattatgtgggttgttggaggatatatgttcaaccactcagattataacatggttctagcgtatgaccttgcttctagggagtggcttccactaaaccgttctgtgaacaatgtggttgttagatatggtcattctttggcattatacaaggataaaatttacatgtatggaggaaaaattgattcaactgggaatgtgaccaatgagttgagagtttttcacattcataatgagtcatgggtgttgttgacccctaaggcaaaggagcagtatgcagtggttgggcactctgcacacattgttacactgaagaatggccgagtggtcatgctggtcatctttggtcactgccctctctatggatatataagcaatgtgcaggaatatgatttggataagaacacatggagtatattacacacccagggtgcccttgtgcaagggggttacggccatagcagtgtttacgaccataggaccagggccctatacgttcatggtggctacaaggctttcagtgccaataagtaccggcttgcagatgatctctaccgatatgatgtggatacccagatgtggaccattcttaaggacagccgatttttccgttacttgcacacagctgtgatagtgagtggaaccatgctggtgtttggaggaaacacacacaatgacacatctatgagccatggcgccaaatgcttctcttcagatttcatggcctatgacattgcctgtgaccgctggtcagtgcttcccagacctgatctccaccatgatgtcaacagatttggccattcagcagtcttacacaacagcaccatgtatgtgttcggtggtttcaatagtctcctcctcagcgacatcctggtattcacctcggaacagtgtgatgcgcatcggagtgaagccgcttgtttagcagcaggacctggtattcggtgtctcttgaccatgacagatgtgaccagcacacagattgttacagctgcacagccaacaccaatgactgccactggtgcaatgaccattgtgtccccaggaaccacagctgctcagaaggccaggtatgagaattgccccaaggataaccccatgtactactgtaacaagaagaccagctgcaggagctgtgccctggaccagaactgccagtgggagccccggaatcaggagtgcattgccctgcccgaaaatatctgtggcattggctggcatttggttggaaactcatgtttgaaaattactactgccaaggagaattatgacaatgctaaattgttctgtaggaaccacaatgcccttttggcttctcttacaacccagaagaaggtaggaatttgtccttaaggcaggctgcgaataatgcaggtcatctcagaggcatgtccaaggctcaccttaaccccatggggtcgggccttcgggaagatcaattgtgtcctactggtgctgggaagatatgtccccatttacaaatagtttactacagtggatgccgtctgagcccagtgatgctggattctgtgggaattttattcaggaacccagttacttcggggactgaaggctgcaacctgcattcaacccacttcaatggtagtgtctgtgaaaaggcctggcaaaccacagtggttaagcagtgccggacaccatggtgccctttgagggacagcatgtggagattgcaccagcggcagctctgagtggcatgtggtgcagcaacatgaaggcagtgtgtggactccaatgcctatgtggcctccttcccttttgggccagtgtatggaatggtatacgatgaggcacctgcccccctgaaaattgttcaggctactgtacctgtagtcattgcttggagcaaccagggctgtggctggtgtactgatcccagcaatactggcaaagggaaatgcatagagggttcctataaaggaccagtgaagatgccttcgcaagcccctacaggaaatttctatccacagcccctgctcaattccagcatgtgtctagaggacagcagatacaactgggtctttcatttcactgtccagtttgccaatggaacgggccacagtaaatgcatcaatcagagcatctgtgagaagtgtgagaacctgaccacaggcaagcactgcgagacctgcatatctggcttctacgggtgatcccaccaattggagggaaatgtcagccatgcaagtgcaatgggcacgcgtctctgtgcaacaccaacacgggcaagtgcttctgcaccaccaagggcgtcaagggggacgagtgccagctatgtgaggtagaaaatcgataccaaggaaaccctctcagaggaacatgttattatactcttcttattgactatcagttcacctttagtctatcccaggaagatgatcgctattacacagctatcaattttgtggctactcctgacgaacaaaacagggatttggacatgttcatcaatgcctccaagaatttcaacctcaacatcacctgggctgccagtttctcagctggaacccaggctggagaagagatgcctgttgtttcaaaaaccaacattaaggagtacaaagatagtttctctaatgagaagtttgattttcgcaaccacccaaatatcactttctttgtttatgtcagtaatttcacctggcccatcaaaattcaggtgaatgtggaggttagggataggtgggctttcaaggactggttcacctttaaccatggaagcatggtcactggacggaggctgttgctgtttgccaatgttcagaagcataatcaacctcagaagcaagtcaccacaaacatatga

SEQ ID NO: 122576 - DNA, 6678 bp, Homo sapiens
  misc_feature (1)...(6678): n = a,t,c or g
tcagagggcctgggaacggagcatcctgggaaagatagttcccagacgggcttcccgcgctgcttcccggcgccttcggcggcgagaggactccatttcccgacgtgccccgggaccgggaggcggagggccgccgtggcgtcgggccccgggccgagccgggggtgggggctcgaggcgcctccgcggccgtggacgagcgtccgtgcggcctggtccgggccatgtccgcgtgagtgttcttttcgctgtcgccgctcccgctccggccctggcccctctgcccggcagcgcggcgcaccatgggctccattctcagccgccgcatcgcgggggtggaggacatcgacatccaggcgaactcggcctatcgctaccctccgaagtccggaaactactttgcttcgcactttttcatgggaggagagaaattcgacaccccccaccctgaaggtcacctctttggagagaacatggatctgaacttcctgggcagccgcccgagccagtttccctacgtcactcctgccccccacgagcccgtgaagacgctgcggagcctggtgaacatccgcaaagactccctgcggctggtgaggtacaaagacgatgccgacagccccaccgaggacggcgacaagccccgggtgctctacagcctggagttcaccttcgacgccgatgcccgcgtggccatcaccatctactgccaggcatcggaggagttcctgaacggcagggcagtatacagccccaagagcccctcgctacagtccgagaccgtccactacaagagaggggtgagccagcaggtctccctgccctccttcaagattgacttctcggaatggaaggatgacgagctgaactttgacctggaccggggcgtgtttccagtagtcatccaggctgtggtggacgaaggagatcagtggtggaagtgactggccacgcccacgtgctcttggctggctttgaaaagcacatggacggcagcttctctgtgaagcctttaaagcagaagcaaattgtggaccgggtcagctacctcctgcaggagatctatggcattgagaacaagaacaaccaggagaccaagcccttcggacgacgagaacagcgacaacagcaacgagtgtgtggtgtgcctgtccgacctgcgggacacgttgattcctgccctgccgccacctgtgcctctgtacctcctgcgccgacacgctgcgctaccaggccaacaactgccccatctgccggctgcctttccgggccctcctgcagatccgggcggtgcggaagaagccaggagccctgtcccccgtgtccttcagccccgtcctggcccagagcctggagcatgatgagcactcttgtccctttaaaaaatcaaagccgcaccccgcctccctggccagcaagaaacctaaaagggaaacaaactctgacagcgtcccacctggctacgagcccatctcgctgctcgaggcgctcaacggcctccgggctgtctccccggccatcccctcggcccctctttatgaagaaatcacctattcaggcatctcggacggcctgtcccaggccagctgtcccctcgcggctatcgaccacatcctggacagcagccgccagaagggcaggccgcagagcaaggcccccgacagcaccctacggtccccgtcttcccccatccacgaagaggatgaggagaagctctccgaggacgtggacgcccctcccccactgggtggcgcagagctggccctgcgggaaagcagctcccctgagagtttcataacagaagaggttgatgagtcgtctgtcaccacaagcaaggggacccgagcagcttccattgagaatgtcctgcaggacagcagccccgagcactgtggccgaggcccacctgctgacatctacctgccagccctggggcccgactcctgctctgttggtatagacgagtaagccggtacgtgaccttccagacgcgcttcgggggctctgacgcgcgtccttggagagaggagccctcccctgctctctggcgggggttccttctggtttttgggtcttcgtccgcatccgcatcttcccaggggccctggattccgaatccagagctctccagtggctgctgcaccttcccccagaaagtggcctcctggggggtcctgactttcggggccagaggtctctccatctggactaggcggccggtcaggctcttcttccagccttgaggggccctggaacagtcccagcccaggcagggagacagacacagcccaggtgcgccagagccactgtccactgcgggaggcaggagcttgagggatgagggcagcaccgtggagggaaccccagggagacatggggtgagcgtcccaaggggagaggcctgggcctggccttgttccggatggtcccaccatgagttcgcatcggtcctgcagcagacacgttaggacgctcagcaggtccactcccgtgttccggtcatggctttaacaattcatggggaaagaatgcgccccgattgggagagcccctggatcacgtcttcccaagctcagtccctgtctcttggagggagtccgtcctcgaggggccctctggtgcccaggggagagtatcttgcgtcctgtcctgagggcgtccgctcacacagccacctgctcccccgctccctccttcccttgtcagcatggccaccgtgggcctggcatcaccatgggcctggcacacagtccctcgtgggctgcctttgtgccatgagcccactgctgccgactcacctgtccctcccagtactggaaccttctggaacaccagcactaaaagataggaggccctgtgaggttggcatcccccatccccccccaagaggtgccctctaccagggtggcccaggtgagtgttttacagaaggcggctctgtccaggcagtggttcgcacctataagcccggtactttgggagaccgaggggatagatcacttgagcccaggaattcaagatcagtgtagaaaacatagaccccctctctataaaaaataaaaaattggcttgggcgtggtagcttgtgcctgtggtcccagctactcaggggtgctgaggtgggaggattgccggagctggggaggtcaaggcccactccagcctgagacgctgtctcaataaaaaaaaatacacacacacccacccacccactccagcctgagaccctgtctcaagaaaaaaaaaaatacacacacacacacacacacacacacacacacacacacacacacacacacacgggggagagagagaaggcagctccaggagtgccaccaaaatgtaggcagacggattggggaccctctgccttcccagagggtcttggcacacaagctgcgtgcagctctggtctgccgaggcccatgcagcctgctgggaggtgcctggccgggggtgcaggctctaagaggccctttccccttgggtggacttgagccgggtcagggagaacttcgcttcttttgactgcgctctgcattcccatgaacctctgtcttcttgagcccagcgagtccctctgttgacccctgtcctgagccattatacccctagattgaaacagtcagcacctttcagacggccccggcctgcgcatcggtggaaggtgccatgcgaatgtcacgattcaggtcaagcttccggagctggggagtgcaggtgtgatctagaacagggctcacagcctcggaaacctgctctcgccgcggcccccgaagaaaatagacgcccttcaccggagagtggggcctgggccgtgtctgctgggagccatgtgtcagggctggtggctgggtgtcaggcagccctgaggccatgctggccccgtcccaggctctgcaccagcaccattgcccaagccccagggacgccagacccatccggggacagcgcccggcggcgtcgtgcaggccacagtctgggcattggggctctgtgggaggctcctctctttgccttgcagtagccatccgggggctactctgagcacgggcttgttctcacccagggccgctcccgacccctgcaccctgggttgaccgagttccaccctaacccagccgtaagaaccttggcaggacagtggctggccacatcccaggaaaccggaaccagggcaagggcaggaggcccagagggcatccactgcggtgccgtgtcgcgctctgactcggggctgcagatctgctgtgggtgtccggggatctgggatcgtctgtcccaagagggacacagcgtatttggcacagttagggagtccccgggcccttggtgtgctcacatctgagtgaatgctgttgtggccacaggcggcgggagtgggggtgctggatggcccagcccctctggggctccagatcggtaggagcgggtggcgtggcaccaggcatccgagtgtgaccctcctccctctgctcccacctgcaggacggcccacctccatggagacggcccacggcctcgccaccaccagccccacctggcctccacttggtggccccagccccgatcccagcgccgccgagctgaccccactctgagagcctggccgagctggcagcatggagccctcggctccccagactttgccgaggggctgctccggaccccgttgtgagccggcctcctgtctgcatgccccctgtggccaccaggctccgaggggccgtggtgactcttgatcaaagagcacagtgaactgtcccttctgagtctcccttttctacagttgatatatttgtaactggtacaagatgaaggacagcagctttccatccctagttcagagcccccgttccccagggtcctgtgggctgagcggctggggctggggctgcccacgtgtggcctccgctggctctgcctgctcctgcaacagtgcggtccctgcccggagaactcaggaggcctgcagaagagaactgattggtggtcgaagcaccatcttcacagatgttcaggggcagtggggggctccaggcacggtcaatgaaggaaacagtgcctgtccacccaccctgcgtgtcactgtggcggcctggctgtcgctgctttttgtcctctgccgtgtttgcgcggcctcagtgccctccctggtgcgtctgcgctggggccctcagtgctcggggccttggggtgcatgggcgccgccctgggcagctagagtgtctcagcccggtgctgggcctggccgaggggcggaggcacagctgcttccagcagccagcattcagtggccttgtcaccaagctccacacctcctcctggtgctggctttggtgacatcacaaggcccctccaggtgcaggggcttctgtttggcaggcccctgccagggaggacctggtggcctcctcattctcttttgccattggaatgtccccttgcagttctcttctctttttttttttttttgagatggagtttcactcttgctgcccaggctggagtgcagtggctcaatctcgggtcactgcaacctccgcctcccgggttcaagtgatcgtcctgccttaggctcctgagtagctggggattacaggtgcctaccagcatgctcggctaatttttttgtatttttagtagagaagggatttcaccatgttggccgggctggtctcaaactcctaaggtcatccacctgcctcggcctcccagagtgctgagattacaggcgtgagcctccgcgcccggcccccttgcagttctctctgatttggtttgttctgtctcaggcttctgtggcaggactggcccagggaggaggaagccagcagcacacctggggaatggggtcccggccgggaggcttggcctctgggcgacctcgtcctgttttgtttgtttgtttgtttgttttttttataggtaaacctcctggggccgcagatggcaaagggagtgcctgggccgtggtgacccagggcatggatccacccctgcggagccctgggccaggcaaggtgtctgctgctcacctggctctggagggctgccctgcagtgggggcctggggacaggtcggctgtggggcagctcagtaccctccctgaggctcacggtggctccgagcatgagctctgcctcctgggcgagacccagcagtggacagcacggtcctcacacccaagctccctgcacacccaggccagccacccctcccgctcgtgcacagggcacgcaagantgcgcttcacacgtacacacacacaaatgcacgcccacttgcacatgctcacgcacacgttcacacatgcacactcacgctcacacatgctgtcacgcatacacacacgcacatactcctgcacatgttcccatgcatgtgtgtgcactcggaccgagcatctcccacgcacctctaccccaccccaagcacctctctccccccatgcacctctccccaacaaacacacacagccccttgcaccgcccgccccccgcccccaccaaggccccagcctctggccatcagtcctggtgccagagctttgcgtgaagttcgggccgcagagtggcccgctgggactcccatgtgctgccgtctgatgtgctcagatgggctcatcgttggttcgtttttactgtatatttatagtaataaaatcatgcagcaat

SEQ ID NO: 122577 - DNA, 2871 bp, Homo sapiens; identical to SEQ ID NO: 121868

SEQ ID NO: 122578 - DNA, 409 bp, Homo sapiens; identical to SEQ ID NO: 121870
  misc_feature (1)...(409): n = a,t,c or g

SEQ ID NO: 122579 - DNA, 539 bp, Homo sapiens; identical to SEQ ID NO: 121871
  misc_feature (1)...(539): n = a,t,c or g

SEQ ID NO: 122580 - DNA, 2187 bp, Homo sapiens; identical to SEQ ID NO: 115216

SEQ ID NO: 122581 - DNA, 445 bp, Homo sapiens; identical to SEQ ID NO: 121873

SEQ ID NO: 122582 - DNA, 2655 bp, Homo sapiens; identical to SEQ ID NO: 121874

SEQ ID NO: 122583 - DNA, 837 bp, Homo sapiens; identical to SEQ ID NO: 121875

SEQ ID NO: 122584 - DNA, 882 bp, Homo sapiens
atgggtatcagttcgggtaacaccatcgcaagcggtcgctttgtttcggcagaccacctgccgctcattgcgctggaaatcactattacgccactggactccgacgcgtcagtgatgatttcaacaggcattgacgccacgcaaaccaatcacggtcgccaacatctcgacgaaacccaggtgcgggtgtttggtcagcatctgatgcaggggagctactccacccaggatggacgcagtgatgtggccatcagctgttgctgtaaggtgagcggtgatgtgcagcaatgctataccgccaaagagcgccgtttattgcaacataccagtgcgcagcttcatgcaggcgagacaatgacgttgcaaaaactggtgtggatcgactggcgggatgacaggcaagctgctttagacgagtggggcagcgcgtcgcttcgccagcttgaaatgtgcgcgcagcagagttacgaccaacttcttgcagcatcaacagaaaactggcgtcaatggtggcagaaacgtcgtatcacggtaaatggcggcgaagcgcacgatcagcaagcgttagattatgcgctttatcatctgcgcatcatgacgcctgcccacgacgagcgcagcagcattgcggcaaaaggcttaaccggcgaaggctacaaaggccacgatcactgggatacagaatttatctttggtccggcagctgttgaaggcggcattcagatgtactgggcgcagcatctgcaagagttcagttggagcgccgagccgctgaaatcgttgttcccggaaggcggttttgccctgcacggtaactcaaaaatctttggtgccgtgggcatttctttagcgatgtacttcactgccgcaccggaaaatcgg

SEQ ID NO: 122585 - DNA, 1047 bp, Homo sapiens; identical to SEQ ID NO: 121876

SEQ ID NO: 122586 - DNA, 2285 bp, Homo sapiens; identical to SEQ ID NO: 121877
  misc_feature (1)...(2285): n = a,t,c or g

SEQ ID NO: 122587 - DNA, 855 bp, Homo sapiens
ttttttttttttttttgataaacagacatgtttaatgatagcttgctcttcacagagatgtctacagagacttttaatctataatccaggagtatataaccatgcagcacagaccaattagccaaatgcaaaataaactagattcttaccacaactatcctataaacactgcaactattctttccaaaaggaccctaatcttatgtgaaaaacacctactgtgggggaaccagaaacctagctatctggccaaaaaggaaaaaatagcaattcagtggttaaattggtgaaagcaggaaatgtatgcccctttaactgtgctgcttgtttgctggctggttggttggctggctggttggttggctggcttgtttggcttgcttgcgggcaaggtgcttgcttgcttgctgctgcctgttgttgactgctgttgctgcctgcctttgggtccttccttaattttgttctttttgtctctccttccttcaaaccccatcccatgttagcttcttaaggaggtttgaaataagccattctgaaaacttattcacattccttggaagctcaccacagtgctgatcttcttcttcccatcgggtagctcttaacagacacttgttgtccttgcgggctcaaagccatccaaaagtaccttttctttggaatgggtttggttcggaccgtcatacttcttacaaggtgatataggacgctggcccgacgtccgggcacttctggaaaaagtctggtcagctcccgtcaggaactgctcggctctccaacaacaccaactcgcggcgacgctggctcgactccctcggcttaagcccctagcagtgagagccggagtcgacc

SEQ ID NO: 122588 - DNA, 1278 bp, Homo sapiens
ctaggaaagagataggatgatttgaactagagtggtactggtaagaggtggtcgtattttgaaaatatctttgaagtaaaattcttccttccagctcaacagagcaaatccacctactgctctgcaaactttggggaagggtcctcttgggtctacaggattccgccgcttttccttgtattcctgcaaaacgatgacatgctcctctccaggtacctgaaccttaggactcaaagggtagagaaagttcacaggcagaatcttcacaatacatgcacaaaagaaaggcacttctagtaggagctgtgtctccatgttcctagtcctcacggccacctggcaagggtgaggaactgagactgggttgaggacacacagcctgtgagtggtacagccagggccgccacccaggcccagagctctctccgtttctctaaggaccaggctgaaacgcagggcatgtgatctcaatgcccgccgcccgacccatggagccctgcttggggactgggggcctcgatgttctccttcaccatctgcggccagatctccctccagcagccttgccaggcagtgcctggcctggagaaggggccctgccccttccggggcaggtctccgggaggggcaggtccgcggcgtgccttcaacccggcgcctggccagggcgcggggctgccccggtccgccgccgtcctcgccccgcagccgccggctccgtccgggaggctgagctccttgagagcccgcacttagcggcacaccgcgactgctaattagcccggaagctgaatagcggcgggtacataccgcaagcggagtacggaaagcacgcagggctgccgctacctggcgcacgcgcactgagctgcggctgccgagcccgtgccccggtccctgccgctttacctcacccgctcttggatcaccaggacccgggtccagccgggaggatctacgggaccggggctggaacccagacgttggacggctcagcgccccgaacgtcccgggccctggggagcacacagatgcccgaagcacgtcccggccttgctggctggggagttgcaggggtctggtctcgcgggtaaagccggtgaacgcgaggctccgcatcctgccccggccgcggcgctgcgccctgctcgctctgcccggtgcagctgtaagcggggaccttagagctaggaaccctcggggatcgcggcctccgaaagccccatcgggcaggggaggccccctgctgcctccccaccgcagcacccctaggcgcat

SEQ ID NO: 122589 - DNA, 2495 bp, Homo sapiens
ggtatcagaggcagtccagttctcctgaggatccagcagaaactgcatcaccaacctatgccttgatagcggcctgccaatcagagattcagctgcagaccaggcagcagccatgtgatatggctccaggcccacttgactgtgatccagtcaagggatccagcaggaaaagaatgtttctcatgaatgctcctccagtggttgctctccagcccaaatgggaggcctctgtcccgccagggagctttaggttccccgagtgcttctcggaggctgacaagggcgtggagagcatgtcgcccaccatgcacaaggagctgcctgcgttggctgcctgtggtcttgttgctgactttgaccccgtgggggaggaggaaactgcagactttggcccattggtgctagattcagacagtgacgattccgtggaccgggacattgaggaggccatccaggagtacctgaaggcggaggcagtagatgtaagcgggaactggctcacagcagtgcccaactgccctgtgttccccaaaacttgtacctggctcaggtggtgtggccctggcagccaggtgggatccagcaaggaccagggctctgcctccccagtcagcatgagcagagcagactcctttgagcagagcatcagggcagaaatagaacagtttctgaatgagaaaagacagcatgagacccaaaaatgtgatgggtcagtggagaagaaaccagacacacatgaaaattcggcgaagtcactctcgaaatcccaccaagagccggctacaaaggtggtgcaccggcagggcctgatgggcgtccagaaggagttcgccttctgcagacctcccccggttagcaaagacaaacgtgcagcccagaagcctcaggtccaaggtcacgaccacgaccacgcaggagaaggagggcagcacaaagccagcaacccccaccgcccttcagaagcagtacagaataaaagtgggattaaaaggagtgccagcaccgcaaggaggggaaagcgagtcacgagcgccgtacaggcgcccgaggcgtccgactccagcagcgacgacggcattgaggaggccatccagctgtaccaggtgcagaaaacacgcaaggaggccgacggggacccgccccagagggtccagctccaagaggaaagagcacctgcccctcccgcacacagcacaagcagcgccacaaaaagtgccttgccagagacccacaggaaaacacccagcaagaagaagccagtgcccaccaagaccacggaccctggtccaggggatctggacgctgaccattcccccaagatcccaaaggaaaccaaagctccacctccaacgagcccggcttccaggagcaagtttgtggaatggtcctcttgccaggcagacacctccgctgagctgataagcagtcctggacattttcaagacgatcctgccggccctatggagggcagcgatgggtccctgtccgcaagcccactcttctactcccccaacgtgccttcccgctctgatggtgacagtagctccgtggacagcgacgacagcattgagcaggaaatctggacgtttttggccctcaaggtgcagtctagaagtttgctggccagaggagcagctgggcaggctcctgagagagtggaaaaacaggcacctgcaggtgctgaagagctgcctaagtccaagagagacagctgcgagggctccaggaagaaaccccccagtgtctttggcagcagggccgagaggacgaagccccggccttcctgcagttcagtggacagcgacgatagcatcgaactggagattaggaagtttttggtggaaaaggccaaggagtcgggagtcccaggccaggcccagccctgtctttggaagcccacacttgctggcgaagaaggactgcggtcaccggccaagcaggaaggattaacctcagcgattgttgctggcatcagtgcagccctgggaccagagcacacctgggtgcctggtgctacgactcccaggaccccaagtgtggccccagtccttgttccagcagtccccacccactggaagaagctggcccctgcctgtgggggcccaggccagtccctcatcgacattgactttcacagggtccggcggaactctaccctagggcccttcatcttccgaggctatgactcagcacctccaggcccttggaccctggagaatgacagccacacagagactcccccactcagaacccctcgcacttggagcccctcccaggagcaggactgcagcaacaccaacttctgcgccatagtgtcgggcttgaggaaggtgcctgagccagggctctcagtgaatctgaggtccaccttcctgctggcgtcgatgcggcccaacacctcgagctactgtcgcttcgctgggtcactgaccccgcctgactgcgagcccacggtgctctggaccgtcttcgaggaccccatacccatccgatga

SEQ ID NO: 122590 - DNA, 2466 bp, Homo sapiens
atgcacaaggagctgcctgcgttggctgcctgtggtcttgttgctgactttgaccccgtgggggaggaggaaactgcagactttggcccattggtgctagattcagacagtgacgattccgtggaccgggacattgaggaggccatccaggagtacctgaaggcggaggcagtagatgtaagcgggaactggctcacagcagtgcccaactgccctgtgttccccaaaacttgtacctggctcaggtggtgtggccctggcagccaggtgggatccagcaaggaccagggctctgcctccccagtcagcatgagcagagcagactcctttgagcagagcatcagggcagaaatagaacagtttctgaacgagaaaagacagcatgagacccaaaaatgtgatgggtcagtggagaagaaaccagacacacatgaaaattcggcgaagtcactctcgaaatcccaccaagagccggctacaaaggtggtgcaccggcagggcctgatggacgtccagaaggagttcgccttctgcagacctcccccggttagcaaagacaaacgtgcagcccagaagcctcaggtccaaggtcacgaccacgaccacgcaggagaaggagggcagcacaaagccagcaacccccaccgcccttcagaagcagtacagaataaaagtgggattaaaaggaacgccagcaccgcaaggaggggaaagcgagtcacgagcgccatacaggcgcccgaggcgtccgactccagcagcgacgacggcattgaggaggccatccagctgtaccaggtgcagaaaacacacaaggaggccgacggggacccgccccagagggtccagctccaagaggaaagagcacctgcccctcccgcacacagcacaagcagcgccacaaaaagtgccttgccagagacccacaggaaaacacccagcaagaagaagccagtgcccaccaagaccacggaccctggtccaggggatctggacgctgaccattcccccaagatcccaaaggaaaccaaagctccacctccaacgagcccggcttccaggagcaagtttgtggaatggtcctcttgccaggcagacacctccgctgagctgataagcagtcctggacattttcaagacgatcctgccggccctatggagggcagcgatgggtccctgtccgcaagcccactcttctactcccccaacgtgccttcccgctctgatggtgacagtagctccgtggacagcgacgacagcattgagcaggaaatctggacgtttttggccctcaaggtgcagtctagaagtttgctggccagaggtgagagctgccctcaggctgcccagggcccactttcaccacctggcctcagcagccagaccggcagccccaaggcccctctctctaaaacactggacccactcctggctgcaaaaggaagcatagaggcggctgccaaggcacagccagcgaggccccgggatgggagggcgccgctagggtgggacctttccatccagggcacagccagcgaggccccgggaggagagggcgccgctagggtgcccggtgacactcgcacgtcacagggccagggtaagacagacgaggcaaggcacctagacaagaagaagagctccgaagacaaaagcagttccctggacagtgacaaggacctggacacagccatcaaggacttgttaagagagtcccagggcccagctcccagccctggctccttgtctgacaacagcagttcagtggacagcgacgatagcatcgaactggagattaggaagtttttggtggaaaaggccaaggagtcgggagtcccaggccaggcccagccctgtctttggaagcccacacttgctggcgaagaaggactgcgatcaccggccaagcaggaaggattaacctcagcgattgttgctggcatcagtgcagccctgggaccagagcacacctgggtgcctggtgctacgactcccaggaccccaagtgtggccccagtccttgttccagcagtccccacccactggaagaagctggcccctgcctgtgggggcccaggccagtccctcatcgacattgactttcacagggtccggcggaactctaccctagggcccttcatcttccgaggctatgactcagcacctccaggcccttggaccctggagaatgacagccacacagagactcccccactcagaacccctcgcacttggagcccctcccaggagcaggactgtagcaacaccaacttctgcgccatagtgtcgggcttgaggaaggtgcctgagccagggctctcagtgaatctgaggtccaccttcctgctggcgtcgatgcggcccaacacctcgagctactgtcgcttcgctgggtcactgaccccgcctgactgtgagcccacggtgctctggaccgtcttcgaggaccccatacccatccgatga

SEQ ID NO: 122591 - DNA, 3345 bp, Homo sapiens
atgcacaaggagctgcctgcgttggctgcctgtggtcttgttgctgactttgaccccgtgggggaggaggaaactgcagactttggcccattggtgctagattcagacagtgacgattccgtggaccgggacattgaggaggccatccaggagtacctgaaggcggaggcagtagatgtaagccggaactggctcacagcagtgcccaactgccctgtgttccccaaaacttgtacctggctcaggtggtgtggccctggcagccaggtgggatccagcaaggaccagggctctgcctccccagtcagcatgagcagagcagactcctttgagcagagcatcagggcagaaatcgaacagtttctgaatgagaaaagacagcatgagacccaaaaatgtgatgggtcagtggagaagaaaccagacacacatgaaaattcggcgaagtcactctcgaaatcccaccaagagccggctacaaaggtggtgcaccggcagggcctgatgggcgtccagaaggagttcgccttctgcagacctcccccggttagcaaagacaaacgtgcagcccagaagcctcaggtccaaggtcacgaccacgcaggagaaggagggcagcacaaagccagcaacccccaccgcccttcagaagcagtacagaataaaagtgggattaaaaggaacgccagcaccgcaaggaggggaaagcgagtcacgagcgccgtacaggcgcccgaggcgtccgactccagcagcgacgacggcattgaggaggccatccagctgtaccaggtgcagaaaacacgcaaggaggccgacggggacccgccccagagggtccagctccaagaggaaagagcacctgcccctcccgcacacagcacaagcagcgccacaaaaagtgccttgccagagacccacaggaaaacacccagcaagaagaagccagtgcccaccaagaccacggaccctggtccaggggatctggacgctgaccattcccccaagatcccaaaggaaaccaaagctccacctccaacgagcccggcttccaggagcaagtttgtggaatggtcctcttgccaggcagacacctccgctgagctgataagcagtcctggacattttcaagacgatcctgccggccctatggagggcagcgatgggtccctgtccgcaagcccactcttctactcccccaacgtgccttcccgctctgatggtgacagtagctccgtggacagcgacgacagcattgagcaggaaatctggacgtttttggccctcaaggtgcagtctagaagtttgctggccagaggagcagctgggcaggctcctgagagagtggaaaaacaggcacctgcaggtgctgaagagctgcctaagtccaagagagacagctgcgagggctccaggaagaaaccccccagtgtctttggcagcagggccgagaggacgaagccccggccttcctgcagttcagtggacagcgacgatagcatcgaactggagattaggaagtttttggtggaaaaggccaaggagtcgggagtcccaggccaggcccagccttgtctttggaagcccacacttgctggcgaagaaggactgcgatcaccggccaagcaggaagctgcctggtgctacgactcccaggaccccaagtgtggtgactcgaagaagccttccaaaaagcgtgtgaaaaggaagccctactctactaccaaggtgacttcagggagcacattcaatgagaacacaagaagctatgctgtgcacaccaaccagtgtaggagacctcatggctcccgggtaaagaagaagaggtacccacaagaagatgacttccatcatacagtcttcagcaaccttgaaagattggacaagcttcagcccactcttgaagcctctgaggagtctctagttcacaaggacagaggagatggagagaggccagtcaacgtgagggtggtgcaggtggcccctctgaggcgtgaatctagtaagtattctggaatcacttaccgagaaaacaatctggatgccaagaaagctccccatgaggacaccgtacacaacatcactaacgaggatgcctcacacgatatcactaacgaggacgctgtccacggcatcgctaacgaggccgccgacaagggcatcgccaacgaggacgccgcccagggcatcgccaacgaggacgccgcccacggaatcgccagcgaggacgccgcccagggcatcgccaacgaggtcgccgcccagggcatcgccaacgaggacgccgcccagggcatcgccaaggaggacgccgcccacggcatcgccaacgaggatgctgcccacggcattgctaacgaggatgccgtgcacggcatcgctaatgaggactccgtatacgacatcgctaatgaggatgccatatatgacatcgctaatgacaccgtacaaggcacactaacgaggacgctgtacacgacatcgctaatgaggacaccatacaaggcattggtaatgaggacgttgtatatgacatcgctaacaaggacactctacaagccgtcgctaacaaggacactgtacacaacatcgctaatgacggcaccatacaagacatcaccaatgagggcgctttatacgacattgctaatggcaccgacaaggcacgctaacgtggacactgtacacgacattgctaatgaggactccgtatacgacatcgctaatgagggtgccgtatatgacatcgctaatgacaccgtacaaggcacgctaacgaggacgctgtacacgacatcgctaatgaggacaccatacaaggcatcggtaatgaggacgctgtatacgacatcgctaacgaggacaccatacaagccgtcgctaacaaggacactgtacacaacatcgctaatgatggcaccgtacaagacatcaccaatgagggcgctttatacgacattgctaatgataccgacaaggcacgctatcgtggacgctgtacacgacatcgctaatgaggactccgtatacgacatcgctaatgagggtgccgtatatgacatcgctaatgacaccgtacaaggcacgctaacgaggacgctgtacacgacatcgctaatgaggacaccatacaaggcatcggtaatgaggacgctgtatacgacatcgctaacgaggacaccatacaagccgtcactaacaaggacactgtacacaacatcgctaatgacggcaccgtacaagacatcaccaatgagggcgctttatacgacattgctaatgataccgacaaggcacgctaacgtggacgctgtacacgacattgctaatgaggacaccgtataa

SEQ ID NO: 122592 - DNA, 1593 bp, Homo sapiens
atgacaaagaaaagtcctggacctgatagctttactggacattggtgtgtcatttctataccatctggctacgagaggagccgactgaaagtcacactgccggaggaggggagaggtgctcttccgtttctggtgtctgtagccatctccagtggtagctgcagtgataataatgctgcggtgccgacagttctggaaggagcaacaacagtgatttcagcagcagcagtattgcgggatccccacgatggagcaagggaaataattctggaagcaatgacaatatcagctgtggctatagcagctgagatcagttggacctcacagtgtggattgtgccttcaccctggaatgtttatgccctatcgccatggtgatgggattagggatctgctgcccttggtcctaagtgccactatctgtgctgagtttttcaaaggtgactcgaagaagccttccaaaaagcgtgtgaaaaggaagccctactctactaccaaggtgacttcagggagcacattcaatgagaatataagaagatatgctgtgcacaccaaccagtgtaggagacctcatggctcccgggtaaagaagaagaggtacccacaagaagatgacttccatcatacagtcttcagcaatcttgaaagattggacaagcttcagcccactcttgaagcctctgaggagtctctagttcacaaggacagaggagatggagagaggccagtcaacgcgagggtggtgcaggtggcccctctgaggcttgaatctagtaagtattctggaatcacttgccaagaaaacaatctggatgccaagaaagctccccatgaggacaccgtacatgacatcactaaccaggacgccacacacgacatcgctaacgaggatactgtccacggcatcgctaacgaggccgccgacaagggcatcgccaacgaggacgccgcccagggcatcgccaacgaggacgccgcccacggaatcgccagcgaggatgccgcccagggcatcgccaacgaggtcgccgcccagggcatcgccaacgaggacgccgcccagggcatcgccaacgaggacgccgcccagggcatcgccaaggaggacgccgcccacgggatcgccaaggaggacgccgcccagggcatcgccaacgaggacgccgtccacggcatcgccaacgaggacgccacccatggcatcgccaacgaggacgctgcccacggcattgctaacgaggatgccgtgcacggcatcgctaatgaggactccgtatacgacatcgctaatgagggtgccgtatatgacatcgctaatgacaccgtacaaggcacgctaacgaggacgctgtacacgacatcgctaatgaggacaccatacaaggcatcggtaatgaggacgctgtatacgacatcgctaacgaggacaccatacaagccgtcgctaacaaggacactgtacacaacatcgctaatgacggcaccgtacaagacatcaccaatgagggcgctttatacgacattgctaatgataccgacaaggcacgctaacgtggacgctgtacacgacattgctaatgaggacagcgtataa

SEQ ID NO: 122593 - DNA, 3093 bp, Homo sapiens
atgcacaaggagctgcctgcgttggctgcctgtggtcttgttgctgactttgaccccgtgggggaggaggaaactgcagactttggcccattggtgctagattcagacagtgacgattccgtggaccgggacattgaggaggccatccaggagtacctgaaggtgggatccagcaaggaccagggctctgcctccccagtcagcatgagcagagcagactcctttgagcagagcatcagggcagaaatagaacagtttctgaatgagaaaagacagcatgagacccaaaaatgtgatgggtcagtggagaagaaaccagacacacatgaaaattcggcgaagtcactctcgaaatcccaccaagagccggctacaaaggtggtgcaccggcagggcctgatgggcgtccagaaggagttcgccttctgcagacctcccccggttagcaaagacaaacgtgcagcccagaagcctcaggtccaaggtcacgaccacgaccacgcaggagaaggagggcagcacaaagccagcaacccccaccgcccttcagaagcagtacagaataaaagtgggattaaaaggagcgccagcaccgcaaggaggggaaagcgagtcacgagcgccgtacaggctcccgaggcgtccgactccagcagcgacgacggcattgaggaggccatccagctgtaccaggtgcagaaaacacacaaggaggccgacggggacccgccccagagggtccagctccaagaggaaagagcacctgcccctcccgcacacagcacaagcagcgccacaaaaagtgccttgccagagacccacaggaaaacacccagcaagaagaagccagtgcccaccaagaccacggaccctggtccaggggatctggacgctgaccattcccccaagatcccaaaggaaaccaaagctccacctccaacgagcccggcttccaggagcaagtttgtggaatggtcctcttgccaggcagacacctccgctgagctgataagcagtcctggacattttcaagacgatcctgccggccctatggagggcagcgatgggtccctgtccgcaagcccactcttctactcccccaacgtgccttcccgctctgatggtgacagtagctccgtggacagcgacgacagcattgagcaggaaatctggacgtttttggccctcaagggcacagccagcgaggccccgggaggagagggcgccgctagggtgcccggtgacactcgcacgtcacagggccagggtaagacagacgaggcaaggcacctagacaagaagaagagctccgaagacaaaagcagttccctggacagtgacaaggacctggacacagccatcaaggacttgttaagagagtcccagggcccagctcccagccctggctccttgtctgacaacagcagttcagtggacagcgacgatagcatcgaactggagattaggaagtttttggtggaaaaggccaaggagtcgggagtcccaggccaggcccagccctgtctttggaagcccacacttgctggcgaagaaggactgcgatcaccggccaagcaggaaggtgcctggtgctacgactcccaggaccccaagtgtggtgacttgaagaagccttccaaaaagcgtgtgaaaaggaagccctactctactaccaaggtgacttcagggagcacattcaatgagaatacaagaagatatgctgtgcacaccaaccagtgtaggagacctcatggctcccgggtaaagaagaagaggtacccacaagaagatgacttccatcatacagtcttcagcaaccttgaaagattggacaagcttcagcccactcttgaagcctctgaggagtctctagttcacaaggacagaggagatggagagaggccagtcaacgtgagggtggtgcaggtggcccctctgaggcttgaatctagtaagtatactggaatcacttgccaagaaaacaatctggatgccaagaaagctccccatgaggacaccgtacacgacatcactaacgaggacgccacacacgacatcgctaacgaggatactgtacacgacatcgctaacgaggccgccgacaagggcatcgccaacgaggacgccgcccacggcatcgccagcgaggacgccgcccacggcatcgccagcgaggacgccgcccagggcatcgccagcgaggacgccgcccagggcatcgccagcgaggacgccgcccagggcatcgccaaggaggacgccgcccagggcatcgccaacgaggacgccgcccagggcatcgccaacgagggcgccgcccagggcatcgccaaggaggacgccgcccagggcatcgccaaagagggcgccgcccacggcatcgccaacgaggacgccgcccagggcatcgccaacgaggactccgcccacggaatcgccagcgaggacgccgcccacggcatcgccatcgctaatgaggatgccatatatgacatcgctaatgacaccgtacaaggcacgctaacgaggacgctgtacacgacatcgctaatgaggacaccatacaaggcattggtaatgaggacgttgtatatgacatcgctaacaaggacactctacaagccgtcgctaacaaggacactgtacacaacatcgctaatgacggcaccgtacaagacatcaccaatgagggcgctttatacgacattgctaatgataccgacaaggcacgctaacgcggacactgtacacgacatcgctaatgaggactccgtatacgacatcgctaatgagggtgccgtatatgacatcgctaatgacaccgtacaaggcacgctaacgaggacgctgtacacgacatcgctaatgaggacaccatacaaggcatcggtaatgaggacgctgtatacgacatcgctaacgaggacaccatacaagccgtcgctaacaaggacactgtacacaacatcgctaatgacggcaccgtacaagacatcaccaatgagggcgctttatacgacattgctaatgataccgacaaggcacgctaacgtggacgctgtacacgacattgctaatgaggacaccgtataa

SEQ ID NO: 122594 - DNA, 2922 bp, Homo sapiens
atgcacaaggagctgcctgcgttggctgcctgtggtcttgttgctgactttgaccccgtgggggaggaggaaactgcagactttggcccattggtgctagattcagacagtgacgattccgtggaccgggacattgaggaggccatccaggagtacctgaaggtgggatccagcaaggaccagggctctgcctccccagtcagcatgagcagagcagactcctttgagcagagcatcagggcagaaatagaacagtttctgaatgagaaaagacagcatgagacccaaaaatgtgatgggtcagtggagaagaaaccagacacacatgaaaattcggcgaagtcactctcgaaatcccaccaagagccggctacaaaggtggtgcaccggcagggcctgatgggcgtccagaaggagttcgccttctgcagacctcccccggttagcaaagacaaacgtgcagcccagaagcctcaggtccaaggtcacgaccacgaccacgcaggagaaggagggcagcacaaagccagcaacccccaccgcccttcagaagcagtacagaataaaagtgggattaaaaggagcgccagcaccgcaaggaggggaaagcgagtcacgagcgccgtacaggctcccgaggcgtccgactccagcagcgacgacggcattgaggaggccatccagctgtaccaggtgcagaaaacacacaaggaggccgacggggacccgccccagagggtccagctccaagaggaaagagcacctgcccctcccgcacacagcacaagcagcgccacaaaaagtgccttgccagagacccacaggaaaacacccagcaagaagaagccagtgcccaccaagaccacggaccctggtccaggggatctggacgctgaccattcccccaagatcccaaaggaaaccaaagctccacctccaacgagcccggcttccaggagcaagtttgtggaatggtcctcttgccaggcagacacctccgctgagctgataagcagtcctggacattttcaagacgatcctgccggccctatggagggcagcgatgggtccctgtccgcaagcccactcttctactcccccaacgtgccttcccgctctgatggtgacagtagctccgtggacagcgacgacagcattgagcaggaaatctggacgtttttggccctcaaggtgcagtctagaagtttgctggccagaggagcggctgggcaggctcctgagagagtggaaaaacaggcacctgcaggtgctgaagagctgcctaagtccaagagagacagctgcgagggctccaggaagaaaccccccagtgtctttggcagcagggccgagaggacgaagccccggccttcctgcagttcagtggacagcgacgatagcatcgaactggagattaggaagtttttggtggaaaaggccaaggagtcgggagtcccaggccaggcccagccctgtctttggaagcccacacttgctggcgaagaaggactgcggtcaccggccaagcaggaaggtgactcgaagaagccttccaaaaagcgtgtgaaaaggaagccctactctactaccaaggtgacttcagggagcacattcaatgagaatacaagaagatatgctgtgcacaccaaccagtgtaggagacctcatggctcccgggtaaagaagaagaggtacccacaagaagatgacttccatcatacagtcttcagcaaccttgaaagattggacaagcttcagcccactcttgaagcctctgaggagtctctagttcacaaggacagaggagatggagagaggccagtcaacgtgagggtggtgcaggtggcccctctgaggcgtgaatctagtaagtattctggaatcacttaccaagaaaacaatctggatgccaagaaagctccccatgaggacaccgtacacaacatcactaacgaggatgcctcacacgatatcactaacgaggacgctgtccacggcatcgctaacgaggccgccgcccagggcatcgccaacgaggacgccgcccagggcatcgccaacgaggacgccgcccacggaatcgccagcgaggacgccgcccagggcatcgccaacgaggtcgccgcccagggcatcgccaacgaggacgccgcccagggcatcgccaacgaggacgccgtccagggcatcgccaacgaggacgccgcccacggcatcgccaacgaggacgctgcccacggcattgctaacgaggatgccgtgcacggcatcgctaatgaggactccgtatacgacatcgctaatgaggatgccatatatgacatcgctaatgacaccgtacaaggcacgctaaagaggacgctgtacacgacatcgctaatgaggacaccatacaaggcattggtaatgaggacgttgtatatgacatcgctaacaaggacactctacaagccgtcgctaacaaggacactgtacacaacatcgctaatgacggcaccgtacaagacatcaccaatgagggcgctttatacgacattgctaatgataccgacaaggcacgctaacgcggacactgtacacgacatcgctaatgaggactccgtataccacatcgctaatgagggtgccgtatatgacatcgctaatgacaccgtacaaggcacgctaacgaggacgctgtacacgacatcgctaatgaggacaccatacaaggcatcggtaatgaggacgctgtatacgacatcgctaacgaggacaccatacaagccgtcgctaacaaggacactgtacacaacatcgctaatgacggcaccgtacaagacatcaccaatgagggcgctttatacgacattgctaatgataccgacaaggcacgctaacgtggacgctgtacacgacattgctaatgaggacaccgtataa

SEQ ID NO: 122595 - DNA, 1122 bp, Homo sapiens
atggctggagattcagggagaagagtcattgccgcatcctatgataagacagtgagggcctgggacctggagacaggcaagctgctgtggaaggtcaggtatgataccttcatcgtctcctgtaagttttctcctgatggtaaatacgtggtctcaggcttcgacgtggatcatggaatctgcataatggacgccgagaacatcaccaccgtttccgtcatcaaagagctgccaagagactatcgaccagtgcattatttcagacccatggtggccgccacctccgagaactcacacttactgcaggtattatcagagtcagctggaaaggcaacgcctgacccagggacacacagtaagcaccaactgaatgcctccaaacgggctgagttgcttggagagacgcctattcaaggttcagctacttcagtgttagaatttctgtcccaaaaagacaaagagagaatcaaagaaatgaagcaggcaactgacctgaaagcagctcagctcaaggccaggagtctggcccagaacgctcagagcagcagagcccagctctcccctgcagcggctgctgggcactgctcttggaacatggcattaggtggtgggacggccaccttaaaagccagcaacttcaagcctttcgccaaagatccggaaaagcaaaagcgatacgacgagttcttagtacacatgaaacagggtcagaaaggctcttttctcatttctggagggtttgataggactgtggctatttgggatgtagcagaaggctaccggaagctctctttgaagggtcatgcaacggatgcggtaggcttgtcggcggccaccggcggaccgggcttcgagatggcctccccgccgcggtgctccccgacagcccatgacagggaatgcaagttgccgccaccctccgcccccgccagcgagtattgtcccggcaagctgtcctgggggaccatggcgagggccttaggccgcttcaagctgtcgatcccgcacacgcacctgctggccaccctcgaccccctggccttggacagggaaccaccaccgcatctgttgcatgagaagcaccaggtgcccggagaaattgatctggggcgaccaggatag

SEQ ID NO: 122596 - DNA, 1074 bp, Homo sapiens
atggagtcggccgacttctacgaggcggagccgcggcccccgatgagcagccacctgcagagccccccgcacgcgcccagcagcgccgccttcggctttccccggggcgcgggcccgccgaagcctcccgccccacctgccgccccggagccgctgggcggcatctgcgagcacgagacgtccatcgacatcagcgcctacatcgacccggccgccttcaacgacgagttcctggccgacctgttccagcacagccggcagcaggagaaggccaaggcggccgtgggccccacgggcggcggcggcggcggcgactttgactacccgggcgcgcccgcgggccccggcggcgccgtcatgcccgggggagcgcacgggcccccgcccggctacggctgcgcggccgccggctacctggacggcaggctggagcccctgtacgagcgcgtcggggcgccggcgctgcggccgctggtgatcaagcaggagccccgcgaggaggatgaagccaagcagctggcgctggccggcctcttcccttaccagccgccgccgccgccgccgccctcgcacccgcacccgcacccgccgcccgcgcacctggccgccccgcacctgcagttccagatcgcgcactgcggccagaccaccatgcacctgcagcccggtcaccccacgccgccgcccacgcccgtgcccagcccgcaccccgcgcccgcgctcggtgccgccggcctgccgggccctggcagcgcgctcaaggggctgggcgccgcgcaccccgacctccgcgcgagtggcggcacgggcgcgggcaaggccaagaagtcggtggacaagaacagcaacgagtaccgggtgcggcgcgagcgcaacaacatcgcggtgcgcaagagccgcgacaaggccaagcagcgcaacgtggagacgcagcagaaggtgctggagctgaccagtgacaatgaccgcctgcgcaagcgggtggaacagctgagccgcgaactggacacgctgcggggcatcttccgccagctgccagagagctccttggtcaaggccatgggcaactgcgcg

SEQ ID NO: 122597 - DNA, 1086 bp, Homo sapiens
atgtgggtggcgaaacatgggcggcacatggcccgcgcttaccaggcaagcctcggctcaatgcccaagttctccattgcggccaatcatagccccggctcttgttttaatcttcggccgtttccccttcggcaaagttgtcgggcgctcagtgccgccggcctgccgggccctggcagcgcgctcaaggggctgggcgccgcgcaccccgacctccgcgcgagtggcggcagcggcgcgggcaaggccaagaagtcggtggacaagaacagcaacgagtaccgggtgcggcgcgagcgcaacaacatcgcggtgcgcaagagccgcgacaaggccaagcagcgcaacgtggagacgcagcagaaggtgctggagctgaccagtgacaatgaccgcctgcgcaagcgggtggaacagctgagccgcgaactggacacgctgcggggcatcttccgccagctgccagagagctccttggtcaaggccatgggcaactgcgcgcgccactacatgcccccccagtggacagagctgccctctggccacgccgccagctggctagggctgatcagaagccttcagtttcaggacagctgccagggtgtggaccatggggactgctttctgctgctctggagcgccgtcctcatcatgtaccccaccagccttgctgtcatctccatgaccttctccaactacgtgctgcagcccgtgttccccaactgcatcccccccaccacagcctcccgggtgctgtccatggcctgcctgatgctcctgacatgggtgaacagctccagtgtgcgctgggccacgcgcatccaggacatgttcacaggcgggaagctgctggccttgtccctcatcatcggcgtgggccttctccagatcttccaaggctcttttctcatttctggagggtttgataggactgtggctatttgggatgtagcagaaggctaccggaagctctctttgaagtgtttgcctgaggtgactgaatgtgatttgctgcaggtaaaacgcagttcccaggaccatcaagcaggagcagatgtgctgtggtcagtggctcggccgtcttga

SEQ ID NO: 122598 - DNA, 3786 bp, Homo sapiens
atgaacttgccaagagctgagcgccttcgctccacaccgcagcgcagcctccgggactccgatggggaagacggtaaaatcgatgtcctgggagaggaggaagatgaagacgaggtggaagacgaggaggaggaggcgagccagcagttcctagagcagtcgctccagccggggctgcaggtggcccggtggggcggggttgcgcttccccgagagcacatcgagggcggcggcggcccgagcgacccctcagagtttggcaccgagttcagggcaccgccaaggtctgcggcggcctctgaagatgcccggcagccggcaaagcccccctactcgtacatcgcgctcatcaccatggccatcctgcaaagcccgcacaagcgcctcacgctcagcggcatctgcgccttcattagtggccgcttcccctactaccgccgcaagttccccgcctggcagaacagcatccgccacaacctctcgctgaacgactgcttcgtcaagatcccccgcgagccgggccgcccaggcaagggcaactactggagcctggaccccgcctcccaggacatgttcgacaatggcagctttctccggcgtaggaagcgtttccagcgccaccaactgaccccgggagcccacctgccccaccccttccctctacctgctgcacacgccgccctgcacaacccccgcccaggccctctgcttggggcccctgccccgccgcagccagtcccgggggcctaccccaacaccgcccccgggagacgcccttacgctctgctgcacccgcatcctcctcgctacctactgctctcggcccccgcctatgccggggcaccgaagaaagcagaaggcgcggacctggcgaccccggcacccttcccgtgctgcagccctcacttgcgaccgtcaagcctgtcggacaattttgcagcaacagcagcggcatcaggaggaggactgcgcaacggctgcgctcccaccaagggcgcggtgctgggcgggcacctgtcggccgcgtcggcagctgctgcggtatcaggcggtggcagagggctctgggctgacatcgctagagccctttgggcggagagggacctcaccagtttttttagtatcgcccacgcccagttccctggccgagtccgcagggccctcctagagccaggcagccgtcagccccatagccccaccggcgtccagaagagaccacttttagcaaatccggcagggctggggcagtctaagagttcggaaacaactgagaatagaggggtcctatgtcatgccagcttctcgctggtttacgctccaactcccctctgtccgttgtgcgaaaacgtctccgggccgaccttccttcatttattgccaacaaacgtcctgggagagcggctacagccgctgaacccagaagggactttctctaggctttcttggcaccctcccaatcatcttccttctcttgcccgagggcagatcacccggctacgaacgagcttcgggtccacctgtttggaagcacccaggcggcttggaggggtccggccttcgggcgcgacccgcaggggttgccttgcccggctcgcggaacggacgtttacccgtcgcagctacgaacccaccaacgacaccaagcaccggccgggcagaccaggcgtcgtggaggcgccccagccccccagccccccgcaacgacgcgtcccagggcactcgcagcacgcactgaagaagacgctacggaagtctccgttttccagactcgggggaattaggaaacgcgcccggcgaccctcgggcagtagcaccgggccaggggtggaagccgacctgggccagggccggatttcttcctcccggcctctgcgccaccgcccccggtgcaggacgcgctttgctctcgccgagacccagacgcgccgaaagcctcgcgcgggcagttccccgccccacgccccgggctgcgcgttctcccgcgaacgctctgccgagtgcgcgcaacggcgcgcggatctcccccggaccgcgctcccgcgcacgcctgaccggagcacccgcttcacgggggcgttctgcgcgtccttcctccccggtgcgatttccgttctttttcctctcgcggtccccaggagcccaggcacccctcgacgccgctgccggcggtaccgggaaccctccccggggctccctgcgggcccgaagccgccttcccgaggcggcggagttgggcagctccgggccccgcgccgccccgcgccgccccgcggagccggagtttctctccggagtctggacacagctctccgcttcgtcgccgcgcactggaccccggtagcctgtagcctgcccgggaagctgggctgcgccggcctggggcgaaggtccaaggggcgcgggggccgggacgcggggctgtggcgacgaccggccctctgcgaaccctcaggccggcgggtccgggccacaggctgggagtggagctggcggccactggggagtagagaggacgcccaggaacaggtgcaccagggtcccggcggctgggccgagggtcgcaagcagaggggaccggcggctgccagcaagtcccaagcagatgcctccggcggggcagccgcactctacagcgcccattccgcgtacatcgagtatcgccaagctgggggcatcggcaaggcccaacgtcgcagcatgaaggagcgaaagctggagaagaagaagcagaaggagcaggagcaagtgagagccacgagccaaggtgggcacttgatgtcggatctcttcaacaagctggtcatgaggcgcaaggcaggatccctgcagaccaggcccatgacaaacaccgtctccagcgggcagagcaaaggaagggcacagcgccaggcagtggtgcagctgcctgtcaggatgaggcctacttctagtgaaactgggcagacaaaaggcagtgagaaatgtgatctcggggtggtggaggctctagggaaaggaaaaggcaggagtgaacttccacacagcagcaatggcagaaccaaaggtggctttgacctccacgagggctcagatccaggccaacagcttgtccaggacagggtgccgggtgtatcactggtccaggagcactatgctggcagaatccctttggtgcctgatggccctgccttcgtgggaacagaggctaaggctttgagttacagctgcctccccaacagtgcatccccttctccctcctcagcctcagggccaaagccagacctgctgagcccctccctccagccggctggtctgagcagtcacagcccggctttgggctccgatggcagcagacggcagggcgagggctgcccggaggagccgaggctggcggacagcttggccctgagcttgaggggaaggcagcgatgggacaaaggacggaggtctaggaagagggtctgcagagcagaaagcacgggtaggggcggcctgacgctcggaagacaacggatgggagccgtgtgcacgtcgggagctcggagtgagcgtgagttccgtgcccaggcccgcgactcggtccaccaggacagcgctccgggtcgacggggtcctggagccgcgctcggggagggcgcagcggaggcgcagtacccgcccaacttcatccggagcgcgctgtcgtccgtcgacctgcgcgaccgtcagggccgcaccacgggggtgggcagcgacggcaggtacttcggcaggacggccgtcgaggtccagcagcatctcaaggacatctacaagagggatacctaa

SEQ ID NO: 122599 - DNA, 1287 bp, Homo sapiens
atgaacctgccaagagctgagcgccctcgctccacaccgcagcgcagcctccgggactccgatggggaagacggtaaaatcgatgtcctgggagaggaggaagatgaagacgaggtggaagacgaggaggaggaggcgagccagaagttcctagagcagtcgctccagccggggctgcaggtggcccggtggggcggggttgcgcttccccgagagcacatcgagggcggcggcggcccgagcgacccctcagagtttggcaccaagttcagggcaccgccaaggtctgcggcggcctctgaagatgcccggcagccggcaaagcccccctactcgtacatcgcgctcatcaccatggccatcctgcaaaacccgcacaagcgcctcacgctcagcggcatctgcgccttcattagtggccgcttcccctactaccgccgcaagttccccgcctggcagaacagcatccgccacaacctctcgctgaacgaatgattcgttaagatcccccgcgagccgggccacccaggcaagggcaactactggagcctggaccccgcctcccaagacatgttcgacaatggcagctttctccggcgtaggaagcgtttcaagcgccaccaactgaccccgggagcccacctgccccaccccttccctctacctgctgcacacgccgccctgcacaacccccgcccaggccctctgcttggggcccctgccctgccgcagccagtcccgggggcctaccccaacaccgcccccgggagacgcccttacgctctgctgcacccgcatcctcctcgctacctactgctctcggcccccgcctatgccggggcaccgaagaaagcagaaggcgcggacctggcgacccccggcacccttcccgtgctgcagccctcacttggtcctcagccttgggaggagggcaagggtctggcgtcgccaccgggaggcggatgcatctctttcagcattgagagtatcatgcaaggggtcaggggagcgggtacaggggctgcgcagagtttgtccccgaccggcgtggagctactgccccctgctccagcgaccgtcaagcctgtcggacaattttgcagcaacagcagcagcatcaggaggaggactgcgccaacggctgcgctcccaccaagggcgcggtgctgggcgggcacctgtcggccgcgtcggcgctgctgcggtatcagccggtggctaaaggcctctgggctgacatcgctgccgcccctttgggcggagaggggacctcaccagtttttttag

SEQ ID NO: 122600 - DNA, 1600 bp, Homo sapiens
ggaacaagagttattacccgctgatgacttctgcagctggccttaatcagcctctggcgcttggggagcatatttgtagccagaatctccgacttttagctttgtttccaagcaagccagaaacaccagcaaggcctggagcttgttttctgcctatttagaaccctgcaggcattcgtgactctcacccggtagctttgagcacaaaaccccacagcctttggtgtaaagcataccagttccggtggtgaggagacctttccaaatataagaggaataaagaagtcacctccccagctgtcatcatcttccatcagattgagcaagaatattttgagcactacaggaaagacagtccatcaaacccgagatgatgatcagccacgtgattttttcaagaagaggaatagggtgaatgaatctcatcagaaaagcagcaatatgaatgctggcccatcttggaataaagtgcaacattcaaagaattcttcaggaaaaaggcagagtaaatcccaagtaccccacgcttcttcccagccgagaagcagcctcacagctgtcacccagcctactgaagaaaaacttatagaaagcatttccccggaagcaagacgcaaaaggaatccactcggtttcaggtgtcagggggcctcaaggaataaactgtttcttgattttcagtcaatgaaaattattaaagagaatgctgatgaggacagtgcaagtgatctctctgattcggaaagaattcccattcctccttctcccctcacacctccagatctcaatcttcgagctgaagaaattggatccagtttactttgatcttcaccctggtcagggccatacaaaacctgaatactattaatcctaatttccttccatccccttttcagctcctgggacctacgagatatggccctgcttctgaacgcaagagaacaaaacggaagccgtgccccgagtgggaggacttcttgggaaagtatatcgatagacttattcagcttgagtggctgcaagtccaggactgtacagtgtgaaaaagcaaaggggggcaaagcaaggccccccacttgcccctgggacctcaggggcactgaaaagccctgggagaagtaagctaattgctagtgctctgtccaagccactacctcaccaggaaggggcttcaaagtcaggcccttcccgaaagaaagcttttcaccatgaagaaatccacccatcacattatgcatttgagacttcccctagacccattgatgtgcttggtggtaccaggttttgttctcagaggcaaacccttgaaatgaggacagaagaaaagaaaaagaaatcaagtaagagtacgaagctgcagcgctgggatctgtccggcagtggaagcagctctaaggtggaaaccagcggtcacattcgagttcccaaacaggcagctgtgattctggactcagcagattcctgtaaggcctccaaaacacaagcacatgcacatcctaggaaaaagggaaaggcagagagctgtggtcatgccactgtatcgagtgagaaaaaactgaaaacaaacggagtaaagcaaaacacatataaactaaaataa

SEQ ID NO: 122601 - DNA, 1351 bp, Homo sapiens
tttcgtacgaggttgtcatggtgccgcggggccgtgttcgcgcatgcgccacctgacccacaggccgggggtggagctgcgaccccggccctagggcagtccagatgaaaagagtaccaatgaatctgcctcacacctgaataatccatggagaggaaaaacccatctcagagagagccccagaagacatctctgtcaaagtaggcaaaggcacagagatgaagaaagtggctcgtcagcttgggatggctgctgctgagtcagacaaggactctggcttttcagatgggagctcggaatgtctgagctctgcagagcagatggagtccgaggacatgctgagcgccttatgctggagcagagaagacaggccgaggcagaactccaaaactgcaaagaatgccttccctaccctgtctcccatggtcgtcatgaagaatgtgcttgtcaaacagggcagcagctcatcccagctccagtcgtggactgtccagccctcctttgaagtgatctcagcacagccacagctcttattccttcatccacctgtaccatctcctgtcagtccatgtcacactggtgagaaaaagtccgactccaggaactacttgcccattctgaattcttacaccaaaatagccccacatccaggcaaaaggggcctttcccttggcccagaagaaaaaggaacaagtggagtgcagaagaaaatctgtactgagagacttgggcctagcttgtcttccagtgagccaaccaaggctggtgctgtcccatccagtccctcgacgccagcaccacccagcgccaaacttgccgaggactcagctctgcagggtgtgccctctctggtggcaggtggaagtccacagactcttcagccggtatccagcagtcacgtggctaaagctcccagtctgaccttcgcttcccccgccagtcctgtctgcgcatcagacagcactctccatggggtaagagagcaactctcccctttcaccactgtccgttaatttatagctcacctttatgggctgcagagcacctctgccgcagcccagatatcttttcagagcagcggcagagcaaacataggcgctttcagaataccctagtagtcctacataaatctggtttgctggagatcactttgaaaaccaaggagttgattcgtcagaatcaggcaactcaggtagaactagaccagctaaaggagcaaacccagctgtttatagaagccaccaagagcagggcccctcaggcttgggccaagctgcaggcatctttaacacctgggtccagtaatacaggcagtgacctagaagcattctctgatcacccagcgtgtatt

SEQ ID NO: 122602 - DNA, 686 bp, Homo sapiens
  misc_feature (1)...(686): n = a,t,c or g
gggggaagcgggggtgggatctgaacatggcggcggtggtagctgctacggcgctgaagggccggggggcgagaaatgcccgcgtcctccgggggattttcgcaggagccacagcttaacaaggcttcttcataacaggacccgggcccttcaaaacccacagcttccccagagggcaaggaggaaccctgaaccccttatccccggaactggaaaatacattccccagaaaagaggggcaaaaaacccccatgaaaactgtgggaacttgccctgggccatcggcttcccttgtggtatcctcctcttcgatccctcacccaagcgggaaagttggacaaggaccgtgtgaagcagatgaaggctcggcagaacatgcggttgtccaaacacggggcgagtatagaagcaagagggttcagggcttcctcccagagtgccccgtcccctgatgttgggtctggggtgtctggggngtgcagacctgaggagcgnctgcgaccctccttaggctattgactgttaagtcctcaggtttggcccagattcccagttcgtgcctctgaaggtccaccagagggggcatgaaggcccaggctgtttgccaaaaccctaccctgccccacaccaaggaagccagccaaaagggaaaataaagttattgagtgtttagtagaaagaaaaaa

SEQ ID NO: 122603 - DNA, 1028 bp, Homo sapiens
ttattcccctaaatatgctgttgactgatatgtttctctgctctgctttcttcctctgggaatatagatgaggtcttgtccgaaaactttctggactataaaaaccgtggagtcaatggttctcatcggggccagatcatctggaagatcgatgccagctcgtactttgtggaacgtgagtacctttaccattcttgtggcttggcagacatggatgaagcagaattcaactgtttcattatttgttcccgttgcactgcctccactaagaaatgggccctctcccgggtcagtcttaggctcggcctgtcttgcccctcgtttcctcgtgtggaaacctggctggatgcacacccagattgctgcacgctgtggtctcatcattcccattctaaaggctgggaagtccatgatcacagtgccaacagattctgcttctgctgagggcctgctcagcttcaaagacagtgccctcttgctgtttctccctggtatgataggcaaggaaatgtggggggcatcagagaatacagacatcactagactatcacattctaccaaaatggaggtattgctgttgccagctgtgttacgagtgagaacatgcagtgtttggttttctgtccttgcaatagtttgctgagaatgatgttttccagcttcatccatgtcccatgctgttttggtgactatggccttatagtatagcttgaaatcaggtagtatgatgcctccagatttgttctttttgcttaatcttgcattggctatgtgggctcttttctggttccatatgaattttagaattgtgtcttctaatgctgtgaagaatgatggtggtattctgaaggggattgcattgaatttgtagattgcttttggcagtgtggtcattttcacaatgttgattctacccatccatgagcttgggatgtgtttccatttgtttgtgtcatctgtgatttctttcagtagtgttttgcacttttctttgtagaggtctttcaactccttggttaggtatattc

SEQ ID NO: 122604 - DNA, 2651 bp, Homo sapiens
  misc_feature (1)...(2651): n = a,t,c or g
ggggagagcgggtgtttgaaggctccgcggaccggcactaggagccgggggcgggtccgtgaccctccggctgctcggagtgaacaggcggccaggaaagaagcgggcctgaacaccatgatccctttggagaagccaggcagcggcggctccgtccccaggcgccacctcaggctcgggccgggcagcggnggctcctgagcgggccgtgcgcgcangccgccgccgccccaggcccgcgggctgctgacagagatacgcgccgtggtgcgcaccgagcccttccaggaacggctacagcctgtgccccgggccggaagctgggcaggggggaaattttcaagtggtgagaaaatgtataaagaaaagattctgggaaagaatttgcttcaaagttcatgagaaaaaagaagaaaaaggccaagattgtcggatggaaataattcatgagattgctgtacttgaactagcacaagacaatccttgggtcattaatttacatgaagtttatgagactgcatcagaaatgatcttagttctggaatatgctgctgggggtgaaatctttgaccagtgtgttgcagacagagaagaagcctttaaagaaaaagatgttcaaagacttatgcgacagattttagaaggtgttcactttttacacactcgtgatgtagttcatcttgatttgaagcctcagaatattctgttgacaagtgaatctccattgggtgacattaagattgttgattttggcctttcaagaatattgaagaacagtgaagagctccgagaaattatgggtacccctgaatatgtggctcctgaaattcttagttatgatcctataagcatggcaacagatatgtggagcattggagtgttaacatatgtcatgcttacaggaatatcacctttcttaggcaatgataaacaagaaacattcttaaacatctcacagatgaatttaagttattctgaggaagaatttgatgttttgtctgagtcggctgttgatttcatcaggacacttttagttaagaaacctgaagatcgagccactgctgaagaatgtctaaagcacccctggttgacacagagcagtattcaagagccttctttcaggatggaaaaggcactagaagaagcaaatgccctccaagaaggtcattctgtgcctgaaattaattcggataccgacaaatcagaaaccgaggaatccattgtaaccgaagagttaattgtagttacttcatatactctaggacaatgcagacagtctgaaaaagagaaaatggagcaaaaggccatttccaaacgatttaaatttgaggaacctttgctacaagaaattccaggagaatttatctactgagcaatatttccctttagaacttcaagatttctacactgaaaatgttaatattatttatggacctctggccaaatggtacatgtactggaagtggataaccagtatcacttacacaaacaaaaataactttgtcaaatttgtggagttaggtggaagccagattttaaaagttgccaaccaggatatttaacaggtacagttacccgtttcaatgttatttttaagaagggagatgttggcacctttgaattctacatcctgtttctccagaatgagaatttgtgtacaaagatatttgtattcactttctttaaaaaatccaagtaaaagtgccaaaactacatttctgtaaatctcttgcattattcatatgtgtatctatatctgcataatgtttgttaatgtctactaaaattgctactttttcactttggatttgtttttggcaaaattttagtctaaacagacatctaaattttcgagacttagaataacattcactaaagtttgataatgtcttttttaaatattttcttactgctttatagtgacttgatttggtttctgttgtgtttttgcctaaatactagtaacatatcagtgaaaaaccctaattttttttctcttcaatgtcactagtaagagaggtggtaatttttcacctctgaaattattctgggtttaggtgtcagcttttgagctgcttccctcatcacaccacactcacatgcatctgttctctctcacactctatacccctgccacttcctggcacctccccccatgcttgtcatttaattttggccacttgtaggtatcagtgtgatctgatcaacactctggttaccttggtcagtgaaaagatgctactatattgcttttgtcccaaagtgagtaaaatcccctagagcagagagagagagagagagagagtgtcttcatgccaaccacagcctgtttctgctgagtttcttatcagccctcaagctatgctaggaaaagttataaaatgccaaaatatttataaacatttactttgtccataaaaaatttacattggatactctgtaagtaggaggtactttgtcccaaaaagatgtataagaatgtactaatagttttatttgattaggattgaacagttcagttgtatctatgccccacagtgaccagtaaagtccaattaaaatatggaaatgtaaaagtgtatgccgaataccttaaagtaactaattatccttacacacaaaaggctcagtgcattaaatatttgcctatc

SEQ ID NO: 122605 - DNA, 1278 bp, Homo sapiens
atggggccttcttctggcttgatgggtgatctggaaaagcagtgtgaagtttctaaggtgaacaaaacctccgtggccccccactctccaatggagaaggtcttatttcttggtgtgccatgggagacccctttcacacacttccagctgcccccaacactgtctggcagacagctaagaggagctctgctgaatctggaagctcagcatgcttctatattgtgggttggcttttggagactggactgtagccaagcaggtggtggtgccctggttacgggaagaggcacagtgaccccactcagcacagcacaagccctgctgggctcaggatggagtgaggctgaggtcatcatgggggctcctcacaaatgcccgggctcctggagctgggcgccttgggcccctggagccgcactgtggttctgggaggtgaacacatatccttttcctctgcaggtatcagtagggattcccggtgcttctgctggtcctgcatccggacacctgacccatcccagtgcagtccaggaaccaggaactcaattcgagcaattctgggcaccaagcctagtgcttacaagaattcctgagctcaaggagcagagccccatgtccaggggaatgggattcctgtgcatcatggagcagaaagttccactcttgggaatgggaaggaggcaaggagcggttacagcagagttggtgctggagcataattctgatgcagaagtgcagatcctgcctgcaagtaggaatggggaggatgtgtgcaaagacagggtgaatctgtaccagaacaggtttttaggcctggccgccatggcgtctccttctagaaactcccagagccgacgccggtgcaaggagccgctccgatacagctacaaccccgaccagttccacaacatggacctcaggggcggcccccacgatggcgtcaccattccccgctccaccagcgacactgacctggtcacctcggacagccgctccacgctcatggtcagcagctcctactattccatcgggcactctcaggacctggtcatccactgggacataaaggaggaagtggacgctggggactggattggcatgtacctcattgaatcagctgtcatggaaattgatgtgtttacccaaaagtcgagttataattgctggaaggccacaagagtcaacagattcaacaccgggtcatccgaggccaggccttctgccttcagtctgtgctctgcaacatttgcacattcagacacacaacaccggatttaa

SEQ ID NO: 122606 - DNA, 4176 bp, Homo sapiens
caattcagttttgtgtccttgcccactgacgtgctggaaattgaggtgaaggacaagtttgccaagagccgccccatcatcaagcgcttcttgggaaagctgtcgatgcccgttcaaagactcctggagagacacgccataggggatagggtggtcagctacacacttggccgcaggcttccaacagatcatgtgagtggacagctgcaattccgatttgagatcacttcctccatccacccagggtatcctaacaccacaatgctctcttctgggagaaatgacatatttttcttcttaccagcagatgatgaggagatttccctgagtaccgagcctgagtcagcccaaattcaggacagccccatgaacaacctgatggaaagcggcagtggggaacctcggtctgaggcaccagagtcctctgagagctggaagccagagcagctgggtgagggcagtgtccccgatggtccagggaaccaaagcatagagctttccagaccagctgaggaagcagcagtcatcacggaggcaggagaccagggcatggtctctgtgggacctgaaggggctggggagctcctggcccaggtgcaaaaggacatccagcctgcccccagtgcagaagagctggccgagcagctggacctgggtgaggaggcatcagcactgctgctggaagacggtgaagccccagccagcaccaaggaggagcccttggaggaggaagcaacgacccagagccgggctggaagggaagaagaggagaaggagcaggaggaggagggagatgtgtctaccctggagcagggagagggcaggctgcagctgcgggcctcggtgaagagaaaaagcaggccctgctccttgcctgtgtccgagctggagacggtgatcgcgtcagcctgcggggaccccgagaccccgcggacacactacatccgcatccacaccctgctgcacagcatgccctccgcccagggcggcagcgcggcagaggaggaggacggcgcggaggaggagtccaccctcaaggactcctcggagaaggatgggctcagcgaggtggacacggtggccgctgacccgtctgccctggaagaggacagagaagagcccgagggggctactccaggcacggcgcaccctggccactccgggggccacttccccagcctggccaatggcgcggcccaggatggcgacacgcaccccagcaccgggagcgagagcgactccagccccaggcaaggcggggaccacagttgcgagggctgtgacgcgtcctgctgcagcccctcgtgctacagctcctcgtgctacagcacgtcctgctacagcagctcgtgctacagcgcctcgtgctacagcccctcctgctacaacggcaacaggttcgccagccacacgcgcttctcctccgtggacagcgccaagatctccgagagcacggtcttctcctcgcaagacgacgaggaggaggagaacagcgcgttcgagtcggtacccgactccatgcagagccctgagctggacccggagtccacgaacggcgctgggccgtggcaagacgagctggccgcccctagcgggcacgtggaaagaagcccggaaggtctggaatcccccgtggcaggtccaagcaatcggagagaaggcttcacaacagcagatgcttcaagaaagcagggctttaacatgacctgcctgatacgtgattgtgtgggtgacctctgcttccataaaaatccctattgctccttcgccttgacttctaagattgcaaattcctttactgtagaaactgcattagacggctgggaatttactttcttggctcgccagctccttgacctgtcttggtaccatctaagagttcattcccctcaaaaatctgaaaaacagcctttcggcagccctgtgatgaaacctatccaatgcttagttttacagtcatgcttttttgatgatgttgccacggcagtgaatgaatctgaatgtattgactatcttgtccgtgaatgtcctatactccataattcccagccagtaagccagcttccttccctgaggcctgaacatcatcactacccaacaatcgatgagcctcttccaccaaactgggaagctcgaattgacagccacgggcgggtcttttatgtggaccacgtgaaccgcacaaccacctggcagcgtccgacggcagcagccaccccggatggcatgcggagatcggggtccatccagcagatggagcaactcaacaggcggtatcaaaacattcagcgaaccattgcaacagagaggtccgaagaagattctggcagccaaagctgcgagcaagccccagcaggaggaggcggaggtggagggagtgactcagaagccgaatcttcccagtccagcttaggtattggaggaggggtccccacaacctgtgatggctttcaggggctgtgtgacagagggctacaagcctcccaccctgcctcatggggagcaatgtgccccagggtgaagagagtggaagtccagggtggaggacagaggcatgcctggtgcccgcaagggaaagcagacagaatgagcttcccaccaggaaacttaggagaagtgatcacagtgaaggaaacaccaccaccctggcatggggatctggagacaggaaagcagatgaattctggggatggagctgagtttgctacagtgcttgtggagcaaggcaactttagtgcctaccgagtcttcaccagtagcacctgcttaaagcacatgattctgaaagtccgacgggatgctcgcaattttgaacgctaccagcacaaccgggacttggtgaatttcatcaacatgttcgcagacactcggctggaactgccccggggctgggagatcaaaacggaccagcagggaaagtcttttttcgtggaccacaacagtcgagctaccactttcattgacccccgaatccctcttcagaacggtcgtcttcccaatcatctaactcaccgacagcacctccagaggctccgaagttacagcgctggagagctgtgtgattctcagagtctgtggggcttgattccacgtcttcaggaccgcataactaagagacccattaactacatagagctaagaggagcaggaaaggcaggacggaaggatggcagaatggagctctctcctccctttctggttctggttctgagtgaggaccaccccattctcacaccattctttgatcaattaaactctgcctcagaagtttctagaaacagaggagcctctttactggccaggccaggacacagcttagtagctgctattcgaagccaacatcaacatgagtcattgccactggcatataatgacaagattgtggcatttcttcgccagccaaacatttttgaaatgctgcaagagcgtcagccaagcttagcaagaaaccacacactcagggagaaaatccattacattcggactgagggtaatcacgggcttgagaagttgtcctgtgatgcggatctggtcattttgctgagtctctttgaagaagagattatgtcctacgtccccctgcaggctgccttccaccctgggtatagcttctctccccgatgttcaccctgttcttcacctcagaactccccagcaaatgacgtcctgttttacctcactgagaagttgaagccatccagcagaaacttcttcaaaggcctgcccacaaggctagcaaacctgtacacatcttctctgtcatctctggaggtcacgaaaggaggtttacagagagccagtgcaagagccccttccccctaccgaagagactttgaggccaagctccgcaatttctacagaaaactggaagccaaaggatttggtcagggtccggggaaaattaagctcattattcgccgggatcatttgttggagggaaccttcaatcaggtgatggcctattcgcggaaagagctccagcgaaacaagctctacgtcacctttgttggagaggagggcctggactacagtggcccctcgcgggagttcttcttccttctgtctcaggagctcttcaacccttactatggactctttgagtactcggcaaatgatacttacacggtgcagatcagccccatgtccgcatttgtagaaaaccatcttgagtggtaa

SEQ ID NO: 122607 - DNA, 5118 bp, Homo sapiens
ccccgaccagttccacaacatggacctcaggggcggcccccacgatggcgtcaccattccccgctccaccagcgacactgacctggtcacctcggacagccgctccacgctcatggtcagcagctcctactattccatcgggcactctcaggacctggtcatccactgggacataaaggaggaagtggacgctggggactggattggcatgtacctcattgatgaggtcttgtccgaaaactttctggactataaaaaccgtggagtcaatggttctcatcggggccagatcatctggaagatcgatgccagctcgtactttgtggaacctgaaactaagatctgcttcaaatactaccatggagtgagtggggccctgcgagcaaccacccccagtgtcacggtcaaaaactcggcagctcctatttttaaaagcattggtgctgatgagaccgtccaaggacaaggaagtcggaggctgatcagcttctctctctcagatttccaagccatggggttgaagaaagggatgtttttcaacccagacccttatctgaagatttccattcagcctgggaaacacagcatcttccccgccctccctcaccatggacaggagaggagatccaagatcataggcaacaccgtgaaccccatctggcaggccgagcaattcagttttgtgtccttgcccactgacgtgctggaaattgaggtgaaggacaagtttgccaagagccgccccatcatcaagcgcttcttgggaaagctgtcgatgcccgttcaaagactcctggagagacacgccataggggatagggtggtcagctacacacttggccgcaggcttccaacagatcatgtgagtggacagctgcaattccgatttgagatcacttcctccatccacccagatgatgaggagatttccctgagtaccgagcctgagtcagcccaaattcaggacagccccatgaacaacctgatggaaagcggcagtggggaacctcggtctgaggcaccagagtcctctgagagctggaagccagagcagctgggtgagggcagtgtccccgatcgtccagggaaccaaagcatagagctttccagaccagctgaggaagcagcagtcatcacggaggcaggagaccagggcatggtctctgtgggacctgaaggggctggggagctcctggcccaggtgcaaaaggacatccagcctgcccccagtgcagaagagctggccgagcagctggacctgggtgaggaggcatcagcactgctgctggaagacggtgaagccccagccagcaccaaggaggagcccttggaggaggaagcaacgacccagagccgggctggaagggaagaagaggagaaggagcaggaggaggagggagatgtgtccaccctggagcagggagagggcaggctgcagctgcgggcctcggtgaagagaaaaagcaggccctgctccttgcctgtgtccgagctggagacggtgatcgcgtcagcctgcggggaccccgagaccccgcggacacactacatccgcatccacaccctgctgcacagcatgccctccgcccagggcggcagcgcggcagaggaggaggacggcgcggaggaggagtccaccctcaaggactcctcggagaaggatgggctcagcgaggtggacacggtggccgctgacccgtctgccctggaagaggacagagaagagcccgagggggctactccaggcacggcgcaccctggccactccgggggccacttccccagcctggccaatggcgcggcccaggatggcgacacgcaccccagcaccgggagcgagagcgactccagccccaggcaaggcggggaccacagttgcgagggctgtgacgcgtcctgctgcagcccctcgtgctacagctcctcgtgctacagcacgtcctgctacagcagctcgtgctacagcgcctcgtgctacagcccctcctgctacaacggcaacaggttcgccagccacacgcgcttctcctccgtggacagcgccaagatctccgagagcacggtcttctcctcgcaagacgacgaggaggaggagaacagcgcgttcgagtcggtacccgactccatgcagagccctgagctggacccggagtccacgaacggcgctgggccgtggcaagacgagctggccgcccctagcgggcacgtggaaagaagcccggaaggtctggaatcccccgtggcaggtccaagcaatcggagagaaggtgaatgtcctatactccataattcccagccagtaagccagcttccttccctgaggcctgaacatcatcactacccaacaatcgatgagcctcttccaccaaactgggaagctcgaattgacagccacgggcgggtcttttatgtggaccacgtgaaccgcacaaccacctggcagcgtccgacggcagcagccaccccggatggcatgcggagatcggggtccatccagcagatggagcaactcaacaggcggtatcaaaacattcagcgaaccattgcaacagagaggtccgaagaagattctggcagccaaagctgcgagcaagccccagcaggaggaggcggaggtggagggagtgactcagaagccgaatcttcccagtccagcttagatctaaggagagaggggtcactttctccagtgaactcacaaaaaatcaccttgctgctgcagtccccagcggtcaagttcatcaccaaccccgagttcttcactgtgctacatgccaattatagtgcctaccgagtcttcaccagtagcacctgcttaaagcacatgattctgaaagtccgacgggatgctcgcaattttgaacgctaccagcacaaccgggacttggtgaatttcatcaacatgttcgcagacactcggctggaactgccccggggctgggagatcaaaacggaccagcagggaaagtcttttttcgtggaccacaacagtcgagctaccactttcattgacccccgaatccctcttcagaacggtcgtcttcccaatcatctaactcaccgacagcacctccagaggctccgaagttacagcgctggagaggcctcagaagtttctagaaacagaggagcctctttactggccaggccaggacacagcttagtagctgctattcgaagccaacatcaacatgagtcattgccactggcatataatgacaagattgtggcatttcttcgccagccaaacatttttgaaatgctgcaagagcgtcagccaagcttagcaagaaaccacacactcagggagaaaatccattacattcggactgagggtaatcacgggcttgagaagttgtcctgtgatgcggatctggtcattttgctgagtctctttgaagaagagattatgtcctacgtccccctgcaggctgccttccaccctgggtatagcttctctccccgctgttcaccctgttcttcacctcagaactccccaggtttacagagagccagtgcaagagccccttccccctaccgaagagactttgaggccaagctccgcaatttctacagaaaactggaagccaaaggatttggtcagggtccggggaaaattaagctcattattcgccgggatcatttgttggagggaaccttcaatcaggtgatggcctattcgcggaaagagctccagcgaaacaagctctacgtcacctttgttggagaggagggcctggactacagtggcccctcgcgggagttcttcttccttctgtctcaggagctcttcaacccttactatggactctttgagtactcggcaaatgatacttacacggtgcagatcagccccatgtccgcatttgtagaaaaccatcttgagtggttcaggtttagcggtcgcatcctggggtctggctctgatccatcagtaccttcttgacgctttcttcacggaggcccttctacaaggcactcctggagactgccctgtggattttgagtgacctgggaatatttggatgaggaattccaccagagtttgcagtggatgaaggacaacaacatcacagacatcttaggacctcactttcactgttaatgaagaggtttttgggacaggtcacggaaagggagtttgaagtctgggaggagccaacacacaggtgacgggagaaaaacaagaaggagtacatcgagcgcatggtgaagtggcgggtggagcgcggcgtggtacagcagaccgaggcgctggtgcgcggcttctacgaggttgtagactcgaggctggtgtccgtgtttgatgccagggagctggagctggtgatagctggcaccgcggaaatcgacctaaatgactggcggaataacactgagtaccggggaggttaccacgatgggcatcttgtgatccgctggttctgggctgcggtggagcgcttcaataatgagcagaggctgagattactgcagtttgtcacgggaacatccagcgtgccctacgaaggcttcgcagccctccgtgggagcaatgggcttcggcgcttctgcatagagaaatgggggaaaattacttctctccccagcgtgtggggcagtgagcaatttccacccatgagaactggagatgggacactaggacccggaggcagcatctggaaagagcttaaggaggtggcaaagtttctttactttgaacaagagctcaaaggaggacagaggaaaggctcagaaggaaagagaagggcagaagctagggcacacacatgcttcaaccgactggatcttccaccgtatccctcgtactccatgttgtatgaaaagctgttaacagcagtagaggaaaccagcacctttggacttgaggatcatggtgttcaggcccgcttctttcctggccgcctgttcactccgagcagccggagggtcacggaccgcccccggctcctagtgccggtccgcggagccttcaaacacccgctctccccagcgcggcgctcggactgcggcaggcagactaccgctcagggggagaaggtgcagctttcgggacggcccggaggctggaggcgactcacagcaccaccctttggccaggacagcctactgcgttag

SEQ ID NO: 122608 - DNA, 432 bp, Homo sapiens
  misc_feature (1)...(432): n = a,t,c or g
aaacgttgcaagcacgggtaaacttgggcccccccaaggatcctttaaaacggcccccccnnnnnnnnnnnnnnnnnnccagatttataatttaatggctgtgcagatcccagtccctcattcctgccgctcacgtgcccactggtctggggtcagggttttctgttcaaaggcatggatgtgcgggagctcttctgctaggcacgcgttcaccagcctgtgtctctgaagcagcggtttcccctcgaacttggccgacaccaccaggactcggaagcacatgctccgcctccaggtcccgctgcagcttctcgcggaggtattcggcgctgagttccatggcggcagtccagctggaacggcagcccagcagggacacaaccccagctcggggcgccggccacgctacctagatgccttacaggagccact

SEQ ID NO: 122609 - DNA, 578 bp, Homo sapiens
gcggaagtactgcgttgacgtacgccttagtaaggcggaagtgagttttccagcggaagtggctcctgtaaggcagcaaaggtagcgtggccggcgcccgagcttgggttgtgtccctgctgggctgccgttccaggtggactgccgccatggaacttcagcgccgaatacctccgcgagaagctgcagcgggaccttggaggcggagcatgtggaggtggaggacacgaccctcaaccgttgctcctgtagcttccgagtcctggtggtgtcggccaagttcgaggggaaaccgctgctttcagagacacagcttggatcctagcatgactatacattgtgacatggtcattacatatggattagaccaactggagaattgccagacttgtggtaccaattatatcatctcagtcttgaatttactcacgctgattgttgaacagataaatacgaaactgccatcatcatttgtagaaaaactgtttataccatcatctaaactactattctttgcgttatcataaagaaaaagaggttgttgctgtagcccatgctgtttatcaagcaatgctcag

SEQ ID NO: 122610 - DNA, 1359 bp, Homo sapiens
  misc_feature (1)...(1359): n = a,t,c or g
ggagtcccagagtccccccaactgaggancctaagttatcctagcacangcgnggaattcgccggcgcccgagctggggttgtgtccctgctgggctgccgttctagctggactgccgccatggaactcagcgccgaatacctccgcgagaagctgcagcgggacctggaggcggagcatgtggtgagttgagccgccggacaaggggaaaagagctcggggggcgggttcggcaccattcatattcttccgctcggtaggaggtggaggacacgaccctcaaccgttgctcctgtagcttccgagtcctggtggagtcggccaagttcgaggggaaaccgctgcttcagagacacaggttctgtacagagcaatgagacgtgtgacggctgcgaaccaggcgtttttttctgaggctgaggtgacagctgctaaagagcgtggcatagtcttgcccctcaggtgtgtatcctagcacagactatacattgtgacatgggcatgtacatatggattagaccaactggagaattgccagacttgtggtaccaattatatcatctcagtcttgacatttactcacgctgattgttgaacagataaatacgaaactgccatcatcatttgtagaaaaactggttataccatcatctaaactactattctggcgttatcataaggaaaaagaggttgttgctgtagccccatgctgttttatcaaggccaatgcttcagcttggaaggaatattccctgttttgggaggactgcctattaagtttaatattgggggaggaaatggacttgtggccccttaaacaaccttcctggcacagtctgcaacttccctgaggcctgttctgaaataaaacatgaggcttttaagaatcatgtgttcaatgtagacaatgcaaaatttgtagttaaatttgacctcaattgactacaaaatttgtagttaaatttgactacaattggaaatgccaaaaactcactaataggggtgagtctttaattgtaatgactttgttttatccacgagttaagcctttttctcattcacatatttatgtatttcactgtcatgtcaagatgtctgcagaatcactgtgtgtaacaaacacgccatatttaaagacatgcctggataaataaaattgggtaggaatgttttcttggcattatatttaacttttcttcgtctttttccttggacaaatcttgataagtttttttatattagttttattttctagaaaatgtcttatgaatttctcctatttgctctagcatggcttatagaaaatggtcagtggtttcctacagctcaaatttggtggtagttggtttaaaatgcggg

SEQ ID NO: 122611 - DNA, 3472 bp, Homo sapiens
tcatgtttttgccagtgggtcaaacacctgcagtgctgtcctcttttcttggtcactgattgtcacccagtgacctaaggttttgtgttcatgatctggtggcagctctgccttggcagctgaagcgccagctgacactgggtctatgggatctcttttggggctcctggttcctgagtccaaagggtctgagctcttagaaagccaagtgttattcaacagtttagggtggtgaagaaggttccagaaggggtcctgataatcaccaagaagtggggctgcctctggcttcatcgctttggtgccatcgctgtcggggcttgtagcagatgaagtgctgagaaagtccccttgtgggaagacggtgcccgcggcaggtgggtgcccagaggggctgtcactgctattgtaagtgaggccctggagaagctggctgttgctctgcaggacctgcaggtggaaggctgcggggggctgacttcttcctcctcgggggtacgatgggtttattgggatgtaaccccattttaagtcgaggagcatctttcctgtccttctcaaggttggcttcttgatggcaggaactctgggtgggggccgacggggaaggagtgggggcgcctgtggggtctctggtttggctgcccccggtgtgggctctggttcagaggatgcttcaaggtcccttggggccacggcacttagggcttcttcggaggcacctgtgcccgtgcccagcatcacgcccaccccgctgcctttgcaggcacatggtgcttctgaaggagcagtacgggcagcaggtggtcgtgaaccttctgcagagccacatgcatacctgcagagccgcaggcatacctgcagagccatgtccccacctgcagagctgcgtgcataccagcagaggcatgtcgacacctgcagagccgtgtccccacctggcagacgctcagtgaatgtttgggatgaataaatggcttcatctggggttactgatttacgatgagtctgaagccctggctgttcccagaacagcggaacggagcctctgatctggacaaaagatgacactccatcgtccatgtaaatcatcacagggagccagtctgctcctggtccggtcccatcatttgtttgccagacgatgaccgcacagccgcctgtgtgcacgctccacttccaaatggtcagcgggcctggctggtggatcctgtttcctctgcaggggccccaggccagtgtgacctgctctgtctccacgaagttggacacatggccgtcgtcgttcacgccacgggtgtggaagcgagtgcctgtgcgctcacagctaacgcgagagacgaggcaggccttggcctgcttgtgggaggcatacacggtgcggatggtgaccaccccgcagatgatcttcagcagccagtcacagcagctcacctggtgctgcctcaagggcacgtgcaacagctggttccagaagaaggagttcccccattcagagctgtcatccccctgcttctgcgtgcggacagtcaggtcaaagcgagacccatcgtttggccatgagaaatagaacacccccgagctgaggattttcttcaaagctatgaggcgttcctcctccttggcctcttcctgaagagggtaaaagtcagtggcagtgattttgtagatttcagcatctggaattctgcccacagatgtgcagcctgtcaccaacaccaggaagctcagagacgtgccaccgtccacatccaggacactgagagccgagtgactgtctgcaaaagttaccagcatctgcccttggttgatcctgacaagaacaattgtcccataactccccaaggtctgcatgagctcagtacgcaggtcctctggaaactcgtttttctcttctaaggtcggtgattgaaggtttactacaacagtggcatccagggggccctggaaggaggacacttcctggaaaaccctctcccgagcacccacatcgacttcctgaacttccacctccacgatcgccagcacaggtctgtgatcagacgcttgtagctccgcacgaccataatactgcagggcaccaggagaccaggtgtgtctgactttggtgtcaacatctagatcactgtctgttttatcaaagggatgtttcttcctccaccacagcaccctgtctgtccaggcgggggtgcggcatttgtcgcttgtatcgtaggcggctgagccaacgtcatacttgtaggtgggtccaaagttaatggctccttcgtgaaagtccttaaaaatcaggacgcggaagcccagggcagatgactctccaggcaccagcagatatagctctgcacacaccaggacgcggaagcccagggcagatgactctccaggcaccagcagatacagcattgcacacaccaggatgtggaagcccagggcagatgactccaggcaccagcaggtacagcacaggatgcagaagcccagggcagatgactctccatgcacccgcagatacagcattgcacacaccaggacgcggaagcccagggcagatgactctccaggcaccagcagatatagcactgcacacaccaggacgcggaagcccagggcagatgactctccaggcaccagcagatacagcactgcacacaccaggacgcagaagcccagggcagatgactctacaggcaccagcaggtacagcactcctctggcttccaggagacaccggattgctgcttctgcctcctgggcattggtggttttgatctgcttgacattataaggtttacttattccagtccgagccttgggaggttgctgaggtgctcctggtagaagtcttgccgtctgcaaaattgaatactgcccatgggtgccggaggagatggacgcatctgaagccgactttttcaccattaaaccggttggaggggggggtctctgcgggggttgaggtggccgaggccggttggggaccgacagagacctgctcggagaacggtggcggaactccccgacggcttccagctcccgcttgagctccaccaggtccgcgtcatctttgtacgttggatgctgcttctttttggtgagagcaggtgacttgctgggaggagccagtgctgtggggccggggacatcagagaggtcgtctcccccgagttcactgtccgagaccccaggctgattgaattcatccaccaagtagtcttcatcgtcttcaagaatatccccttctgactcatagtccaaacttgtgaagtcaaagttttcctccagcaaacaggagttggcagtgggagacacgggggccatgctgtctcgtttccgaatgatctcctctcgcaaacctttcagccagtccttggtcttcggtctaatcttcactgctctgcctttcacctggaacagagcccagcccttgcggacagttgatccacagcagctgctgtcattgtcttccccattc

SEQ ID NO: 122612 - DNA, 2432 bp, Homo sapiens
ctattgggtgaagatctgagatgttgctaaacctctcataatccacatggcagtctcacaagtaattatcctgaaatgtctacaggtgtagccgttgaggaacaccggtctatgccgcgggaaagggcaccccgggctcgagtcgtcgggcagccgacgccggcgagacggcagggcgtcggagcggaggcaaacccagcgcgaacgagggaagacgttaccttgttcatcccattccccatggtggctgaaggcgaacgctagcgccccggccgtgtggtcgcaggcgcacaggacgcagaagcccagggcagatgactctccaggcaccagcagatacagcactgcacacaccaggacgcggaagcccagggcagatgactctccaggcacccgcagatacagcattgcagacaccaggacgcagaagcccagggcagatgactccaggcaccagcagatacagcacaggacgcggaagcccagggcagatgactccaggcaccagcagatacagcacagaacgcagaagcccagggcagatgactctccagacaccagcagatacagcacaggacgcagaagcccagggaagatgactccaggcaccagcagatacagcattgcacacaccaggacgcagaagcccagggcagatgactctccaggcaccagcagatacagcactgcacacaccaggacacagaagccgagggaagatgactctccaggcaccagcagatacagcattgcacacaccaggacggggaagcccagggcagatgactctccaggcaccagcagatacagcactgcacacaccagaacgcagcgagccagggcagatgactctccaggcgaccagcagatacagcattgcacacaccaggacgcggaagcccagcgcagatgactctccaggcaccagcagatacagcactgcacacaccaggacgcagaagcccagggaagatgactccaggcaccagcagatacagcattgcacacaccaggacgcggaagcccagggcagatgactctccaggcaccagcagatacagcactgcacacaccagaacgcagaagcccagggcagatgactctccaggcaccagcaggtacagcactgcacacacgaggatgcggaagcccagggcagatgactccaggcaccagcaggtacagcacaggatgcagaagcccagggcagatgactctccaggcacccgcagatacagcattgcacacaccaggacgcggaagcccagggcagatgactctccaggcaccagcagatatagcactgcacacaccaggacgcggaagcccagggcagatgactctccaggcaccagcagatacagcactgcacacaccaggatacggaagcccagggcagatgactctccaggcaccagcaggtacagcactgcacacaccaggacgcagaagcccagggcagatgactccaggcaccagcagatacagcacaggatgcagaagcccagggcagatgactctccaggcacccgcagatacagcattgcacacaccaggacgcggaagcccagggcagatgactctccaggcaccagcagatatagcactgcacacaccaggacgcggaagcccagggcagatgactctccaggcaccagcagatacagcactgcacacaccaggacgcagaagcccagggcagatgactctccaggcaccagcaggtacagcaccagagcagggtgctgccctccagggctggccagttctgcatgggcagggctgaggctcaagacacgcaaaggctggacgtggtgagtgccacgggagctcagggcagaaagaacgtccacggggtgggagagtggagagaaatgagaacagcggctcttctgtttctcctcaacaccaggagggacacccctttcgttcccacgcccagaactttcaccatgcatttcatttgctttcccatgggaaaagaaggccagagctagctggcgatgcccctgctcagtgatgaatgctgaaacttgacgctggcagtagctgcggtgataactaccccctttaacttcccattcaaacttcctattgcagactcgaaggccccccccccccaccaagcagccataacccacggaatctccctggactagatgtcctcttccatcaccaccaccaccatgatgcttaagctttctgctagtcagccagccacacacggtgctgtcccgacccggaacaagaaacactctttccctccgtggatgctctccacggatattctccttggttgtttctaccaacctaagcctgtcttctctttcaaacgccttacagaattgcatctcctctgaaagcatttcagacttgctattcacgtcacctagtctcccctttccagtgtccacagcacctgtcatctccat

SEQ ID NO: 122613 - DNA, 523 bp, Homo sapiens
ctgatacggtgagagaaaggacaggatatactccaaaacctcttctggcagctccgacatggacctattatgtctagtctcctcagcctccaatactgggtggggctcctcatcttgatccattgtcccttccagcacagtttcttcctggtccacagccatgaaactgtcatcttcactgtccgaggagctggccatgacattccactcaacagaaaatatagtagttcttggttgggtgcagtggctcacacctgtagtcccagcactttgggattctgaggccggcagatcaccttaggtcaggagttcgagaccagcgtgggcaacatggcgaaaccccatctctggcccagcccgctccacgctctcgggttcgctccgctggcgacggtaatgagggagccagggacagggccagagcagaggcgctctgcctcaggccgcgacagccgtgctcggggctcctcacagctggcgggaccccgagccgcccggagccgccatcttcctccacacgaaa

SEQ ID NO: 122614 - DNA, 3110 bp, Homo sapiens
  misc_feature (1)...(3110): n = a,t,c or g
ggcggcggcgtttgagtggaggaagatggcggctccgggcggctcggggtcccgccagctgtgaggagccccgagcacggctgtcgcggcctgaggcagagcgcctctgctctggccctgtccctggctccctcattaccgtcgccagcggagcgaacccgagagcgtggagcgggctgggccagctgttgagtggaatgtcatggccagctcctcggacagtgaagatgacagtttcatggctgtggaccaggaagaaactgtgctggaagggacaatggatcaagatgaggagccccacccagtattggaggctgaggagactagacataataggtccatgtcggagctgccagaagaggttttggagtatatcctgtcctttctctcaccgtatcaggaacacaaaactgcggcccttgtctgcaaacagtggtatcgacttatcaaagggtgtagcccatcagtgttatcatggtttcatgaaggctgtccaggaaggaaacattcagtgggagagccgtacctatccttatcctggaaccccaatcactcagcgcttctcgcacagtgcatgctattatgatgctaatcagtctatgtatgtgtttggaggctgtacccagagcagctgcaatgctgctttcaatgacctctggagacttgacctaaacagcaaagagtggatccgacctttggcttcagggtcctatccttcccccaaagctggagcaactctggtcgtgtacaaggacttgctagtgctgtttggtggctggacgcggccaagcccttatcccctacaccagccagagagattctttgatgaaatacacacttactcaccctctaaaaattggtggaactgcattgtgacaacccatgggccacctcccatggctggccactcctcctgtgtgatagatgataaaatgattgtctttggtggctctttaggatcccggcaaatgagcaatgatgtctgggtccttgaccttgagcagtgggcgtggtccaagccgaacatctctggccccagtcctcatcctcgaggtggccaatctcagctattcaaggatgcttggttgttgcacatgcattctggtccttgggcctggcagccactcaaggtagaaaatgaagagcatggggccccagaactgtggtgccatccagcttgccgggtgggacagtgtgtggtggtcttcagccaggctcctagtgggagagccccactcagccccagtttgaactctcgcccatcacctatcagtgccactcctccagctctcgttcctgaaacccgagagtaccgctctcagtctccagtaagaagcatggatgaagctccttgtgttaacggccgctggggaacactgagacccagggctcaaaggcagactccttcaggttcccgggaagggagcctttccccagccagaggagacggctctcctatcctcaatggtgggagtttgtctccaggaacggcagctgtgggtggctcttctttggacagtcctgtacaggccatatctccaagtactccatctgctcctgaaggatacgacctgaaaataggactttctttggccccccgacgaggatcactaccagatcagaaagatctgagattaggatccatagatctgaattgggatctgaaacccgcttccagtagtaatcccatggatggcatggacaataggacagttgggggaagtatgagacaccctcctgaacagacaaatggtgtgcataccccacctcacgtggccagtgcccttgcaggggccgtctccccaggtgccctgcgtcggagtctggaagccatcaaagcgatgtcctccaaaggcccctcggcttctggcaggcactaagtcctcctcttgggtcttctccagggctctcctgggggagccaggagttttnaggcagttggagaaacagtggcccattcccttcgcccaggggcctgcccaaggagatggacattccttacctcccattgctcgccgcctggggccaccaccctccacagtccctaaatgttgggcaaacccctattaccagagtatggaactgcaagcccatggcagatgttacgtgcttggacatttaaaggacaccaaggagaaggggcgggtcaaatggaaagtatttaatagcagttctgtggttggacctcctgaaaccagccctgcatacccgtggtacaaggcaggggtgaaccccatccatatttggaggacctccatggaccaagaaaccagaatgtgaagtacctatcccaaaaaccaaaccgcccttgtactttgtacgagccaaagagataatgtgttctaaacccctttccttttctgtggcttttaatttggaattttccagtgtgtaagcatttggactgagaattgggaaaacaaaattactcccagaagccaaaactctttaattcccaaccgaagtcactccaggctgggatcaaatctccattaagaaaaaaaattatatataaatatatatatatatattatatagccaactctgttgacaaaaaaagggagagatttccatcctggttcagataaagttgtgtgctgtgttttaacaggggctgggctgcctttttctaccttgctggtaactagaccaagaagttagagaatagacttaacatccagtaacttcccaaaagaaactgaaagagccccctgtaaatctttatgtggccttcttggagttaaaaaatgaaagggcatatgtaagttgcaaaggtggagggttttagaactctcatgcttcaggtgctgtcggggtaaaagtaactgtttttccccttctcttaaaaccacagaggacctgtgacagctctgcagaaatgccagtgcctggccccctcttgccttttatggctgaggaaagttacccaacaaaggattttattccacatttgtgtgccgggtcattgtcaaataatgtttaggcatccaacatctgaccgcctagtagtgtccattggtctttggagtgcttcctgtgtgtcccagccaactttttgtgtctgattgtgtaaatttctgccaatcaatcatatttggtggctagtggcc

SEQ ID NO: 122615 - DNA, 397 bp, Homo sapiens
tttcgtccccccaacacaatgtgacaagcaccgtttggccctaagtgtttcaacgtgaacctgtgcttctctctgtctttgagtaaaggtgagcccgagttccactacatcgcgggggcccacggcaatgaggtgctgggccgggagctgctgctgctgctggtgcagttcgtgtgtcaggagtacttggctcggaatgcgcgcatcgtccacctggtggaggagacgcggattcacgtcctcccctccctcaaccccgatggctacgagaaggcctacgaaggggtaatggccctggcccatctcacccaataggacatgggcagcgaggccccagctccagagtatgtctggccctggggctatgcaaaattccaccttccgagcatgtattgcg

SEQ ID NO: 122616 - DNA, 2552 bp, Homo sapiens
atgatagagcgggtgctggaaggaaagtgggcattatccagggcagagggattgcatcgtcatcaatgcttagagtttttgattcaccttgtttttcagttgatgaaagttgtgaatgaaatgtgtcccaatatcaccagaatttacaacattggaaaaagccaccagggcctgaagctgtatgctgtggagatctcagatcaccctggggagcatgaagtcggtgagcccgagttccactacatcgcgggggcccacggcaatgaggtgctgggccgggagctgctgctgctgctggtgcagttcgtgtgtcaggagtacttggcccggaatgcgcgcatcgtccacctggtggaggagacgcggattcacgtcctcccctccctcaaccccgatggctacgagaaggcctacgaagggggctcggagctgggaggctggtccctgggacgctggacccacgatggaattgacatcaacaacaactttcctgatttaaacacgctgctctgggaggcagaggatcgacagaatgtccccaggaaagttcccaatcactatattgcaatccctgagtggtttctgtcggaaaatgccacggtggctgccgagaccagagcagtcatagcctggatggaaaaaatcccttttgtgctgggcggcaacctgcagggcggcgagctggtggtggcgtacccctacgacctggtgcggtccccctggaagacgcaggaacacacccccacccccgacgaccacgtgttccgctggctggcctactcctatgcctccacacaccgcctcatgacagacgcccggaggagggtgtgccacacggaggacttccaaaaggaggagggcactgtcaatggggcctcctggcacaccgtcgctggaagtctgaacgatttcagctaccttcatacaaactgcttcgaactgtccatctacgtgggctgtgataaatacccacatgagagccagctgcccgaggagtgggagaataaccgggaatctctgatcgtgttcatggagcaggttcatcgtggcattaaaggcttggtgagagattcacatggaaaaggaatcccaaacgccattatctccgtagaaggcattaaccatgacatccgaacagccaactgatggggattactggcgcctcctgaacccctggagagtatgtggtcacagcaaaggccggaaggtttcactgcatccacccaagaacctgtatggttggctatgacatgggggcccacaaggtttgaacttcacacttagcaaaaccaacattggccaggatccggagagatcattggagaagttttgggaaagcagccccgtcagccttgcccagcccaggcggctgaaagctgcgggggccggaagagacgacagcgtgggtgaccctccctgggcccttgagactcgtctggggacccatgcaaattaaaccaacctgggtagtagctccatagtggactcactcactgtttgtttcctctgtaattcaagaagttgcctgggaagagagggtgcattgtgaaggcaggtcccaaaagggaaggctggaggctgaggctgttttcttttctttgttcccatttatccaaataacttggacagagcagcagagaaaagctgatgggagtgagagaactcagcaagccaacctgggaatcagagagagaaggagaaggaggggagcctgtccgttcagagcctctggctgcatagaaaaggattctggtgcttcccctgtttgcgtggcagcaagggttccacgtgcatttgcaatttgcacagctaaaattgcagcatttccccagctgggctgtcccaaatgttaccatttgagatgctcccaggcgtcctaagagaatccaccctctctggccctgggacattgcaagctgctacaaataaattctgtgttcttttgacaatagcgtcattgccaagtgcacatcagtgaggcctcttgaatctgtttagtctccttttttcaacaaagggagtgtgttcagaaaaggagagagaggctgagatcattcaggagtttgttgggccagcaagcatggagcttcttgcacaaattctggggtccataaacaacccccaaagtcccctgctgatccagtaggccctggaaggttccccaggtagggaagagccagaggtgcaagccttcctgaagggccagaaaatttagcctggatctcctcttttacctgctaggactggaaagagccagaagtggggtggcctgaagccctctctctgctttgaggtatttgccccttgtgtggaatttgagttgctcatggggttggcctcatatcagcctggggagttatttttgatatgtagaatgccagatcttccagattaggctaaatgtaatgaaaacctcttaggattatctgtggagcatcagtttgggaagaattattgaattatcttgcaagaaaaaagtatgtctcactttttgttaatgttgctgcctcattgacctgggaaaaatgaaaaaaaaaaataaagcaaatggt

SEQ ID NO: 122617 - DNA, 1306 bp, Homo sapiens
caaagacagaccacatattaggtcacaaaacatgtcttaaaacattcagaaaaattgaaataatatcaggaatcctctctgaccacagtggaataaaactacaaatcaataacaaggggaattttggaaaccatacaagcacatggaagttaaacaatatgctcctaaatgaccaatgagtcaatgaagaaattaagaaggaaatttaaaaccatcctgaaacaaatgataatggaaacgcaacatatcaaaacctgtgagatacagggaaagaagtactaagaggaaagttgtacctataagcacctacatcaagtaagtagaaaaacttcaaataaataacctaacaatgcatcttaaagaactagaaaagccagagcaaaccaaacgcaaaattactagaagaaaagaaataataaagatcagagcagaaataaatgaaattgaagcaaagaaaacaataccaaagttcaatgaaacaaacagttggtttcttgaaaatatacacaaaactaacgaacatttagccagactaagaaaaaaagatccaaataaaatcagagaagaaaaagaagacattataaccgataccgtagaaattcaaaggatcattagaagctactatgccaagaaatgggaaaacctggaagaaacggataaattcctcgacacatacaatcttccaagattgaacaatgaagaagtccaaaacctgagcagaccaataacaaccactgttcccatcccctgaccccatctttgtcggtttggaaattcgggtccagtcctaaaatccagaaccgtcctacggtcctgacagttaataattaagtccaggctgcccacttccccagaagccctacataattatttgcctcctatgaagacgttcctgaggatgtatgaagttaccagaactggcagtctattcaagatggataaatcagtgaaactacttaacacagctaatttttttctctgaaaaatcatcgagacaaaagagcccacagagtacaagtttttatgattttatagtcaaaagatgattattgattgtgagataggttaggttttggggggtccagtagttcagtgagaatgtttatgtttacaactagccttcccagtaaaaaaaaaaaaaaaaaaaaaaaaaaattgtaaacatcacttatattactttattgcagcttcatcaccagtacattatatgttgtaatatttatttacctgatccattttggtccattttctgctttattttgctaataaactgtgatgttacttctagtgctaaacatgggaaaaa

SEQ ID NO: 122618 - DNA, 842 bp, Homo sapiens
atggctgctgaagatgagttactgttgccgcggctccccatgctgctcgaaacaggcaaacagcttctggacgaagtagaattagcagctgaaaccaccggttaccagatagtccaggagaagcgggctcgagaacattttataaactacttaactcagtgccattactatcacattgcaaagtttgagctgctcaaaaccaagaacaactcagctgaaaatcacactgctaattcctccatggcttatcctagtctcgttgctatggcatctcaaaggcaggctaaaatagagagatacaagcagaagaaggagttggaccataggttgtctgcaatgaaatctgctgtggaaagtggtcaagcagatgatgagcatgagaggcctccagtgaaatccttcattctcacgcggaacacagcccaagccaaattatttggagctagttatccaagtctggcaactatgacagtgagtgactggtatgaacaacatcggaaatatggagcattgccagatcagggaatagccactgcaacaccagagaaattcagaaaagcagctcagcaacagaagtatcaagaagtgaaggagggagaggatgatgaacactctacagagttcgggagtgggataactggaaggacacccatcctgggggctatggcaaccgacagaacatgggctgatcttcccccaacacgacaggactgcagggtgcacacctcccccaccaaggaaaaccatgcagtgttcccctccctgggctcccgctcagctgtgtacaacgaaggcaaagatgctaaatatgctttgcattcaatgaagtgtcaagtgattaa

SEQ ID NO: 122619 - DNA, 1388 bp, Homo sapiens
  misc_feature (1)...(1388): n = a,t,c or g
gtccccgagctgttcggaaactgtagacagttactggaggaagtagaagtggcgacttgaccccgccgtttccgggatagtcccggaggaagtgttcaagggctttggacctccttgaggagggctgccgaaatgttattcccagtccaccttgttcggccgcgaatgtagattttggaaagatttgtcccccacgcacttgattaccttttggggtccaggcttttcaaggagcccctcccattgaaacaagtcaaccccagcaggagtctagatcatttgcagcggggctcgagaacactttataaactacttaactcagtgccattgctatcatgtggcagagtttgagctgcccaaaaccatgaacaactctgctgaaaatcacactgccaattcctccatggcttatcctagtctcgttgctatggcatctcaaagacaggctaaaatacagagatacaagcagaagaaggagttggagcataggttgtctgcaatgaaatctgctgtggaaagtggtcaagcagatgatgagcgtgttcgtggatattatcttcttcaccttcagaggtggggttgatatcagcttagaagagattgagagcattgaccaggaaataaagatcctgagagaaagagactcttcaagagaggcatcaacttctaactgcatctcgccaggagaggcctccagtgaaaccctttcattctcacttcggaacatggcttcatagccaaagtanctttggagctggttattccaagggctggccaacttatngtacggtgagtgagctggtatgaagcaacatcggaaattatggagcacttatccggatcagggaatatgccaaggcagcaccagaggaattcagaaaagcagctcagcaacaggaagatcaagaagaaaaggaggaagaggatgatgaaccaaacaacttccacagagcccgggagtggggatgactggaagtgacacccatccttaggggcctatgggaaccgacagaacatgggctgatcttcccacaacaccacaggactgcaggggtgcacaactcccctgccaaggaaaaccatgcagtcctcccctccgccggtctcctggcttcagctctgtacaaccgagggcaaagatgctaaatcttgctttgcattcagtaaagtgtcaagtgatttaagtgtgtatttgtacccctagatgatatgaaccagcagtcttgttttggcatcatccctcatcatgttgtattccagcttcttcgagtggaaggaaaagagtgctgagaaatggctctgtataatctatggctatccgaattctctgaaaaaataataaaagtcccctctattatatgagcctgtccagaaaaaaaaaaaaaaaa

SEQ ID NO: 122620 - DNA, 1212 bp, Homo sapiens
ggcacgaaggaactgcttcttacttaactggggggaagcccccttttgttaacatgaaccaaacctttgggggtggatcccttggttgaaggggggcgtaacccaagggtttaatgagaaggccgtttttgctgccctgcggccaagctatggccagccagcagggaagcccgcctttgcaggagccatgtcactagccggggcccaaggcagcctgtggtctgtggaaggaggcaataagctggtttgttccggtttgctgaagctcaccaaggccaatgtgatccatgccacagtgacctctgtgaccctgcacagcacagaggggaaagccctgtaccaggtggcgtatgagaatgaggtaggcaacagctctgacttctatgacatcgtggtcatcgccacccccctgcacctggacaacagcagcagcaacttaacctttgcaggcttccacccgcccattgatgacgtgcagggctctttccaacccaccgtcgtctccttggtccacggctacctcaactcgtcctacttccggtttcccagaccctaagcttttcccctttgccaacatccttaccacagatttccccagcttcttctgcactctggacaacatctgccctgtcaacatctctgccagcttccggcgaaagcagccccaggacgcagctgtttggcgagtccagtccaccaagcccctctttcggacccagctaaagaccctgttccgttcctattactcagtgcagacagctggagtgggaagggccaatcccctctatggcttccggccccacggcttcccgaggtttgcactccatgaccagctcttctacctcaatgccctggagtgggcggccagctccgtggaggtgatggccgtggctgccaagaatgtggcctttgcttggctttacaaccgctggtaccaggacctagacaagattgatcaaaaagatttgatgcacaaggtcaagactgaactgtgagggctctagggagagcctgggaactttcatcccccactgaagatggatcatcccacagcagcccaggactgaataagccatgctcgcccaccaggcttctttctgacccctcatgtatcaagcatctccaggtgacctactgtctgcctatattaagggtccacacggcggctgctgcttttttttaagggggaaagtaagaaaagagaaggaaatc

SEQ ID NO: 122621 - DNA, 375 bp, Homo sapiens
cctgatgttctgaaaaacatcatcactgagatcatccactccatcctgctgccgaaccagaatggcaaattaagatctggggtcccagtgtcattggtgaaggccttgggattcgaggcagctgagtcctcactgaccaagctcagtaaacgctctgccactgacctgtgtggcaggaatgatggaaaccttaaggtgatcttccctgatgcagagatggaggatgtcaataaccctgggctcagggtcagagcccagcctggggactatgtgctggtgaagctgtgtcccgtgatcgaggcttccttcaatggcatgtatgcagacctcctgcagctggtgaaggacgcgcagacagaaattcgccacgactag

SEQ ID NO: 122622 - DNA, 2121 bp, Homo sapiens
atgcatgctaagtccataaaaacccaggcattggcagatatggagaagctaaaggtagttgtcagggacaaaaactgggtagcaaggataattccccagatgacatcaaaaggccatgttggtgtcaccaccacctccagtgctaaattgaagtctcaggggaaggacagtgtggcggttaagagggtccggtctggactgatgatcgggttcaggttcatggtcatccctccttattcttttggtccacaagtgctcatggagattcctaaagatgcagacaagttgctctgtcccagctgtgctgcggtggtgctgggacaaaagaagcatgagacgcagactctgtccctcaaagaactcccagtgcaggacaatgtggtgcccaaggaagacccagggacatgggagtggaggacagtcaaagaagggatcctggaagaggtgatgtgttggttgcaaagccgagtagaaggcgattgggcaaaggaggagagaaagatattccacgaaggggaactagcagaagcaaaggctgggagaggaggtctggcatcctgcacttgctgccctctgacacctgggaagatggccggcccgtggaccttcacccttctctgtggtttgctggcagccaccttgatccaagccaccctcagtcccactgcagttctcatcctcggcccaaaatgtcatcaaagaaaagctgacacaggagctgaaggaccacaacgccaccagcatcctgcagcagctgccgctgctcattgccatgcgggaaaagccagccggaggcatccctgtgctgggcagcctggtgaacaccgtcctgaagcacatcatctggctgaaggtcatcacagctaacatcctccagctgcaggtgaagccctcggccaatgaccaggagctgctagtcaagatccccctggacatggtggctggattcaacacgcccctggtcaagaccatcgtggagttccacatgacgactgaggcccaagccaccatccgcatggacaccagtgcaagtggccccacccgcctggtcctcagtgactgtgccaccagccatgggagcctgcgcatccaactgctgcataagctctccttcctggtgaacgccttagctaagcaggtcatgaacctcctagtgccatccctgcccaatctagtgaaaaaccagctgtgtcccgtgatcgaggcttccttcaatggcatgtatgcagacctcctgcagctggtgaaggtgcccatttccctcagcattgaccgtctggagtttgaccttctgtatcctgccatcaagggtgacaccattcagctctacctgggggccaagttgttggactcacagggaaaggtgaccaagtggttcaataactctgcagcttccctgacaatgcccaccctggacaacatcccgttcagcctcatcgtgagtcaggacgtggtgaaagctgcagtggctgctgtgctctctccagaagaattcatggtcctgttggactctgtgcttcctgagagtgcccatcggctgaagtcaagcatcgggctgatcaatgaaaaggctgcagataagctgggatctacccagatcgtgaagatcctaactcaggacactcccgagtttttttatagaccaaggccatgccaaggtggcccaactgatcgtgctggaagtgtttccctccagtgaagccctccgccctttgttcaccctgggcatcgaagccagctcggaagctcagttttacaccaaaggtgaccaacttatactcaacttgaataacatcagctctgatcggatccagctgatgaactctgggattggctggttccaacctgatgttctgtaaaacatcatcactgagatcatccactccatcctgctgccgaaccagaatggcaaattaagatctggggtcccagtgtcattggtgaaggccttgggattcgaggcagctgagtcctcactgaccaaggatgcccttgtgcttactccagcctccttgtggaaacccacctctcctgtctcccagtgaagacttggatggcagccatcagggaaggctgggtcccatctgggagtatgggtgtgagctctatagaccatccctt

SEQ ID NO: 122623 - DNA, 1209 bp, Homo sapiens
atggggctgcccgcgcagggtgtgggggggaacaccttagcgaagctattggcaagtgacgatatcgccaaaggggggaaaagaaataaaagcgaagctagcgtcgtgagaaacgcggcggacgccccaaaagtgctccaggacctttctgcccggctgatgggggatttcgagttgagaaactgcaacagtccctgtaccctgctgatcggaatagttgtgctcatcaacgcagcagcagaaacactagttttcctctcagaccacatggaggaccaaggaagctcccagctgaatgtggccgtcttatcttattttcagcagcaagaccccgaaggccagaaggaagaaacggcaggtattgacctgatggacatggcttcggacatcctgcagcccaaaggagatgatgtggcccggatcagctggtacctccgtgacatcatcactcgataccaggagaccttcaacgtcatcgagaggtgccccaagcccgtgattgctgccgtccatgggggctgcattggcggaggtggggctgctgctccgatgccgcggccactggcatccagcctcagctctgtcatgggccagactgtgtcccaagaggcagccccacctcccgggagccagggttggttctggtggtcattcagcatccctggcctctacctcctaggtgtggaccttgtcaccgcctgtgacatccggtactgtgcccaggatgctttcttccaggtgaaggaggtggacgtgggtttggctgccgatgtaggaacactgcagcgcctgcccaaggtcatcgggaaccagagcctggtcaacgagctggccttcaccgcccgcaagatgatggctgacgagatttccagcaagagccccgtggcgctgcagagacaaggtcaacctgctgtattcccgcgaccattcggtggccgagagcctcaactacgtggcgtcctggaacatgagcatgctgcagacccaagacctcgtgaagtcggtccaggccacgactgagaacaaggaactgaaaaccgtcaccttctccaagctctgagagccctcgcgtcccaggccccagcaagggctcctctttgtcccgcctcatccacagaaagggaggatgggcgatgacagttgtttctatgccttctgacccagtttcccagtttataactttatgacaatgagtttctcaagcccaag

SEQ ID NO: 122624 - DNA, 1402 bp, Homo sapiens
ctacccgcctggagttacgggaacgacgacttcgtcatcggtgccctcgctcaacatggcggccttctgtgtccgccccctccgctaacgggcacgttactccgtccgaacgcagtagacgaaggcggcggcgatggcggcgggbgatagtggcttctcgcagactccgcgacctactgacccggggactgacaggctccaactacccgggactcagtattagccttcgcctcactggctcctctgcacaagaggaggcttccggagtagccctcggtgaagccccagaccacagctatgagtcccttcgtgtgacgtctgcgcagaaacatgttctgcatgtccaagctcaaccggcccaacaagaggaatgccatgaacaaggtcttctggagagaagatggtagagtgctttcaacaagatttcggagagacgcttgactgttcgggcggtgggtgatctttggttgcaggaaaaatgtttcaattgcaagtattgacctgatggacatggcttcggacatcctgcagcccaaaggagatgatgttggcccggatcagctgggaccttccgtgacattataactcgataccagggagacctttcaacgtcatcgagaggttgccccaagcccgtgattgcttccggtccatgggggctgcatttggcgggaggtgtgggaccttgtcaccgcctgtgaacatccggtacttgtgcccagggatgcttttcttccagggtgaaggaggtgggacgtggggtttggcttgccgatgtagggaacactgtcagacgcctgcccccaaggttcatcggggaacccagagccctggtcaaacgagcctggccttcacccgcccgcaaagatgatggctgacgaggccctgggcaagtgggctggtcagcccgggttttccccagacaaagaggttcatgctggattgttgcctttagcgctggcggccagagatttcccagccaaagagcccccttgggccgtgcagagccaccaaaggtcaaacctggctggtaattccccgcggaaccatttgggtggccgaagagccttaaactacgtggtaaggcgtcctgggaacatggagcatgctggcagacccaagaccatcgtgaaagtcggtcccaggccgacgactgatgaacaaggaactgaaaacccgtcaccttctcccaagctctgagagccctcgcgtcccctagccccagccagggggcctggccttgtcccgcctcatccacgagaaagggaggatgggcgatgacagttgtttcctatggcttctgaccccagttttcccagtttaaaactttatgacaatgagtttctgcaagcccaaggccttatcttcaccccacaaacacataaagcaaagtaaagaaaaa

SEQ ID NO: 122625 - DNA, 548 bp, Homo sapiens
acacttccctaacttttcacagcccggaggtgcccagttcatgaccgcccagttgcacacgttgagctggggctgcgcggggaccaaggcctcctggtgctgctggacgaccgaggtgatcctgctgagggcctcctggtactcggcgctggcaaagctgagggggaacctctcccctgggtcccgtcccaggtggaagatcaggggcagcttcgtgtggtcttccagattgtgagttgtgacccctgaaacgttctgcccagggcagaaatcaatgccctgtctgaagttctcccaggagttggtccaggtccagaagtgagccttgtgctgcccgagggtggccgccatcagcgtgtcgccacggtaatagaagataggcctgtccatcagccggccctgcaggagggtggggaggaggttgaggccatcaatggccctgtcgctgggcggcgtcaggcccgcaagggccaggctggtggtgaagaggtccatgatgctgcccagctggtggctcacctggcctgcagtgacgtgccctggccacc

SEQ ID NO: 122626 - DNA, 1881 bp, Homo sapiens
ttatttttccaagtggtttgatgacttattcacctccgtgtgtctggacggggccgtcttgcggctggagcggggagcagggtcagcaagtggtcttggggacgaggggatgcggccaggcctcttcctgtgtggttcgcagccgtgggctggtagcccacggggcctccgagcctcgaagtgggtctgattggccaggtgctgctgcctggttaacatgcctgccaggccacacagcttgtggctccctggctgttcagagccaccaccttccttcccacggcacggcgggcacccagcggctcccacgctgcagccgggtctggccctggaaagaggcttcagctgggccttttcgcccgcacagcaggagcccaggctgaagtctgcagctgccgaggggccttcttcccgaatcctgcgcggcagatccaggggcatgaccgcccagttgcacacgttgagctggggctgcgcggggaccaaggcctcctggtgctgctggacgaccgaggtgatcctgctgagggcctcctggtactcggcgctggcaaagcctccaagctgccctgtggtcacgtcagctgcccccacacaggcgagacccatgatcaagccccagggagctgcatggtccacgcaaaagctaccaatacccacatctgcatcacccacgcaaaagtcaccaatacccacatctgcatcatccacgcaaaaactaccaatacccacagctgcgtggtccacgcaaaaactaccaatacccacagctgcgtggtccacgcaaaagctaccaatacccacagctgcatggtccacgcaaaagctaccaatacccacagctgcatggtccacacaaaagctaccaatacccacagctgcatcatccacgcaaaagctacccatgcccacagctgcatcatccacgcaaaagtcaccaatacccacagctgcatcgtccacgcaaaagctaccaatacccacagctgcatggtccacgtaaaagctaccaataaccagagccgcatggtccacacaaaagctaccaatacccacagctgcatcatccacgcaaaagtacacaatagccacagctgcatcgtaccacgcaaaagccacagatgcatggtccacgtaaaagctaccaatacccagagctgcatggtccacgtaaaagctaccaatacccacagctgcatggtccacgcaaaagctaccaatacccacagctgcatcatccacgcaaaagtcaccaatacccacagctgcatcgtccacgcaaaagctacccatgcccacagctgcgtggtccacgcaaaagctaccaatacccacagctgcatggtccacgcaaaagctaccaatacccacagctgcatcgtccacgcaaaagctacccatgcccacagctgcatcgtccacgcaaaagctacccatgcccacagctgcatggtccaccataacaacaatgggggcaacaacccacgcgtccatcaacggacacacaaaacgtggtctttcttcatccgcggtgtccagaacaggcaagttcacagagatcaggagcgggggcagactgagggctttccaacccgaaggtctcctcggcagaagccccttcatgtgccaaggacgagccagaggtggagaagggccgtgggccggccccgtggacgagccagaggtggagaagggccgtgggccggccccgtggatgagccagaggtggagaagggccgtgggccggccccgtggacgagccagaggtggagaagggccgtgggctggccccatggtgcagagtgagcaggtgctgggggcactggcctgcagctcaggcctctgcttgtccctctggtcaccccagtcctggggcagcat

SEQ ID NO: 122627 - DNA, 543 bp, Homo sapiens
atgaagatcaacatgtccctttctctgatcctaacactgaatttgactgtcaccttgtccctggctggcaccatgaacctaactgaagatgaccagcagggggcgtgcgagccgccttgtcggacccctgagaagcccccaccgcctccgtgctcctactgcggccgccagcgccgggcccgcagtgaggaggagaacctcattttcctcaacacagatctaaggggacaccgcctcactttgagacaacttgaggctgcgtcagtgtggtccacagaatgtaggaccaactacggcataaaagctccacctcggatggggcaagactcctggctgacactggggtctttattgaaatcttcccagattaaatggtcccaattcactaatgcccagtctgaggagagtcaggaggaacaaagcaaggcaagttacttctatagcaggctgcgccttacagatggagcaatggatgcatggtatgacacggcacccaacaagaataagtacacctattacggctgcgagggaagtaagaattga

SEQ ID NO: 122628 - DNA, 396 bp, Homo sapiens
taagtttaaaagtagaaggcaaagaattgaacatactgacatattctttcaaaagaaatttagaactcatatataacaaccccttcccttgtatttctttacagctttcttttcaaaagtttttttaacatgtcctggcttagttgttttgcttgattttccaaaagaagaagcttctctggataaggtggaggatagttaagggaggttttagcaagtgccgtttctacgagcctctgcaccaacccacggatgcatggtatgacacggcacccaacaagaataagtacacctattacggctgcgagggaagtaagaattgaggctattattcctttccatttactgaactacttttctagccatcctgtaaaggggtcatttacccctgagttg

SEQ ID NO: 122629 - DNA, 1753 bp, Homo sapiens
tcactgcacttcgtttgcgggagggcttctgttggcgaagcagcaggtccgggggcggcctgcggagcctcgcggggctcggatctcctgggcccgcaatgccggaggagaggaggcccaaatgctgggaaagctgttcggagtggctgcttgggccttgaacccgaggtgggcgcacgtctgccgtatctgggccctagatcctgtttcgatttcttctctcatcgtgccaggggcgatgaggttcagttgtgcttctggaaggatccagggttgagggttctccaatcgcagcaaagggcccgggctgggtgttgccgagcggtcctcggctccccggtggaccatgcccctccagaggtctggcccagcgtcgctctgctctgcaaaaaagtggctctccgctgatctcgaatgcaccagcgagcctccagattctgggtgaagccgattttggaaatccatatgccgcccttgtgctgctaaccatcgagactgctgttcgtacagcggaaagggatggacacatgacacctgagtcaagcaagtgccattatcctcagaatcatgggccattgttcctgggtcaagccctaccaaattaaagctaaggaaagcttagtctatctatcttttcctttcctttcctaacccagtgcttaaatccattactattcctaccaccagcaactctaaccccactgtagggcacttctgtggtttaggagcagaagtcactggaaaggatcctataggcttctttaaggtgcactttgttctccctcctctacctcctacaactgcccctttcccaaacctacaaaatcaaactatgactcgcctcatgccaaatgacaaaagcaaggtctcagtagtagaaataggagacctatggcaaaccatagctattgacaggagcagtagttatgctctagttcaattggctatcccttttactctggcatttcatcaaccagaggaaggaaaaataagacatcataaagtgagagaagctccttataggtcattcaactctcatgtctatttagatgcaattggagtcccacggggaataccagatcaatttaaagcccgaaatcaaatagctgcaggatttgagtcaatattttggtgggtcacaattaataaaaacatagattggataaactacatctattataaccaacagcaatttatgaactacactagagatgctgttaaaggaatagctgagcaattagggactaactgccagatggcttgggaaaataggatagccttagacatgatattagcagaaagaggaggagtttgcatcatgattaaaactgaatgttgtgccttcatcccaaacaacactgcccctaatggaagtataacaaaggcattgcaaggtctgactgctctgtccaatgagttagccagcagctcaggggtaaatgacccctttacaggatggctagaaaagtggttcggtaaatggaaaggaataacagcctcaattcttacttccctcacagctgtaatgggtgtacttattcttgtcgggtgctgtgtcataccatgcatctgtgggttggtgcagagacaccggggaccgccccttgtggtcatagagacgaagccgctcggcctagagcgcctcgccggcctcccggtcggccacgcactaaaactgggctcaggaatccaagctacaccccaaaatggggagaacgcggatcgaagggaggccttcccggccgcgtcctag

SEQ ID NO: 122630 - DNA, 1368 bp, Homo sapiens
atgttactgctaaatcagacactaaccccaaatgagagaagtgccaccataactgcagcccgagagtttggcgatctctggtatctcagtcaggtcaatgacaggatgacaacagaggaaagagaacgattgcccacaggccagcaggaagttcccagtgtacaccctcactgggacacagaatcaaaacacggagattggtgccgcagacatttgctaacttgcatgctagaaggactaaggaaaactaggaaaaagcccatgaattattcaatgatgtccactataacacagggtaaggaagaaaatcctaccgcctttctggagagactaagggaggccttgagaaagcatacctctctgtcacctgactctattgaaggccaactaatcttaaaggataagtttatcactcagtcagctacagacatcagaaaaaacttcaaaaacttagaaaccctattgaacttggcaaccttggtttttcataatagagataaggagaagcaggcagaacaagacaaacgggatttaaaaaaggctaccgctttagttatggccctcaggcaagcagactttggaggctctggaacacggaaaggctgggcaaatccaatgcctaatagggcttgcttccagtgtggtctacaaggacactttaaaaagattgtccaaatacaaataagccaccccctcatccatgccccttatgtcaaaggaatcaatggaaggcccactgccccaggggacaaaggtttccaaaccaaagctcaactctgctcagaacaggctaaatacttagggctaaaattatccaaaggcaccagggccctcagtgaggaacgtatccagcccatactggcttatcctcatcccaaaaccctaaagcaactaagagggttctttggcataccaggcttctgccgaatatggattcccagaatcaaagctgtaaaactacacatcgttcttcaaatggatccccagaggcagtccatgactaagatctaccatggacccctggactggcctgctagcccatgctctgatgttaatgacaccaaaggcaaccctcctgaggaaatctcaactgcaccacccctactatgccccaattcagcaggaagcagttggagcggggataacacagaaagaaggcctttaccagatgcaggccccttgaccttggacttcctaggctccaaacctagagtacaaaacaacagtgatgccagcagagaaaaacacagccatgaaacaaaacacccagaccagagacacagaactgcttcatatagccattttcaggcaaagcagggagccagtgttttgccatgcatattagagaaaagggaagcctcctactga

SEQ ID NO: 122631 - DNA, 421 bp, Homo sapiens
gccaactaattttaaaggataagtttatcactcagtcagctgcagacattaaagaaaaacttcaaaagtccaccttaggcccagagcgaaacttaaaaaccctattgaacttggcaacctctgttttttataatagagatcaggaggagcaggcggaacgggacaaacgaggtaagaaaaaggccaccactttagtcatggccctcgggcaagcggactttggaggctctggaacgcggaaagcctgggcaaatcgaatgcctaatagggcttgcttccagcagtacccccttagacctgaggcccaacaaggactccaaaagattgttaaggacctaaaagcccaaggcctagtaaaaccatgcagtagcccctctgatactccaattttaggagtacagaaacctaatggacagtggag

SEQ ID NO: 122632 - DNA, 470 bp, Homo sapiens
gcagttgtaagatttaatagaatgaaaacagagctcccatacaacaggaggggacccaaagggggttgcctttgccggctcaaatgcctgggtttatatcccaatcattgtccctccccctgtgctctcaggcaatagatgattggctatttctttacctcctgttttagcctaattagcattttagtgagctctctttactacctgattggtcaggtgtgagctaagttgcaagccccgtgtttaaaggcggatgtggtcaccttcccagctaggcttatggattcttagtcagcctaggaaatccagctagtcctgtctctcagtgggggtggttactctcatgctgttctcatgatagtgagttctcacaagatctgatagttttataaagggcttttccccaccttcgctctgcacttctccttgctgctaccatgtgaagaaggatgtatttgcttccccttctg

SEQ ID NO: 122633 - DNA, 1281 bp, Homo sapiens
atggggaacatcactgcagacaactcctcgatgagctgtaccatcgaccataccatccaccagacgctggccccggtggtctatgttaccgtgctggtggtgggcttcccggccaactgcctgtccctctacttcggctacctgcagatcaaggcccggaacgagctgggcgtgtacctgtgcaacctgacggtggccgacctcttctacatctgctcgctgcccttctggctgcagtacgtgctgcagcacgacaactggtctcacggcgacctgtcctgccaggtgtgcggcatcctcctgtacgagaacatctacatcagcgtgggcttcctctgctgcatctccgtggaccgctacctggctgtggcccatcccttccgcttccaccagttccggaccctgaaggcggccgtcggcgtcagcgtggtcatctgggccaaggagctgctgaccagcatctacttcctgatgcacgaggaggtcatcgaggacgagaaccagcaccgcgtgtgctttgagcactaccccatccaggcatggcagcgcgccatcaactactaccgcttcctggtgggcttcctcttccccatctgcctgctgctggcgtcctaccagggcatcctgcgcgccgtgcgccggagccacggcacccagaagagccgcaaggaccagatccagcggctggtgctcagcaccgtggtcatcttcctggcctgcttcctgccctaccacgtgttgctgctggtgcgcaggtactgggaggccagctgcgacttcgccaagggcgttttcaacgcctaccacttctccctcctgctcaccagcttcaactgcgtcgccgaccccgtgctctactgcttcgtcagcgagaccacccaccgggacctggcccgcctccgcggggcctgcctggccttcctcacctgctccaggaccggccgggccagggaggcctacccgctgggtgcccccgaggcctccgggaaaagcggggcccaggaggaggaagtgaccaagtttgaaggcggcagaaatggccacacagccaagaagagcccatgcaactcagtccaggattttactggaatcaaagctgtaaaactacaaatagttcttcaaatggagccccagatgcagtccatgactaagatctaccatggacccctggaccggcctgctagcccatgctccgatgttgatgacatcgaaggcacccctcccgaggaaatctcaactgcacaacccctactacgccccaattcagcaggaagcagttag

SEQ ID NO: 122634 - DNA, 658 bp, Homo sapiens
atggcttctaatagagctataacactcactgtatggcccaagatttcattccttggaatccatgaggccaagaaccccaggtcagagaacaagaggcttgccgccatcttggaagcggcccaccaccatcttgggagctctaagaacaaggaccacccgatgggaaacgttcccccccaaggcaaaaacacccctaagatgtattctggagaattcggcccagccagagtgtacgtaccttttttcctgtcagacttgaagcaaattaaaatagacctaggtaaattctcagataaccctgatggctatattgatgtttcacaagggttaagacagtcctttgatctgacatgggagagatataatgttactgctaaatcagacactagctccaaatgagagaagtgccaccataactgcagcccgagagtttggtgatctctggtatatcagtcaggtcaatgataggatgacaacagaggaaagagaacaactccccacaggccagcaggcagttcccagtgtagaccatcattgggacacagaatcagaacaaggagattggtgctgcagacatttactaacttgcgtggtagaaggactaaggaaaactaggaagaagcctataaattattcaatgatgtcccctataacatag

SEQ ID NO: 122635 - DNA, 1812 bp, Homo sapiens
atgtcttctaatagagctataacactcaccgcatggcccaagattccattccttggaatccgtgaggccaagaaccccagaattggaggaaaatactgggcacctgtcagccagttaaaaacgattagcgtggccgccggacttaagactcaggtgttacgctatctgcggaagggctttctaacaacccccaacccttctgggttggggacgttggtactaatggttcacactttcatttcctctagcaagttgtatctccaaagggatctagggaggctctgcgttgtgtccttaggcacctgggctgtaacccagggagtcttatccctggtgtccctcctgattcagcccgaagagtttggtgatctctggtatctcagtcaggtcaatgataggatgacaacagaggaaagagaacaattccccacaggccagcaggcagttcccagtgtagaccctcattgggacacagaatcagaacatggaaattggtgccgcagacatttgctaacttgtgtgctaggactaaggaaaactaggaagaagcctatgaattatgcaatgatgtccactataacacagggaaaggaagaaaatcctactgcctttctgatcaggagaagcaggcggaatgggacaaacgggataaaaaaaaaggccactgctttagtcatggccctcaggcaagcggactttggagtctctggaaaagggaaaagctgggcaaatcgaatgcctaatatggcttgcttccagtgtggtctacaaggacactttaaaaaagattgtccaagtagaagcagtacccttagacctgaggcccaacaaggactccaaaagattgttaaggacttaaaagcccaaggcctagtaaaaccatgcaatagcccctgcaatactccagttttaggagtacagaaacctaatggacagtggaggttagtgcaagatctcaggattatcaatgaggctgttcttcctctataccctgctatacctaacccttgtactctgctttcccaaaaaccacagaaagcagagtggtttacagtcctggaccttaaggatgcctttttctgcatccctgtacaccctgactctcaattcttgtttgcctttgaagatcctttgaacccaatgtctcaactcacctggactgttttaccccaagggttcaagcatagcgcccatctatttggccaggcattagcccaagacttgagccaattctcatacctggacactcttgtccttcagtacggggatgatttaattttagccacccgatcagaaacctggtgccatcaagccacccaagcactcttaaatttccttgctacctgtggctacaaggtttccaaacaaaatgctcagctctgctcacagcaggttaaaaacttagggctaaaattatccaaaggcacaagggccctcagtgaggaacgtatccagcctatactggcttatcctcatcccaaaaccctaaagcaactaagagggttccttggcataacaagcttctgccgaatatggattcccagaatcaaagctgtaaaactacacatcgttcttcaaatggatccccagaggcagtccatgactaagatctaccatggacccctggactggcctgctagcccatgctctgatgttaatgacaccaaaggcaaccctcctgaggaaatctcaactgcaccacccctactatgccccaattcagcaggaagcagttggagcggggataacacagaaagaaggcctttaccagatgcaggccccttgaccttggacttcctaggctccaaacct

SEQ ID NO: 122636 - DNA, 1165 bp, Homo sapiens
tcactctattaaatattgcaactgcacactcttctggtctgtgtttgttacggctcgagctgagctttcactcgctgtccacccctgctgtttgccactgtcgcagacctgccactgacttccacccctccggatccagcagggtctctgctgtgctcctgatccagcaagacacccattgccacactggatcgggctagaggctcgccattgttcctgcatggctaagggcccagggttcgtcctaattgagctgaacactagttgcttggttccacagttctcttccatgacccacagcttctaatagagctataccactcatcgcatggccccaaggttccattccttggaatccgtgaggccaagaactccaggtcagagaatacgaggcttgccaccatcttgggagccggcctgctaccatcttggaagtggttcaccaccatcttgggagctctgtgagcaaggaccccccggtaacattttggcaaccacgaacggacatccaaagtgaatcgaagctgtaaaactacaaatggagcccaagatgcagtccaagactaagatctaccgcagacccctggaccggcctgctagcccacgatctgatgttaatgacatcaaaggcacccctcgtgaggaaatctcagctgcaaaaacctctactacgccccaattcagcaggaagcagttagagcggtcgtcggccaacctccccaacagcacttaggttttcctgttgagatgggggactgagagacaggaccagctggatgtcctaggctgactaagaatccctaagcctagctgggaaggtgactgcatccacctttaaacacagggcttgcaacttagctcacacccgaccaatcaggtagtaaagagagctcactaaaacgctcattaggcaaaaacaggaggtaaagaaatagccaatcatctattgtctgagagcacagcgggagggacaatgaccgggatttaaacccaggcattcgagctggcaacggctaccctctctgggtcacctccctttgtatgggagctctgttttcactctattaaatcttgcaactgcacactcttctggtccgtgtttgttacggcttgagctgagctttcgctcactgtccaccactgctgtttgctgctgtcgcaaacc

SEQ ID NO: 122637 - DNA, 642 bp, Homo sapiens
ttatttatttgcagttattgtaaaaggggttgagttcttgattttgttctctgcttggtcgctgttggtgtatagaagagctaccaatttgtgtagattaatcttgtatctgaaaactttgctgaactcttttatcagttctaggagctttctgggggaggctttagggttttcaaggtaaatgatcatatcgtcagcaaacagtgccagtttgacttcctctttaccaatttggatgccctttatttctttctcttgtctgattgctccggctaggacttccagtactatgttgaagaggagtggtgagagtgggcatccttgtcttgttcctcccagggttgtattacattgaggtatatcccttgtatgccgattttgccgacttttaatcatagagggatgctggattttgtcagatgtttttcctgtatttttggggtccgtttgcatgaaatgcctttttttgccccttactttaagtttatgtgggtccttaggggttacgtgagtctcctgaaggcagcagagagttggttgctgagttcttatccattctgcagttctgtatcttttaagtatagcatttaggccatttacattcaatgttactattgagatgtgaggtaccattccattcat

SEQ ID NO: 122638 - DNA, 630 bp, Homo sapiens
ctattgaaaaagtggttgagttcttggtttgattctctgcatggtcgctgttggtacacaagctactactgacttgtgtatcttagtcttgtatctggaaactttgctgaattcttttatcagttctaggagctttctggagtctttagggttttcaaggtaaatggtcctatcatcagcaaacagtgacagtatgacttcctctttacctatttggatgccctttatttctttctcttgtctgattgctctggctaggacttccagtactatgttgaagaggagtggtaagagtgtgcattcttgtctctttccatttcttagatggcatggtttcagcttttccccattcagtgttatgttggctgtgggtttgtcataaatgacttttattatattgaggtaggtaccttgtatgtcgattttgctgagagttttaatcataaagggatgctggattttgtcaaatgctttttctgcatctgacacttggtagaaatctttaggatgaacttgaaaatgatagagcagaacaggtatcctctctagggagctcatcgggtactttttcaatacaaccacaagctgaaagccttcctccttatacaaataactaggagtataagccat

SEQ ID NO: 122639 - DNA, 900 bp, Homo sapiens; identical to SEQ ID NO: 118625

SEQ ID NO: 122640 - DNA, 471 bp, Homo sapiens
atgcctgattgcaattaccaacataatatcactgaatgtggacttgagaaaaagatacccatatggagttatgtgaacatacagattaggcaggtgaccatacagattagaaacttggaagagcagattcttcggaagacaccaactggggagtcctcagcttggacatggatgaagcctgaaaccatcattctcagcaaactaacacaggaacagaaaaccaaaccacattctctcactcgtaagtgggagtccaacaatgagaacacatggaaacagggaggggaacaccacaaaccagggcctgttggcagcatagtactgaaagtcctagccagagcaatcagacaagagaaagaaagaaagggcactcgaatcggtaaagaggaagtcaaactggtgctgtttgctgatggtatgactgtatacctagaaaacactaaagactcatccaaaaagcttctagaactg

SEQ ID NO: 122641 - DNA, 516 bp, Homo sapiens
gatacagcaaaagtggtgctaagaggaaaggtcatagcattaaatgcctacatcaaaaagtctgaaagagcacaaatagacaatacacagaaaaagcatttgacaaaattgagcatccctttgattaaaaccctcagcaaaatcggcatagaagggacataccttaaggtaataaaagccatctatgataaatccagagccaacattacactgaatggggaaaagttgaaagcattccccctgagaactagaacaagacaaggatgcccatttattcgatgcagtactggaagtcctggccagagcaatcagacaagagaaagaaataaagggcaccaaatcagtaaagaggaagtcaaactgtcactgtttgctgatgggattatcatatacctagaaaaccctaaagactcatccaaaaagctcctagaactggcctacaagaggaagacagaagcagcaaagaaggaatatctgaaggccctggcagcctaccgggctagcctcgtctccaag

SEQ ID NO: 122642 - DNA, 493 bp, Homo sapiens
caaaatctggcatccctttacgattaaaactcttagcaaagtcggcatacaaggaacatacctcaatataataaaagccatctacgacaaacccacaaccagcataataatgaatgaggaaaagttgcaagcattccctctgagaactggaacaagacaaggatgcccaatctcaccacccctcttcagcatagtactggaagtcctagccagagcaatcagacaagagaaagaaataaagggcatccaaatcagtaaagagaaagtcaaactgtccctgtttgctgttgatatcatttaccttgaaaaccccaaagacgactccagaaagctcctagaactgatagaagaatttggcaaagtttctggatacaatattaaggtatagaaatcagtagctcttctatacttcaacagtgaccaagcagagaatcaaatcaagaattcaaccccttttacaatagctgcaaacaaacaaacaaacaaaaaaaaa

SEQ ID NO: 122643 - DNA, 1249 bp, Homo sapiens
atgggctatttcatatggaaaaagagtaactcaacggacaaagtcaagatagcttgggcactgctgctaggaagcaagaggttccaatcaaaggctacccaaatgggaaggaaccagaaaaccaaccctggtaatatgacaaaacaaggcttgtcaacatcccccaaaaatcacacgagttcaccaacaatggatccaaaccaagaagaaatcctcgatttacctgaaaaaagaattcaggaggttagttattaagctaatcagggaggcaccagaggaaggcaaagcccaatgcaaggaagtccaaaaactgatacaaaaagtgcaaggagaaattatcgacgaaatagataccataaataagaaacaaccaaaacttcaggaaacaatggacacacttacaaaaatgcaaaatgctcaggaaagtctcagcaatagaattgaacaagaagaagagcattctaaaagcttggaaaatatatttgggagtataatggaggaaaacttccccagccttgctagagacttagacagccaaatacaagaagcacaaagaacacctgggaaattcatcacaaaaagatcatcccctagacacattgtcatcaggttatccaaagttaagacaaaggaaagaatcttaagagttgtgagacagaagcgcaagcatagtactgaagtcctagccagagcaatcagacaagagaaggaaataaagggcacccaaatcgataaagaggaagtcaaaaaaataaagggcagatacttcctgtcaataaacagatcttttccaagtttacttcttaaatctttacaactgtgcccatataaggctaaggtgtttagcctctggggacgagtatcattatggataatgccaagtactgaaaggaacgcatttaatcagacaaagaggtcctccatgcatcactgctgtcagagagattccagctcctctccaatgctcatcaaagatatgagagagatgaatgcatataacagaaggagtgtggataacagatacctaagagagaatgagaattggaaaagaccgactgaacagacaagggagctaaatacaggaagaaattatacttatgctgatgatacttcagctgtcaatagtattcattctaagtcctcattaataaagacagacaatgaagattctacaatatataaggaaaccaatggatgcaatgtaaatatccagttaaaagaacagaagaatgaacccttgaagaagtag

SEQ ID NO: 122644 - DNA, 1078 bp, Homo sapiens
ttattttatttttattttttgttttgcagctattgtaaaagggtttgtgttcttgattcgattctctgcttggctgctgttggtgtagagaagagctattgatctgtgtacattaatcttgtatctagaaactttgctgacttcttttgtgagttctaggagctttctggtggaaactttgaggttttcaaggtaaacgatcatattgtcagcaaacagagacagtttgacttcctctttactgatttggatgccctttctttctttctcttgtctgattgctctggctaggacttctagtactatgctgaatagaattggtgaaagtgtgcatcccccttgtcttgttccggttcttggaggggatgctttcgacttttccccattcagtataatgttggcttgtgggtttgtcatagatggtttttactaccttaaggtatgtcccttctgtgccaattttgctaagatttttaattataaagggatgctggattttgtcacatgcttttaatacatctactgagatgatcatgtgattcttgtttttaattctgtttatgtggtgtatcacatttattgactttatgtatgttaaaccttctctgcatccctggtatgaaacccacttgatcgtggtggattatctttttgatacgctgttggatttggttagctagtattttgttgaggatttttgcatctatgttcatcagggatattggcctgtagttttcttttttagttgttatgttctttcctggttttggtattagggtgatgctggcttcatagaatgaattagggagggttccttctttctctgtcttgtataatagtgtcaaaaggataggtaccaattcttctttgaatgtctggtaaaattctgctgtgaatccatctggtcctggattttttttgttggtaattttttaagggagaggatggtctccctttcccacttccacagttggggcactcacagtgtttggggtgtctcctgggtcctgcaggagcagtccgcttccttcagagcgtctgtgggtcatctcgggattgctggtttgttattgcagtt

SEQ ID NO: 122645 - DNA, 633 bp, Homo sapiens; identical to SEQ ID NO: 66979

SEQ ID NO: 122646 - DNA, 2936 bp, Homo sapiens
tgtcagcgtgctggaattcctctattttgctggtgtgaaaccatgtagatagatggtgggaactcaaacccttaccatggcaatttagttaacctcagcttcttcatggtaaaatggtaaagtgtgatgaggagggaaggttaaatggataataagaaaaccacctggcaaactatttttaattatgatggaagatttgtttgaactgttttaactttatgcccactcaatatttttgatatttatgtataaatcctactttctgaacatttcttaaaaaacaatctctgttcttaaggaagttccaaaatattgttatttaatcaaaatgaagatgataaaattaactttgagttatttttcttttttgttgcttcagctttagttctggtccagaaagcattttcaaggagctggtcaagcatggctttagcagataagagacttgagaacttacagatctacaaagttcttcaatgtgtgcggaacaaagacaagaagcagatagagaagctgaccaagcttggataccctgaactaatcaattatacagaacccattaatggacttagtgctttgcacttagcctcagtttccaatgatattgatatggtcagctttctccttgaccttggtgctcaccctgatgtgcaagaccgaatgggctgtactcccacaatgagggctgcagaactgggccatgaattgtcaatggaaatattagcaaaggcaaaggctgatatgactatagttgataatgaaggaaaagttttagaggggaccgggggacttaccagtagccctttggcacacatagctgtagcccttcacattccaagaagggacactcagggtgttttgttttactgcattttaccgactaagcggcattatcgctgtgctctgatcgcccttgaacatggtgcagatgtcaacaattctacctatgaaggaaagccaatattccttagagcttgtgaagatgcacatgatgttaaagatgtgtgcctgacatttttggaaaaaggagccaatcctaatgcaatcaactcaatattgaagcttctttttgcctacaatggagacgtggggctgatttcgataaatgggaacacaccacttcattatgctgccatgggtggttttgcagactgctgtaaatatatagctcagcgaggatgtgacctgaaatggaagaatttagatcataaaacgcccagggctgtggctaaggaaggcggcttcaaagcagcaagcaaagaaatacgccgagcagagagaatcgctaataaactagccaggccaggagccaaaaatcccaaatcccactgtgggcccttagactgcacgattggtccgtagaacgtgaggctttcctccgggaagcctttgcggttttagacaggggtgatggaagcatcagcaagaacgacttcgtgatggtgttggaggaaaggcaggattatgcaagctcagaacagctggctgccattcgctcaccttcatgagaaaacccggggaggaggggtcaatattaattgaattcttttaaaggaaccagatattttaaacaagtcttttgtcttaggatcgtatggacctaagaaaaaggaaaaagggatgggcaaaaaaggaaagaaagggaaatttgtcttaccccttccaatctgtgtcattcctgagtacgcgtttccacgccggcaggatggtgggccaccgtattacatgattgagacctacaagaatgtcactgatagcagccggtttaatagagatcatcccccagaacatcccattcaggatgactctgtttggtacattgatgattcagagaaggtattttcaaacattaatattatcaccaaagcaggggatctggcttctctgaaaaaggcctttgaatcaggaatacctgtggatatgaaggataattattacaaaactccgctaatgacggcgtgtgcaagtggaaacatagatgtggtcaagtttcttcttgaaaaagggtacgcgtctccgtcgggccaacaagacattgttgagcttcttgttgaatctggagctttaatagatgcagcttcaatcaacaactcaactcctttaaatagagccattgaaagctgcagactggatacagtaaaatacctacttgatattggtgctaaattccagctggaaaatagaaaagggcatagtgccatggacgttgcaaaggcatatgctgattatagaataattgatctgattaaagaaaagctagataacttgccgaaaccagcagaaaatcaaaaactaaaaggcaagacacctcctatactgaagactgaaggccctgaaattaagaaagaagaggaactgctgtcatcaatttatggtgtaccaaccacatcagagggaaagaaagtacagaagggtaatgtggttcatctgaattcattgattaccagtggttatactaagaaagtggatatcacatttattccacggaggatttggagtcctgaagccacaacagcagagctgatcaggaagagggaactacggcgagagaggtttacacatgaggtggacttcgacgattttatgatgccttttcagaagaacatcacagagaaagctcgagcactggaagctgccttgaagacctaagtcatagcagttatttcttggggtaaatgctttgaggcccagggaccaatctttggagaaagtagatatttccatcaaagccaaagcaatccatacaccaagaacttgttaccaagaatttctttttgctttaacaactataaatattcttagctgtctagagaaaagatgtatgttattttgaaatgaatggtatgtcattctggataaatccccaagcccctttatgaatgtagtaacacacccggcatgtgggttataaacgttacatagtcaaaagatttaaa

SEQ ID NO: 122647 - DNA, 838 bp, Homo sapiens
ggatggggcgcggctggacgcaggcagtcggtccccggtggtccggcggctcctcatgcactctgtacagcgtgggggcggatgggcgggggcaggggcatcagtctagaggctgcaggcctcctggtccaccgagcgcttcctcagctccttgcctggcttggggggcggcggggcgggcgcggcgggaggggcttcggcaaaatgcagaacggagttctcccctgactgcacccgcaggtaggccttgaccttgtggtgccgggccttgccgtcgctgaagtcgatgacggcgcactcgtagggtgccttcgtccgtgggcttcacccgggacaggcgcagcttgtgggagatgttgctgcccaccaccttgaccacatagcctaatccatggcactttacagtttccaaagcgttttcatatatgccttcaacaacagctaactggttcgaggcccacgcctgcttgtcggtccagtcccggtggctccgtacataccaccactggatctccagcgagtaggagggggagccgctgccgcggaaggagcaggccatctccacgtcctcgcccgtccgtgctgtcatgtcatggggtgtctctgtgaacagggccctctttgcccggctggctccttcagatctggcaaagatcagctcaaatgtcaccccccgaaaggtcctccttgaggatcccgagaaggtcccccacctcctgccctgccctgttgcctgcggcagctccaggaggacagggacacagagctcctgccgctggcagttgcgggcgcagagcagctgctcggcggatggaatgggtacggaattctccaccat

SEQ ID NO: 122648 - DNA, 2700 bp, Homo sapiens
atgcttggtaagagcttggatctgttggatgacagtttggctgaaacaggaagcaaggagagcatccctcaaactgaggtaatagcaataagaggcagaagacaaacttttcagggacttaagagctgtgataaagagtttggggtttatgctgagtgtgatagggaaccagcaaatgtttttcatcgggcaagtggcaaggagggaaagactggcggaaagagaaatacacaaacctcagaagggagcagacaattcacacatttctacagtttaaccttcagtgccagtaagtgtcaggtagtagagcttcagagagaaacagaagtggctggttatgaaaaccggcagcacagctttttccctccctgtggtgtcttcccagataagaaagcaggcctgaatcccgggtgctgttcttccagaccacatgaaaggttggactggctaatagaaagaccaaaaggtggcaggagagcagagttgagcattcgttccctggctctccccctgcctcagcactgtggctctgacaatgactggatccctctacaacttcgactcttatctagagcctccttccacagtggacctaagctaacagagcatttccagttgccatggcagaaggaaaatggggcaaaggcaaataattcaatagctctcacagcttttactggagaaagtgatgaaatgccctcttactccacagcagggagctcatgccaaaatatttgctggatggcactaatgaccaccaccacaacagactgcgtaggagaaaacactgagaaattgaaatgggagaattccctgacaccccttgctgaacctctggaggctaacaagtccaagatcaaggcaccagaaaatctggtatctgtcctgagaaggagtacgcttcagccatattttaatgaacaagtgctaaatttctttgctcagataatttcttcaagctgtgtcatttggaaggaaaataaaacagcatgggacacagcaaaaagtggaaatcgaccctcaggcttcccagatagtatcaaggaaactgaaactcaccagatcggtagcctgctatggtctgaatgtttgtgtaaaccccagattcatacatcgaatcctaatcctcaatgtggtggtattggaagagagagaaaggaaatgtccttgggttccaaatgtggaaagttgtgcagagactctcaaggagaaagaagttttccgctttccaaagctgcatttgtcactcgctgttgtatcgtaactgaaagtaatgaactttccgatgctactgtccagaaggaactggcagggtgggatcgggcactcatccagttgcaggtgcgagcactattgagtagcacagggtctcaagctgtggccatggacttgggcaacaggaaattagaaatatcctctggaaagctggccagatttgcaaatggctctgctgtaatacagtcaggtgacactgcggtaatggccacagccgtcagtaaaacaaaaccttccccttcccagtttatgcctttggtggttgactacagacaaaaggctgctgcagtaggaatgactgatggagaatgtgttgttaacccaacaagaaaagaaatgtcttctagtactttaaatgtagtggttgctggagcacctaaaagtcagactgtcatgttggaagcctctgcagagaacattttacagcaggacttttgccacgctatcaaagtgggagtgaaatatacccagcaaataattcagggcatccagcagctggtaaaagaaattggtgttaccaagaggacacctcagaagttatttaccccttcacaagagattgtgaaacatgctcataaactcactatggagagactctatgcagtttttacagattatgaacatgataaaatttccagagatgaagctgttaacaaaataagattagatacagaggaacaactaaaagaaatatttccagaggtcgatctatatgagataatagaatccttcaatactgttgcaaaggaagtttttagaagtattattttgaatgaatacaaaagatgcgatggtcgggatttgactttacttcggaatataagttgtgaggtagatatgtttaaaacccttcatggatcagaattatttcaaagaggacaaacacagctgctttgtgctgttacatttgattcattagaatccagtattaagttggatcgagttataacaactataaatgggataaaagataaaaatttcatgctgcactatgagtttcctccttatgcaactaatgaaattgtcaaagtcaccggtataaatagaagagaacttgggcctggtgctcttgctgagaaagctttgtatcctgttattcccaaagattttccttttgccataagagttacatctgaagtcctagagtcaaatgggtcatcttctatggcatctgcatgtggtgtagcaatgggattggccaccaaaaccgatcttgagaagggtgaaatagaagattatcatttgctaacagatattctgggaattgaagcttacaatggtgacatggacttcaaaatagctggcactaataaaggaataactgcattacaggcagatattaaattacctggaataacaatgaaaattgtaatggaggctattcaacaagcttcagtggcaaaaaggagattttacagatcatga

SEQ ID NO: 122649 - DNA, 2397 bp, Homo sapiens
  misc_feature (1)...(2397): n = a,t,c or g
tttcctccttatgcaactaatgaaattggcaaagtcactggtttaaatagaagagaacttgggcatggtgctcttgctgagaaagctttgtatcctgttattccccgagattttcctttcaccataagagttacatctgaagtcctagagtcaaatggtatgaggaggataggtcagccccccgccagcagccgccccgtccggagggtgagggcgcctctcccgccgcccctactggaagtgagagcccctctgcccgccagccgcccgtctggagaggtgctttgtaccgttacatttgattcattagaatctggtattaagtcagatcaagttataacagctataaatgggataaaagataaaaatttcatgctgcactacgagtttcctccttatgcaactaatgaaattggcaaagtcactggtttaaatagaagagaacttgggcatggtgctcttgctgagaaagctttgtatcctgttattcccagagattttcctttcaccataagagttacatctgaagtcctagagtcaaatgggtcatcttctatggcatctgcatgttggcggaagtttagcattaatggattcaggggttccaatttcatctgctgttgcaggccgtacaaattaggattggtcaccaaaacccgatcctgagaagggtgaaattagaaagattatcgtttgctgacagatatttttgggaattgaagattacaatggtgacatggacttcaaaatagctggcactaataaaggaataactgcattacaggctgatattaaattacctggaataccaataaaaattgtgatggaggctattcaacaagcttcagtggcaaaaaaggagatattacagatcatgaacaaaactatttcaaaacctcgagcatctagaaaagaaaatggacctgttgtagaaactgttcaggttccattatcaaaacgagcaaaatttgttggacctggtggctataacttaaaaaaacttcaggctgaaacaggtgtaactattagtcaggtggatgaagaaaccgttttctgtaatttgcaccaacacccagtgctaatgcttgagggcaagagactttcatttactgaaatctgcaaggatgatcaggagcaggcaattaggaatttgggagcagttatattacccgcccacaataactggaaatcagagatactgggtgtaatgggtaaaattatatcccaaatatggactggnggtactgcttcataacacacaacttgatcaacgaaagattaaacatcctactgccctaggattagaagttggcccaagaaattcaggtgaaatactttggacgtgaccccagccgatggaagaatgaggctttctcggaaaagtgcttcagtcgccagctacaaccgtggtcagaactttgaatgacagaagtagtattgtaatgggagaacctatttcacagtcatcatctaattctcagtgatttttttttttttaaagagaattcctagaattcctattttgtcctagggtgatgtgctgtagagcaacattttagtagtatcttccattggtggtaggatttctatataatataaatacattttaattatttgtactaaaatgctcatttacatgtgccatttttttaattcgggtaacccatatttgtttaattgtatttacattataaatcaagaaatatttattattaaaagtaagtcatttatacatcttagaaaaaattacatagttttgtttttacaattctgaaatatatgaaaaacttagatagaatatgtcatatgttattataacagatctcttcctacatcttatttttcttctttgtatacagtagtgacagtttaccttcagtcatcctacaggtcacctctgtgcccaacaactttacttgcctacaacggttcacaaactggaacaggccatattcaaagccagtgcctatttcttcagaactgttaacagatatagtgagttgagggagctaatctgatacacttttgataatataatgcctttcaaattagttaccaaatcataaacagagtggaataaatataaattagattctaactaggatgaatgtggtagtaatgatgtatatttttcaaatttacctaaacagaaagattattggctaaggcaggcggatcatgagatcaggagatcgagaccatcctggctaacacggtgaaaccccgtctctactaaaagtgcaaaaattagccgggcgtggtggcgcatgcctgtaatcctagctactcaggaggctgaggcagaagaatcacttcaacccaggaggtggaggttgtagtgagccgagattgcgccattgcactccagctcaggcaacaagagcaaaactccgtctc

SEQ ID NO: 122650 - DNA, 343 bp, Homo sapiens
  misc_feature (1)...(343): n = a,t,c or g
gtttaaataaatatgttagatacacgtgtatacatacacccatataactgaaatttagtagaagagggaaaaggagttaatgtaacaaattattttagctacaaaccccggtaatagagcacttgggggatgggatggggtgggttggtgagacaatcagaatggtaaattgattaaatgctcctaaccctgtaattttgtgcatagagcaccctatgctgtggaaataactgttcttagatttcattgtaactggactgttcaggttgcccagagggaaagaacattcctaattctaataaaataaacttttattttgttnnnnnnnnnnnnnnnnnnnnnn

SEQ ID NO: 122651 - DNA, 791 bp, Homo sapiens
  misc_feature (1)...(791): n = a,t,c or g
catgagtgtggcacgacactggcagggacaccaactgccttcttaagnactgcacctcaacccaggacatgttgtgctgctgcatctcctccattttctgtttcacctgagcatatagtttgtgctcaaagcgcaggctctgcatgtggttcatatagcgattacagtagaaccaggtacctctgcagggctgccctagatcgctgtcccattaagaaaaattgggtgatataattataacacataaactgtacataaaagctgattatcaaattaaaaccataatgaagtctcacttcacacctgttagaatggtttttatcaaaaagatgaaagataagtcttggcaaagataaagaaagaaggagactcttgatacactgttgatgggaatgtaaattagtatagccattatggaaaatggtatggggaggttccttaaaaaactgaaaacaaaaccaccacagaatccagcaatcccactactgtgtatatatgaaaaggaattgaaatcagtatgtcaaaggtatctctgtactctcacattcactacagcattattcacaatagccaagacatggaatccatgtaaagtgtccatcaatggatgaacacagaaagaaaacgtcatgtatgtacacacacacacgagtactcagcctcaaaaaaggaattctgttgtgacaacatggatgaacctggaggacattacactaagtgaaataagccaggcacagaaaagaaatactacatgatctcgcttatatgtagaaactaaaaaagttgaactc

SEQ ID NO: 122652 - DNA, 504 bp, Homo sapiens
atgttgttaaagtccaatatcctgatgctaaacctgttcgctgcaaatgtgggcgccaattttgctttaactgtggagaaaattggcatgatcctgttaaatgtaagaatctgccacgctgtcttccattttgtggctgtaccattttgcgttcccacgagaaatgatgagagttcctaccgctccacatcctggtccacatttggtagtcagtattttgattttggccattctaataggtactttgatggaaacctggagaagctctttgctgagtgtcatgtaattaatccaagtaaaaagtctcgaacacgccagatgaatacaaggtcatcagcacaggatatgccttgtcagatctgctacttgaactaccctaactcgaataagatatgtgaagtaggtaaaggcagagttgaaattgtgaggaagggtggtccaccatcccgtcccccattcctgaagcccctctgtggaatcttggtgctgctggaaactgcttga

SEQ ID NO: 122653 - DNA, 5122 bp, Homo sapiens
  misc_feature (1)...(5122): n = a,t,c or g
atggactcggacgagggctacaactacgagttcgacgaggacgaggagtgcagtgaggaggacagcggcgccgaggaggaggaggacgaagacgacgacgagccggacgatgataccctggatctgggcgaggtggagctggtggagcccgggctgggcgtcggcggggagcgggacggactgctgtgcggggagacgggcggtggcggcggcagcgctctggggcccggcggtggcggcggcggcggcggcggcggtggtggtggcgggccggggcatgagcaggaggaggattaccgctacgaggtgctcacgtccgagtatgattctacaacacatggtggaatgtatccgggaggtcaacgaggtcatccagaatccagcaactatcacaagaatactccttagccacttcaattgggataaagagaagctaatggaaaggtactttgatggaaacctggagaagctctttgctgagtgtcatgtaattaatccaagtaaaaagtctcgaacacgccagatggaatacaaggtcatcagcacaggatatgccttgtcagatctgctacttgaactaccctaactcgtatttcactggccttgaatgtggacataagttttgtatgcagtgctggagtgaatatttaactaccaaaataatggaagaaggcatgggtcagactatttcgtgtcctgctcatggttgtgatatcttagtggatgacaacacagttatgcgcctgatcacagattcaaaagttaaattaaagtatcagcatttaataacaaatagctttgtagagtgcaatcgactgttaaagtggtgtcctgccccagattgccaccatgttgttaaagtccaatatcctgatgctaaacctgttcgctgcaaatgtgggcgccaattttgctttaactgtggagaaaattggcatgatcctgttccaatgtaagtggttaaagaaatgtattaaaaagtgtgatgatgacagtgaaacctccaattggattgcagccaacacaaaggaatgtcccaaatgccatgtcacaattgagaaggatggtggttgtaatcacatggtctgtcgtaaccagaattgtaaagcagagttttgctgggtgtgtcttggcccatgggaaccacatggaatctgcttgggacactgtacccgtataaaatgaggatgatgcaaaggcagcaagagatgcacaggagcgatctagggcagccctgcagagttacctgtttctactgtgaatcgctatatgaaccacatgcagagcctgcgcttttgagcacagactatatgctcaggctgacacagacaatggaggagatgcagcagcacaacatgtcctggattgaggtgcagttcctgaagaaggcagttgatgtcctctgccagtgtcgtgccacactcatgtacacttatgtcttccgctttctaccctcaaaaagaataaacccagtttccatatctttgagaataacccaaaggccagatttaangaaaatgccacagaggggctctcggggctaccttggaacgagaaaatttcccaaagattcctctgcaggatataaagcagaaagtaccaagaccaagtacaagatactgtgagagtcgacggaagggttttgttacaagcatgtgccatgaaggctatgaaaaagatctgtgggagtacattgaggactgagaaatggcccctgcattaaaatgaactctgaaaacttttaccatcctagaagtgctcatgcaattaaaacaaacaaaacaaagcaaacacaaacaaggagggcactaaggcctattctgacaccactgggtctggtagtaccagaattgttttgttaatgggaaagtttaagtaaattatattggtaataaaaagggtagataaacccattgtacaccagtattctaggccgccaaccaaaagtgtgacagaccacactaaaagccctccaactttaacttgtaacgtagcttcattctcaaagctgactcctttttttttcttttttcctttttcctgagtgtagtacagttaaaatttcaaaccagctcccttgacaactgcttttccatgttcaaaacccagcccattttggttggtacctttgggtaaaagggaccctccttccccccttccctcccccctacaccataccagatacacccccacacacagacctgacctcctcctttcctcctcatacccccaaggtcatgagtgaatgatgccttagttcccttgtaaagaaaatccttgggatggggaaaggggtaggcagcaagaggattcaacaaacgaaaaacataaaaactttgtatatgacttttaaaacaagaggacaacacagtatttttcaaaattgtatatagcgcatatgcatggacaaagcaagcgtggcacgtgtttgcataatgtttaattacaaaaaaatatttattctttaaaaatcttcaagattatgtctatttgctgtgcattttctttcagtttgcttatctttcccgggttggggttgggataaaggtgtgtcggtttagcacctctggaagacctatctagagctctttcactttcctgaggttattttgccctttctggtgttggtatgtctgttgccggccatgggcttcatgccttgaattcctgctcttgatcaggggacagggaggtcaagctctggactaatgccatgacctggatttaagggggtacagcagggagttttgtttgctacagcttcatggaatttaacctggtcccaacctaaatccccctccatgggcatccaggcctctacccaagcctttgtgtggcccatggttatggcacacagctgtaggcattcttaagtcccctgtcgcatccagtggaagcattttaaaatttcttttactttttggttttcccttaattgctgcttttcagattttagttatggctcgtctgctcaccccttctctacattagggtgtcaaagagaatgttttgctttaaatataaatagccattcatttagtctcagattgtgaatttaaaatggtggataccgaaattgcttgtgtgtgttgctgtgggtttggtttgaaggcaaacacccctagaacatgatattcccatctagtgcatttaaatagaaatcactgagtttgctgcttttttattgtcagcagataggagaattaataatgcattttagctgtgatgtccatttttatgaaattcctactaagagctatgttaaaagtaaaggatggtggtggttgtattaactatatacctgtttaggccattctggctgtggtatttttcaataggtcagcatctgtaaatcatgtcagttttatacaggagtgcagagtgaactaggcaactagattaagaggtctaaatatgaaataccagttgaggctgaggacctcttcgtcttcctttaaatgtcttttgcctagggagtgtttaccatttgtgaggcagctttgtctgctcgttacactgtacatcctattactccattgggaagtaggttcactttcctctggccttttgcctaagttagggctttgctgaatcaaccctacttttccttttagaaaaggttgttacagggagatttactgggcaactgttccttttccccatcaaaaatcaagtgaatgtttggctgagtataaatgcctgcttcccttaaacgcactgtgtcgctttagggggtccaactttaacctgtaccttttctcctttcctcccttgcccacctcaggtgccaaatctgaactcagtgtctgcttcttccattttccccgtctctctccccctcttcccccattatcccatatgacattattttacttcaaatgacagcatcaatcttaaaaagatatacattaaaactaaggagttttttttaaagaaagcgtgaataagttcctttccctggtaactttgaaaagcagtcagagttgctatatagatatatgtggctcctttaaaatgctttgtgtatgtgtggtgtttaaaaaaaaaaaaatcttaccagttaactttgcagtgtctaggtttgagtgtcataaatccacgtgttcctgttgcaacaaatacccaaaaattgtgtgtgcacttcctaataccagtcttcacccatggaggaacagtgctttttagagatgctttctatttcaatgttggcatactgcctgaggggtattgcagtttgtgggtgcattccctaatttgtatgatcaagatgaactggcccttttctacttccaagcttttaacagataccaccatatttgacagaattcccagagtgaattgcttgtgttattagtagattcagtgcccccagcatgggataggcaagccatgacagcttccctgtttcacctacagaagtcttatctgagggatctattcacagtaagcaccaaggtctccatgtcttgaggtcagtttcattgtcttttgaaaagtgcatgcttcatttgaacaattcattcagcagcagatggactttcagtgatttaaaaataaaattttgatccaaagctcagggacacaaaccacagtgggtaaaattgagtagcctattatattcagacttaaattatctgtaattttccacaacccagattgtatgtgttttatgtgtgttttaaataaatatggttagatacacggtgtatacatacacccatatacaacagatccaagactggctggacttcatttgaaatggttgaatctgctgtgtaataaagtggttccaccccatgattaggaactgaaatttcagtagaagagggaaaaggagttaatgtacacaaattattttagcctacaaaccccggtaatagaagcactttgggggatgggatggggtcggttggtgagacaatcagaatggtaaactcgattaaatgctcctaaccctgtaattttgtgcatagagcaccctatgctgtggaaataactgttcttagatttcattgtaactggactgttcaggttgcccagagggaaagaacattcctaattctaatacacataaacttttattttgttattccattaaaaaaaaaaaaaaagggcggccgct

SEQ ID NO: 122654 - DNA, 376 bp, Homo sapiens
  misc_feature (1)...(376): n = a,t,c or g
cccacgcgtccgaaagaatnnnnnnnnnnnnnnnnnnnnnnnnnnnnnnnnnnnnnnnnnnacattctaaatactagagataactttacttaaattcttcattttagcagtgatgatatgcataagtgctgtaaggcttgtaactggggaaatattccacctgataatagcccagattctactgtattcccaaaaggcaatattaaggtagatagatgattagtagtatattgttacacactattttggaattagagaacatacagaaggaatttaggggcttaaacattacgactgaatgcactttagtataaagggcacagtttgtatatttttaaatgaataccaatttaattttttagtatttacctgttan

SEQ ID NO: 122655 - DNA, 408 bp, Homo sapiens
  misc_feature (1)...(408): n = a,t,c or g
aatacatggcttgggatggacaggctgttgaacctcactcttaacctgggagtcacgggagtcatcttcggcaggggtggaacggactgccaggctattctcatttgcagaaatcttttccccttcctgatgggtgatgcagacctcaggacctgggggcacattctccttttgctccattttatgaattttgatttcgccaccactggctttcagctcattcatacatatataaatnnnnnnnnnnnnnnnnnnnnnnnnnnnnnnnnnnnnnnnnnnnnnnnnnnnnnnnnnnnnnnnnnnnnnnnnnnnnnnnnnnnnnnnnnnnnnnnnnnnnnnnnnnnnnnnnnnnnnnnnnnnnnnnnnnngtatagttggttgagctgctttgtttggacacagctgcct

SEQ ID NO: 122656 - DNA, 996 bp, Homo sapiens
atggggagaacatatgcagccagcaaggtgaagacaatagatgggggagttttccagaagtttcaggcacctgcaagagagacctgcgtggaatgtcagaagacagtctatccaatggagcgtctcttggccaaccagcaggtgtttcacatcagctgcttccgttgctcctattgcaacaacaaactcaggcatgtgaagtgcaatggtttttccagtgagggcacctgtgactttcagcgtattcgaagtgactgtggtgattggtctttgatgtgcagctctgtggccctcgacgagcttgagcgagacaccaactgtgttttgcgagccgtggatgtcatggccccgggctgctttttcccagacccgacgcctgcgccccgctccgcctgtgcgtcaggtgctgtcgcgtgcgcagggctcgatgctgtgatgtgcgctcgcactgcccgtggccgctcgggtggcagacaggcgagcgcgcccccgcggcggagggcggggaccggggcggggccgctggtgctgatggagaatgctgcaaggacgcgtctggagcgcatggatgtgcgccgggtccagagtctgggcaggatgctgcgctgtggtttggcggcaaaatgcctggattgggccaacacacacctcttccggtgtgagcgggttgtccccggcaacacacctctcccacaaacaccaacgtcaaaaggggcggggggtgagcttggtgagagtgacccacccccacgtgtattggggacgtgggtcgcagtaccaccgaacaaaccactcaacaggggccagcgcagggaggggggaaggtgcatcttggaagggcctgtgtctgcctgcatgttattgctggtggcatgcacgtgtgtgggccagaaggcattaaaagataaaaatgatgtgtcggggaaacacctcgaaggactggcaggacaagttcacccgtccactggagtaccgccctccacggccaccctgtga

SEQ ID NO: 122657 - DNA, 1302 bp, Homo sapiens
atggccccagctgagatcccagatgacagcatcaaccgcctgacttgtcccggcgctctacctagcgcacctgtcgcgaccaagctgctaacacctactgctcctgcggccccgccccggaccccgcccaccgccgcgggggcgcgcacgccagacagcctcccgtgcggcctcgggctgagcgtgcgcgccaccggctacgtgcccagcgctcgcgtctgctccagtcgctctggcggtgcggggcgctggcgacgggacagggtttttgctgcccggggcctagtctacctcggcacgcttttctctgaaggagacacgcacttgcacgacgacaggtgccggcagcgctctgtggtcattttcggcgaggaccgctttcgctggagcgcgacgatgatcggcctgtcgcttgcggtattcggaatcttgcacgccctcgctcaagccttcgtcactggtcccgccaccaaacgtttcggcgagaagcaggccattatcgccggcatggcggccgacgcgctgggctacgtcttgctggcgttcgcgacgcgaggctggatggccttccccattatgattcttctcgcttccggcggcatcgggatgcccgcgttgcaggccatgctgtccaggcagcctaacttcgatcattggaccgctgatcgtcacggcgatttatgccgcctcggcgagcacatggaacgggttggcatggattgtaggcgccgccctataccttgtctgcctccccgcgttgcgtcgcggtgcatggagccgggccacctcgacctgaatggaagccggcggcacctcgctaacggattcaccactccaagaattggagccaatcaattcttgcggagaactgtgaatgcgcaaaccaacccttggcagaacatatccatcgcgtccgccatctccagcagccgcacgcggcgcatctcgggcagcgttgggtcctggccacgggtgcgcatgatcgtgctcctgtcgttgaggacccggctaggctggcggggttgccttactgcgaacgtgaagcgactgctgctgcaaaacgtctgcgacctgagcaacaacatgaatggtcttcggtttccgtgtttcgtaaagtctggaaacgcggaagtcagcgccctgcaccattatgttccggatctgcatcgcaggatgctgctggctaccctgtggaacacctacatctgtattaacgaagcgctggcattgaccctgagtgatttttctctggtcccgccgcatccataccgccagttgtttaccctcacaacgttccagtaa

SEQ ID NO: 122658 - DNA, 2130 bp, Homo sapiens
atggacgatatcccgcaagaggcccggcagtaccggcataaccaagcctatgcctacagcatccagggtgacggtgccgaggatgacgatgagcgcattgttagatttcatacacgcgttatcaatcacaagaaacgtaaaaatagcccgcgaatcgtccagtcaaacgacctcactgaggcggcatatagtctctcccgggatcaaaaacgtatgctgtatctgttcgttgaccagatcagaaaatctgatggcaccctacaggaacatgacggtatctgcgagatccatgttgctaaatatgctgaaatattcggattgacctctgcggaagccagtaaggatatacggcaggcattgaagagtttcgcggggaaggaagtggttttttatcgccctgaagaggatgccggcgatgaaaaaggctatgaatcttttccttggtttatcaaacgtgcgcacagtccatccagagggctttacagtgtacatatcaacccatatctcattcccttctttatcgggttacagaaccggtttacgcagtttcggcttagtgaaacaaaagaaatcaccaatccgtatgccatgcgtttatacgaatccctgtgtcagtatcgtaagccggatggctcaggcatcgtctctctgaaaatcgactggatcatagagcgttaccagctgcctcaaagttaccagcgtatgcctgacttccgccgccgcttcctgcagcacatatttgttcttcgggagcgccctgaaaccgtgttaatagatctcattcagaggacaaaggatgcagtaagagagctggacaatctgcagtatcgaaagatgaagaaactccttttccaggaggcacataatggaccagcagtagaagcacaggaagaagaagaggaatatggctggaatctggaccgagcctatgactatgtgaaagaaagacgaacggtaaccaagcccaacccaagcttcatgagacaactggaagagtatcaggggatcttgctggcaagacccaagagaactgcttacatttatggctccgtgtatcggcgttgtggttatgcagaccacaaggtagaaataaaacaccctggctgggcatccatcagcaggggtgtgctggtgtgtgacgagtgctgcagcgtgcaccggagcctgggacgccacatctccattgtcaagcaccttcgccacagcgcctggcctcccacgctgctgcagtcaggcttccccggcccctcgcgcagagccgctccacgggcagcccggggccccaccccacgcactgaagaggccgcctgggctgccatggccctgaccttcctgctggtgctgctcaccctggccacgctctgcacacggctgcacagaaacttccgacgcggggagagcatctactgggggcccacagcggacagccaggacacagtggctggaagccctgatcatggtcttctggcttttgcctaccataggcttgtccggtttctcctctgggtcctctgccctggttgggccttcttcctagtgaactcttctaggggtggggtcttcaaccccatcctccacccctgcccccgccacggccaagccagatttgcaggggtggggagggctgaggatgtcaccttcctctaccacccctgtgcccatccctggctgaagctccagcttgccctcctggcctatgcttgtatggctaacccttccctcacccctgacttcagcctcacgcaggatcgggtggacatcgagcagctggatccccgcggccggactcccctgcacctggccaccacgctggggcaccttgagtgtgcccgtgtgctcctggcgcacggcgagacgtgggcacgggagaatcgcagcggctggacagtgctccaggaggctgtgagtacccaggacctggagctggtgcagctggtgcttcggtaccgggactaccagcgggtggtgaagcggctggcgagcattcccgtgctcctggagaagctgcgcaagcaaaggagctatctccctggtaggcccctggcacggctgcggaggtccgtgaactctagcggggctgtgggcatgattaagagtgagagtatggggcgctggtttgtgggcccataa

SEQ ID NO: 122659 - DNA, 737 bp, Homo sapiens
agaaaacaggagtggctttcaaagcagaaggagaatatacagcatttccaagcagaagaagaagctaaccttcttcgacgtcaaagacaatacctagagctggaatgccgtcgcttcaagagaagaatgttacttgggcgtcataacttagagcaggaccttgtcagggaggagttaaacaaaagacagactcagaaggacttagagcatgccatgctactccgacagcatgaatctatgcaagaactggagttccgccacctcaacacaattcagaagatgcgctgtgagttgatcagattacagcatcaaactgagctcactaaccagctggaatataataagcgaagagaacgagaactaagacgaaagcatgtcatggaagttcgacaacagcctaagggtttgaagtctaaagaacttccaaataaaaaaagcagttttcagggttacctgcaaaattcccaaaccagacagtacaaagcattaagaaatcacctgctggagactacaccaaagagtgagcacaaagctgttctgaaacggctcaaggaggaacagacccggaaattagctatcttggctgagcagtatgatcacagcattaatgaaatgctctccacacaagccgtgagtttgctttttttggggcaaaacaaatttagtgccccttttcttccaccacctgaatgaaatcacagcaattaaagtactagttggaaatgatagctctcctg

SEQ ID NO: 122660 - DNA, 2226 bp, Homo sapiens
tcactctctaacccgttcttttcttgaattgactatcttggggaatgcgacaaccatcttttcatctgtcaagtaggcctgttctcttatgccttcatgctgtgcgtgtgctgcttcctccatcttaatattgcagttgtcatcgagcagtatattttccagcttcaagtcccggtggaccacaccgttcttctttacctctccaatcactcctttctgctccttgggcctcttgcccttagtttgagttggttcacctttctcaaacatcatcttaagcctgttcagcggaacattatatttctctattttgcccgaagcatctgtgttttcactgatttctgatttttctacttcatgcctggattctcctagacaattttccatttttttactttctggtgagtggtctttaagatcctcaccgtccttgatgtggggatatcgacctgtatagttggttgagctgctttgtttggacacagctgcctggtacttggccattcgatcctttatagaggtttctgagaggcgtggaagttccagatttcgtctactctcatttttctccgagtcaaatgtagaagatgacaactgaccgccagagcgactggagcagacgcgagcgctgggcacgtagccggtggcgcgcacgctcagcccgaggccgcacgggaggctgtctggcgtgcccgccccgcggcggtgggcggggtccggggcggggccgcaggagcagtaggtgttagcagcttggtcgcgacaggtgcgctcttcttcttcctgtgcttctactgctggtccattatgtgcctcctggaaaaggagtttcttcatctttcgatactgcagattgtccagctctcttactgcatcctttgtcctctgaatgagatctattaacacggtttcagggcgctcccgaagaacaaatatgtgcttcaaactcttaggctgctgtcgaacttccatgacatgctttcgtcttagttctcgttctcttcgcttattatattccagctggttagtgagctcagtttgatgctgtaatctgatcaactcacagcgcatcttctgaattgtgttgaggtggcggaactccagttcttgcatagattcatgcttagcttcatacccattcaccatctccgtcttttcactgcgccagcccaggatgccagtcttgttcctctcaaaggagatattcttggtgtcaagctgagtggtgacgacgggcgcggtaagccggctcagcacctgttcctcagtgggctgagcagcagccagcagcagctcccggtcctgcccagccagtgccagagtctctgtgtacaccacccggcggtcgtggtcaatctccatgaccacggcgcttgtgtttcctgcctgcctgaccttggcccctgaagacaaagctgcggttccctcgctgccaggtcatgtggtcaaagcccaggagtgtggtgtctaccctcaggttctggccgctcttccacactttgtaggtgtcactagggcagatcttggacaccaggggcacccagctagtgaactcccatttcatctccacgtagaagtcctgggccttgcgcagcttctccaggagcacggggatgcccgccagccgcttcaccacccgctggtagtcccggtaccgaagcaccagctgcaccagctccaggtcccgggtactcacagcctcctggagcactgtccagccgctgcgattctccctgcccacgtctgcgccgtgcgccaggagcacacgggcacactccaaggtgccccagcgtggtggccaggtgcaggggagtccggccgcggggatccagctgctcgatgtccacctccctgacaaggtcctgctctaagttatgacgcccaagtaacattcttctcttgaagcgacggcattccagctctaggtattgtctttgacgtcgaagaaggttagcttcttcttctgcttggaaatgctgtatattctccttctgctttgaaagccactcctgtttttcttttttgggggtactctggttttcatttagctcctctttaagctgctcttttcgaagtttatactctcttttctgggactcgagaaaactattcagttctttcttctgttgggcctgaatatgttgctgaaattttttctcttcattggacatcactttagcctctttctccatagcagcctggtgtttcttgataagtttcacgaaa

SEQ ID NO: 122661 - DNA, 3465 bp, Homo sapiens
atgaacaccgaaaatctctcccagcactttagaaaggggaccctgactgtgttaaagaagaagtgggagaacccagggctgggagcagagtctcacacagactctctacggaacagcagcactgagattaggcacagagcagaccatcctcctgctgaagtgacaagccacgctgcttctggagccaaagctgaccaagaagaacaaatccaccccagatctagactcaggtcacctcctgaagccctcgttcagggtcgatatccccacatcaaggacggtgaggatcttaaagaccactcaacagaaagtaaaaaaatggaaaattgtctaggagaatccaggcatgaagtagaaaaatcagaaatcagtgaaaacacagatgcttcgggcaaaatagagaaatataatgttccgctgaacaggcttaagatgatgtttgagaaaggtgaaccaactcaaactaagattctccgggcccaaagccgaagtgcaagtggaaggaagatctctgaaaacagctattctctagatgacctggaaataggcccaggtcagttgtcatcttctacattttgactcggagaaaaatgagagtagacgaaatctggaacttccacgcctctcagaaacctctataaaggatcgaatggccaagtaccaggcagctgtgtccaaacaaagcagctcaaccaactatacaaatgagctgaatgccagcggtggcgaaatcaaaattcataaaccggagcaaaaggagaatgtgcccccaggtcctgaggtctgcatcacccattcaggaaggggaaaagatttctgcaaatgagaatagcctggcagtccgttccacccctgccgaagatgactccccaggtgactcccaggttaagagtgaggttcaacagcctgtccatcccaagccactaagtccagattccagagcctccagtctttctgaaagttctcctcccaaagcaatgaagaagtttcaggcacctgcaagagagacctgcgtggaatgtcagaagacagtctatccaatggagcgtctcttggccaaccagcaggtgtttcacatcagctgcttccgttgctcctattgcaacaacaaaactcagtctaggaacatatgcatctttacatggaagaatctattgtaagcctcacttcaatcaactctttaaatcttaagggcaaactatgatgaaggctttgggcacagaccacacaaggatcttattgggcaagcaaaaatgaaaacggaggagattttggagagaccagccccagcttgcaaatgcaagggagacccctcacagcccaggggtagaagatgcccctattgctaaggtgggtgtcctggctgcaagtatggaagccaaggcctcctctcagcaggagaaggaagacaagccagctgaaaccaagaagctgaggatcgcctggccaccccccactgaacttggaagttcaggaagtgccttggaggaagggatcaaaatgtcaaagcccaaatggcctcctgaagacgaaatcagcaagcccgaagttcctgaggatgtcgatctagatctgaagaagctaagacgatcttcttcactgaaggaaagaagccgcccattcactgtagcagcttcatttcaaagcacctctgtcaagagcccaaaaactgtgtccccaccttatcagaaaaggctggagcatgtcagagcagagtgaagagtctgtgggtggaagagttgcagaaaggaaacaagtggaaaatgccaaggcttctaagaagaatgggaatgtgggaaaaacaacctggcaaaacaaagaatctaaaggagagacagggaagagaagtaagggaaggtccatagtttggagatggagaatgagaatctttgtaggaaaatggtgccagactcccgattgaagatgataaccagcttcctccaaaacaacaatcttccaccaagaacccaagtcttcttgaatttggtccgagttttgtagacaaccaccttttgctgaaggaattcactactccagaatcagaaatcccaggatgtggaactctgggagggagaagtggtcaaagagctctctgtggaagaacagataaagagaaatcggtattatgatgaggatgaggatgaagagtgacaaattgcaatgatgctggggccttaaattcatgttagtgttagcgagccactgccctttgtcaaaatgtgatgcacataagcaggtatcccagcatgaaatgtaatttacttggaagtaactttggaaaagaattccttcttaaaatcaaaaacaaaacacaagaaacacaaaagcacacattctaaatactagagataactttacttaaattcttcattttagcagtgatgatatgcataagtgctgtaaggcttgtaactggggaaatattccaccctgataatagcccagattctactgtattcccaaaaggcaatattaaggtaggcaggatgattagttagtatattgttacacactattttggaattagagaacatacagaaggaatttaggggcttaaacattacgactggaatgcactttagtataaaggggcacagtttggtatatttttaaatggaataccaatttaattttttagtatttacctgttaagagattatttagtcttttaaattttttaggttaattttcttgctgtgatatatatgaggaatttactactttatgtcctgctctcttaaactacatcctggaactcgacgtcctggaggtataatacaacagaggcactttttgaggggcaattggaaaaacccaaccctacactccttcgggtggcttaggaggagatctggctggtcctccccaaaattaaggcttttggtatctggccaggtggaatttactgtaactccaaatgatttgctttcttttctggtggatatctgtgcttctcataattactggaaagctgcaatattttagtaataccttcgggatcactgtcccccatcttccgtgttagagcaaagtgaagagtttaaaggaggaagaagaaagaactgtcttacaccacttgagctcagacctctaaaccctgtatttcccttatgatgtcccctttttgagacactaatttttaaatacttactagctctgaaatatattgatttttatcacagtattctcagggtgaaattaaaccaactataggcctttttcttgggatgattttctagtcttaaggtttggggacattataaacttgagtacatttgttgtacacagttgatattccaaattgtatggatgggagggagaggtgtcttaagctgtaggcttttctttgtactgcatttatagagatttagctttaatattttttagagatgtaaaacattctgctttcttagtcttacctagtctgaaacatttttattcaataaagattttaattaaaatttg

SEQ ID NO: 122662 - DNA, 4482 bp, Homo sapiens
atgtgcttcagtccaaagaagttgtacaaacatgagattcacaagctgaaggacctgacttgtctgaagccttccatagagtctcctctgagacagaacaggagcaggagtattgaggaggagcaaaaacaagaagagaatggtgacagccagctcatcctggagaaaatccaacttccccagtggagcatctctttgaatatgactgatgagcacgggaacctggtgaacttggtgtgtgacatcaagaaaccaatggatgtgtacaaaattcacttgaaccaaacagatcctccagatattgacataaatgcaatggttgccttggactttgagtatccaatgacccaggaaaactatgaaaatctatggaaattgatagcatactacagtgaagttcccatgaagctacacagagagctcatgctcagcaaacaccccagagtcagctaccagtacaggcaagatgccgatgaagaagctctttactacacaggtgtgagagcccagattcttgcagaaccagaatggatcatgcagccatccatagatatccagctgaaccgacctcagagtacggccaagaaggtgctactttcctactacaaccagtattctcaaacaatagccaccaaagatacaaggcaggctcggggcagaagctgggtaatgattgagcctagtagagctgtgcaaaaagatcagactgtcctggaagggggtcgatgccagttgagctgcaatgtgaaagcttctgagagtccatctatcttctgggtgcttccagatggctccatcctgaaagtgcctgtggatgacccagacagcaagttctccattctcagcagtggctggctgaggatcaagtccatggagccatctgactcgggcttgtaccagtgcattgctcaagtgagggatgaaatggaccgcatggtatatagggtacttgtgcagtctccctccactcagccagccgagaaagacacagtgacaattggcaagaacccaggggagccagtgatgttgccttgcaatgctttagctatacccgaagcccaccttagctggattcttccaaacagaaggataattaatgatttggctaacacatcacatgtatacatgctgccaaatggaactctttccatcccaaagatgtgtggctgtcaaccagcatggggcagaccatatcacggtgggaatcacagtgaccaagaaaggttctggctcgccatccaaaagaggcagatggccaggtccaaaggctctttccagatgagagaagacatcgtggaggatgaaggggtctcaggcacgggagatgaagagaacacttcaaggagacttctacatccaaagcaccaagaggcgttcctcaaaacaaaggatgatgccatcaatggagataagaaagccaagaaagggagaagaaagctgaaactctggaagcattcagaaaaagaaccagagaccagtgttgcagaagatctcagagtgtttgaatcaagacgaaggataaacgtggcaaacaaacagattaatccggagcactgggctgatattttagccaaagtctttgggaaaaatctccctacaggcacagaagtatccccaattattaaaaccacaagttctccattcttgagcctagtagtcacaccacctttgcctgctgtttctccccccttggcatctccaatacagacagcaacaagtgctgaagaatcctcagcagatgtacctctactcagcgaaggaaagcacattttgagtaccatttcctcagccagcatgggactagaacaccacaacaatggagttattcttgttgaacctgaagtaacaagcacacctctggaagaagttgttgatgagtattccaagaagactgaggagatgacttccactgaaggcgacctgaaggggactgcagcctctacacttatatctgagccttatgaacaatctcctactctacacaccttagacacagtctatgaagagcccacccatgaagagacggaaacagagggttggtctgcagcagatgttggatcctcaccagatcccacatccagtgagtatgagcttccattggttgttgtctccttggctgagtctaagcctgtgcaatactttgacccagatttggagactaattcacaaccacatgaggataacataaaagaatacagttttgcacaccttactccaaccgccatcatctggtttaatgactctagtacatcactgtcatttgaggattctactgtaggggaacaaggtgtcccaggcaaatcacatctacaaggaccgacagagaacatccagcttgtgaaaagtagttttagcactcaagacaccttattgattaaaaaaggtatgaaagagatgtctcagacactacagggaggaaatatgctagagggagaccctacacactccagaagttctgagaatgagggccaagagagcaaatccatcactttacctgactccacactgggtataacgagcagtacgtctccagttaagaagcctgcggaaaccacagttgtcaccctgctacacaaagacaccacaacagaaacaactccaaggcaaaaagtggcttcatcatccaccatgagcactcacccttctcgaaggagacccaatgggagaaaattacaccctcacaaattccaccaccggcacaagcaaaccccacccacaacttttgctccattagagactttttctactcaaccaactcaagcaactgacattaagatttcaaatcaaatggagagttctctggttcctacatcttgggagattaacacagttaatacccccaaacagctggaaatggagaagaatgtagagctcatatcaaagggaactccacggagaaaacacgggaagaggccaaacaaacatcgatataccccttctacagtgagttcaagagcatctgcatccaagcccagcccttctccagaaaataaacatagaaacattgttactcccagttcagaaactacacttttgcctagaaatgtttctctgaaaactgagggcgtttatgattccttagattacacgacaaccaccagaaaaatacattcatctcaccataaagtccaagacacacttccagtcatgtataaacccacatcagatggaaaagaaattcaggatgatgttgccacaaatgttgacaaacataaaagtgacattttagtccctggtgagtcaattacaaatgtcacacaaacttctcgctccttggtctccactatgggagaatttaaggaagaatcctctcctgtgggctttccaggaattccaacctggaatccctcaaggaaagctcagcctgggaggctacagacagacatacatgttaccacttctggggaaacccctacagaccctccccttgttaacgagcttgaggatgtggattttacttctgagtttttgtcctctgtgacagtctccacaccatttcaccaggaagaagctggtttttccacaattctctcaagcataaaagtggagatggcttcaagtcaggtagaaactaccacccttggtcaagatcatcatgaaaccactgtggctattctccactctgaaactagaccacagaatcacatccttactgctgcctggatgaaggagccagcatctttgtcccctcccatgattctcctgtctttgggacaaaccaccaccactaagccagaacttctcagtccaagaacatctcaaatatgtaaagattccaaggaaaatgttttcttgaattacatggggaatccagaaacagaagcaaccccagtgaaaaatgaaggaacacagcgtatgtcagggccaaatgaattatcaacaccatcttctgaccacgatgcatttaacttgtctacaaagctagaattggaaaagcaagtatttgatagtaggagtctaacacgtggcccagatagccaccaccaggatggaagagttcatgcttctcatcaactaaccagaatccctgccaaacccatcctaccaacaggaacagtgaggctgcctgaaatgtccacacaaagcacttccagatactttgtaactttccagccacctcatcacgggaccaacaaaccagaaataactacatatccttctagggctttgccagagagcaaacagtttacaactccaagagtagcaagtacaactcctctcctatcacacatgtccaaacccagcatttctagaagcatccaccaaagcggctcaaagttctttgcaggaggaccgcctgcatccaaattctggcctcttggggaaaagccccaaatcctcaccaagtccccacagactgtgtctgtcactgctgaaacggacgctgtgttcccgtgtgaggcaataggaaaaccaaagcctttcgttacttggacaaaagtttccacatggacaggaagtgaggaactagaatggatgtga

SEQ ID NO: 122663 - DNA, 9012 bp, Homo sapiens
atggatgagtttgcccctggaaaacatttggcaacatctggagacctttttggtgaccacaactatggaaggagaacatatcacacccttgaagtaaaatgtgctgaggaacatccagctgtttctgacccatttcagagacagagcctcagagccctatctcctctgtctgaagatctgcctccttcttctgggctccgttcaggactgaccaagttggagctacttatgattcacggcaatgagatcccaagcatccccgatggagctttaagagacctcagctctcttcaggttttcaagttcagctacaacaagctgagagtgatcacaggacagaccctccagggtctctctaacttaatgaggctgcacattgaccacaacaagatcgagtttatccaccctcaagctttcaacggcttaacgtctctgaggctactccatttggaaggaaatctcctccaccagctgcaccccagcaccttctccacgttcacatttttggattatttcagactctccaccataaggcacctctacttagcagagaacatggttagaactcttcctgccagcatgcttcggaacatgccgcttctggagaatctttacttgcagggaaatccgtggacctgcgattgtgagatgagatggtttttggaatgggatgcaaaatccagagggcattcatgtagaggctgcgctcattcgctgagccatgaaattcagctggccaagggattttgtgaaatgctcctgcttgtgcttgctgccttgtctcacagcatgtatgtgtgtgggtatgagtgtgagtacatgtcaaagaggcaatggggtgtggaactcacggaatgtgtttggactagagaagcacatatggtagtcatcactggcgggtggatggtaattggaaccacacatatgcgagaggccattgacgctgaagccgaccagaaaggaaaggggcttaggctcaagtcaaggaggacccagtcagcaaagattcaggcagaggaggaggaggaagcagtgactgagacccagttgtggccagaaaggacggagaaaattccagaggatttcatatccaggagaccaagaggacaacgaattctgaagtgtaaaaaggacaaagcttatgaaggcggtcagttgtgtgcaatgtgcttcagtccaaagaagttgtacaaacatgagatacacaagctgaaggacatgacttgtctgaagccttcaatagagtcccctctgagacagaacaggagcaggagtattgaggaggagcaagaacaggaagaggatggtggcagccagctcatcctggagaaattccaactgccccagtggagcatctctttgaatatgaccgacgagcacgggaacatggtgaacttggtctgtgacatcaagaaaccaatggatgtgtacaagattcacttgaaccaaacggatcctccagatattgacataaatgcaacagttgccttggactttgagtgtccaatgacccgagaaaactatgaaaagctatggaaattgatagcatactacagtgaagttcccgtgaagctacacagagagctcatgctcagcaaagaccccagagtcagctaccagtacaggcaggatgctgatgaggaagctctttactacacaggtgtgagagcccagattcttgcagaaccagaatgggtcatgcagccatccatagatatccagctgaaccgacgtcagagtacggccaagaaggtgctactttcctactacacccagtattctcaaacaatatccaccaaagatacaaggcaggctcggggcagaagctgggtaatgattgagcctagtggagctgtgcaaagagatcagactgtcctggaagggggtccatgccagttgagctgcaacgtgaaagcttctgagagtccatctatcttctgggtgcttccagatggctccatcctgaaagcgcccatggatgacccagacagcaagttctccattctcagcagtggctggctgaggatcaagtccatggagccatctgactcaggcttgtaccagtgcattgctcaagtgagggatgaaatggaccgcatggtatatagggtacttgtgcagtctccctccactcagccagccgagaaagacacagtgacaattggcaagaacccaggggagtcggtgacattgccttgcaatgctttagcaatacccgaagcccaccttagctggattcttccaaacagaaggataattaatgatttggctaacacatcacatgtatacatgttgccaaatggaactctttccatcccaaaggtccaagtcagtgacagtggttactacagatgtgtggctgtcaaccagcaaggggcagaccattttacggtgggaatcacagtgaccaagaaagggtctggcttgccatccaaaagaggcagacgcccaggtgcaaaggctctttccagagtcagagaagacatcgtggaggatgaagggggctcgggcatgggagatgaagagaacacttcaaggagacttctgcatccaaaggaccaagaggtgttcctcaaaacaaaggatgatgccatcaatggagacaagaaagccaagaaagggagaagaaagctgaaactctggaagcattcggaaaaagaaccagagaccaatgttgcagaaggtcgcagagtgtttgaatctagacgaaggataaacatggcaaacaaacagattaatccggagcgctgggctgatattttagccaaagtccgtgggaaaaatctccctaagggcacagaagtacccccattgattaaaaccacaagtcctccatccttgagtctagaagtcacaccaccttttcctgctatttctcccccctcagcatctcctgtgcagacagtaaccagtgctgaagaatcctcagcagatgtacctctacttggtgaagaagagcacgttttgggtaccatttcctcagccagcatggggctagaacacaaccacaatggagttattcttgttgaacctgaagtaacaagcacacctctggaggaagttgttgatgacctttccgagaagactgaggagataacttccactgaaggagacctgaaggggacagcagcccctacacttatatctgagccttatgaaccatctcctactctgcacacattagacacagtctatgaaaagcccacccatgaagagacggcaacagagggttggtctgcagcagatgttggatcgtcaccagagcccacatccagtgagtatgagcctccattggatgctgtctccttggctgagtctgagcccatgcaatactttgacccagatttggagactaagtcacaaccagatgaggataagatgaaagaagacacctttgcacaccttactccaacccccaccatctgggttaatgactccagtacatcacagttatttgaggattctactataggggaaccaggtgtcccaggccaatcacatctacaaggactgacagacaacatccaccttgtgaaaagtagtctaagcactcaagacaccttactgattaaaaagggtatgaaagagatgtctcagacactacagggaggaaatatgctagagggagaccccacacactccagaagttctgagagtgagggccaagagagcaaatccatcactttgcctgactccacactgggtataatgagcagtatgtctccagttaagaagcctgcggaaaccacagttggtaccctcctagacaaagacaccacaacagcaacaacaacaccaaggcaaaaagttgctccgtcatccaccatgagcactcacccttctcgaaggagacccaacgggagaaggagattacgccccaacaaattccgccaccggcacaagcaaaccccacccacaacttttgccccatcagagactttttctactcaaccaactcaagcacctgacattaagatttcaagtcaagtggagagttctctggttcctacagcttgggtggataacacagttaatacccccaaacagttggaaatggagaagaatgcagaacccacatccaagggaacaccacggagaaaacacgggaagaggccaaacaaacatcgatataccccttctacagtgagctcaagagcgtccggatccaagcccagcccttctccagaaaataaacatagaaacattgttactcccagttcagaaactatacttttgcctagaactgtttctctgaaaactgagggcccttatgattccttagattacatgacaaccaccagaaaaatatattcatcttaccctaaagtccaagagacacttccagtcacatataaacccacatcagatggaaaagaaattaaggatgatgttgccacaaatgttgacaaacataaaagtgacattttagtcactggtgaatcaattactaatgccataccaacttctcgctccttggtctccactatgggagaatttaaggaagaatcctctcctgtaggctttccaggaactccaacctggaatccctcaaggacggcccagcctgggaggctacagacaggcatacctgttaccacttctggggaaaatcttacagaccctccccttcttaaagagcttgaggatgtggatttcacttccgagtttttgtcctctttgacagtctccacaccatttcaccaggaagaagctggttcttccacaactctctcaagcataaaagtggaggtggcttcaagtcaggcagaaaccaccacccttgatcaagatcatcttgaaaccactgtggctattctcctttctgaaactagaccacagaatcacacccctactgctgcccggatgaaggagccagcatcctcgtccccatccacaattctcatgtctttgggacaaaccaccaccactaagccagcacttcccagtccaagaatatctcaagcatctagagattccaaggaaaatgttttcttgaattatgtggggaatccagaaacagaagcaaccccagtgaacaatgaaggaacacagcatatgtcagggccaaatgaattatcaacaccctcttccgaccaggatgcatttaacttgtctacaaagctggaattggaaaagcaagtatttggtagtaggagtctaccacgtggcccagatagccaacgccaggatggaagagttcatgcttctcatcaactaaccagagtccctgccaaacccatcctaccaacagcaacagtgaggctgcctgaaatgtccacacaaagcgcttccagatactttgtaacttcccagtcacctcgtcactggaccaacaaaccggaaataactacatatccttctggggctttgccagagaacaaacagtttacaactccaagattatcaagtacaacaattcctctcccattgcacatgtccaaacccagcattcctagtaagtttactgaccgaagaactgaccaattcaatggctactccaaagtgtttggaaataacaacatccctgaggcaagaaacccagttggaaagcctcccagtccaagaattcctcattattccaatggaagactccctttctttaccaacaagactctttcttttccacagttgggagtcacccggagaccccagatacccacttctcctgccccagtaatgagagagagaaaagttattccaggttcctacaacaggatacattcccatagcaccttccatctggactttggccctccggcacctccgttgttgcacactccgcagaccacgggatcaccctcaactaacttacagaatatccctatggtctcttccacccagagttctatctcctttataacatcttctgtccagtcctcaggaagcttccaccagagcagctcaaagttctttgcaggaggacctcctgcatccaaattctggtctcttggggaaaagccacaaatcctcaccaagtccccacagactgtgtccgtcaccgctgagacagacactgtgttcccctgtgaggcaacaggaaaaccaaagcctttcgttacttggacaaaggtttccacaggagctcttatgactccgaataccaggatacaacggtttgaggttctcaagaacggtaccttagtgatacggaaggttcaagtacaagatcgaggccagtatatgtgcaccgccagcaacctgcacggcctggacaggatggtggtcttgctttcggtcaccgtgcagcaacctcaaatcctagcctcccactaccaggacgtcactgtctacctgggagacaccattgcaatggagtgtctggccaaagggaccccagccccccaaatttcctggatcttccctgacaggagggtgtggcaaactgtgtcccccgtggagggccgcatcaccctgcacgaaaaccggaccctttccatcaaggaggcgtccttctcagacagaggcgtctataagtgcgtggccagcaatgcagccggggcggacagcctggccatccgcctgcacgtggcggcactgccccccgttatccaccaggagaagctggagaacatctcgctgcccccggggctcagcattcacattcactgcactgccaaggctgcgcccctgcccagcgtgcgctgggtgctcggggacggtacccagatccgcccctcgcagttcctccacgggaacttgtttgttttccccaacgggacgctctacatccgcaacctcgcgcccaaggacagcgggcgctatgagtgcgtggccgccaacctggtaggctccgcgcgcaggacggtgcagctgaacgtgcagcgtgcagcagccaacgcgcgcatcacgggcacctccccgcggaggacggacgtcagatatacaggtttatggcagtgcttttcaaccaagggtgattttgccccaagacaacacttggcaatatctgaagacacctttgattatcacaaatggggcagtgggtgcttctggtatctggtgggtggaggccagggacggtgctcaacaccctgcagtgcacaggatggcccatcacagattgtcatccatcctaccttcaatgtccatagtgccaaggtcagttttgatagcagaatcaaggtgtttgccaatgggaccctggtggtgaaatcagtgacggacaaagatgccggagattacctgtgcgtagctcgaaataaggttggtgatgactacgtggtgctcaaagtggatgtggtgatgaaaccggccaagattgaacacaaggaggagaacgaccacaaagtcttctacgggggtgacctgaaagtggactgtgtggccaccgggcttcccaatcccgagatctcctggagcctcccagacgggagtctggtgaactccttcatgcagtcggatgacagcggtggacgcaccaagcgctatgtcgtcttcaacaatgggacactctactttaacgaagtggggatgagggaggaaggagactacacctgctttgctgaaaatcaggtcgggaaggacgagatgagagtcagagtcaaggtggtgacagcgcccgccaccatccggaacaagacttacttggcggttcaggtgccctatggagacgtggtcactgtagcctgtgaggccaaaggagaacccatgcccaaggtgacttggttgtccccaaccaacaaggtgatccccacctcctctgagaagtatcagatataccaagatggcactctccttattcagaaagcccagcgttctgacagcggcaactacacctgcttggtcaggaacagcgcgggagaggataggaagacggtgtggattcacgtcaacgtccagccacccaagatcaacggtaaccccaaccccatcaccactgtgcgggagatagcagccgggggcagtcggaaactgattgactgcaaagctgaaggcatccccaccccgagggtgttatgggcttttcccgagggtgtggttctgccagctccatactatggaaaccggatcactgtccatggcaacggttccctggacatcaggagtttgaggaagagcgactccgtccagctggtatgcatggcacgcaacgagggaggggaggccaggttgatcctgcagctcactgtcctggagcccatggagaaacccatcttccacgacccgatcagcgagaagatcacggccatggcgggccacaccatcagcctcaactgctctgccgcggggaccccgacacccagcctggtgtgggtccttcccaatggcaccgatctgcagagtggacagcagctgcagcgcttctaccacaaggctgacggcatgctacacattagcggtctctcctcggtggacgccggggcctaccgctgcgtggcccgcaatgccgctggccacacggagaggctggtctccctgaaggtgggactgaagccagaagcaaacaagcagtatcataacctggtcagcatcatcaatggtgagaccctgaagctcccctgcacccctcccggggctgggcagggacgtttctcctggacgctccccaatggcatgcatctggagggcccccaaaccctgggacgcgtttctcttctggacaatggcaccctcacggttcgtgaggcctcggtgtttgacaggggtacctatgtatgcaggatggagacggagtacggcccttcggtcaccagcatccccgtgattgtgatcgcctatcctccccggatcaccagcgagcccaccccggtcatctacacccggcccgggaacaccgtgaaactgaactgcatggctatggggattcccaaagctgacatcacgtgggagttaccggataagtcgcatctgaaggcaggggttcaggctcgtctgtatggaaacagatttcttcacccccagggatcactgaccatccagcatgccacacagagagatgccggcttctacaagtgcatggcaaaaaacattctcggcagtgactccaaaacaacttacatccacgtcttctga

SEQ ID NO: 122664 - DNA, 4974 bp, Homo sapiens
atgaaagcttcaggaattctgaagtgtaaaaaggacaaagcttatgaaggcggtcagttgtgtgcaatgtgcttcagtccaaagaagttgtacaaacatgagattcacaagctgaaggacctgacttgtctgaagccttccatagagtctcctctgagacagaacaggagcaggagtattgaggaggagcaaaaacaagaagagaatggtgacagccagctcatcctggagaaaatccaacttccccagtggagcatctctttgaatatgactgatgagcacgggaacctggtgaacttggtgtgtgacatcaagaaaccaatggatgtgtacaaaattcacttgaaccaaacagatcctccagatattgacataaatgcaatggttgccttggactttgagtatccaatgacccaggaaaactatgaaaatctatggaaattgatagcatactacagtgaagttcccatgaagctacacagagagctcatgctcagcaaacaccccagagtcagctaccagtacaggcaagatgccgatgaagaagctctttactacacaggtgtgagagcccagattcttgcagaaccagaatggatcatgcagccatccatagatatccagctgaaccgacctcagagtacggccaagaaggtgctactttcctactacaaccagtattctcaaacaatagccaccaaagatacaaggcaggctcggggcagaagctgggtaatgattgagcctagtagagctgtgcaaaaagatcagactgtcctggaagggggtcgatgccagttgagctgcaatgtgaaagcttctgagagtccatctatcttctgggtgcttccagatggctccatcctgaaagtgcctgtggatgacccagacagcaagttctccattctcagcagtggctggctgaggatcaagtccatggagccatctgactcgggcttgtaccagtgcattgctcaagtgagggatgaaatggaccgcatggtatatagggtacttgtgcagtctccctccactcagccagccgagaaagacacagtgacaattggcaagaacccaggggagccagtgatgttgccttgcaatgctttagctatacccgaagcccaccttagctggattcttccaaacagaaggataattaatgatttggctaacacatcacatgtatacatgctgccaaatggaactctttccatcccaaagatgtgtggctgtcaaccagcatggggcagaccatatcacggtgggaatcacagtgaccaagaaaggttctggctcgccatccaaaagaggcagatggccaggtccaaaggctctttccagatgagagaagacatcgtggaggatgaaggggtctcaggcacgggagatgaagagaacacttcaaggagacttctacatccaaagcaccaagaggcgttcctcaaaacaaaggatgatgccatcaatggagataagaaagccaagaaagggagaagaaagctgaaactctggaagcattcagaaaaagaaccagagaccagtgttgcagaagatctcagagtgtttgaatcaagacgaaggataaacgtggcaaacaaacagattaatccggagcactgggctgatattttagccaaagtctttgggaaaaatctccctacaggcacagaagtatccccaattattaaaaccacaagttctccattcttgagcctagtagtcacaccacctttgcctgctgtttctccccccttggcatctccaatacagacagcaacaagtgctgaagaatcctcagcagatgtacctctactcagcgaaggaaagcacattttgagtaccatttcctcagccagcatgggactagaacaccacaacaatggagttattcttgttgaacctgaagtaacaagcacacctctggaagaagttgttgatgagtattccaagaagactgaggagatgacttccactgaaggcgacctgaaggggactgcagcctctacacttatatctgagccttatgaacaatctcctactctacacaccttagacacagtctatgaagagcccacccatgaagagacggaaacagagggttggtctgcagcagatgttggatcctcaccagatcccacatccagtgagtatgagcttccattggttgttgtctccttggctgagtctaagcctgtgcaatactttgacccagatttggagactaattcacaaccacatgaggataacataaaagaatacagttttgcacaccttactccaaccgccatcatctggtttaatgactctagtacatcactgtcatttgaggattctactgtaggggaacaaggtgtcccaggcaaatcacatctacaaggaccgacagagaacatccagcttgtgaaaagtagttttagcactcaagacaccttattgattaaaaaaggtatgaaagagatgtctcagacactacagggaggaaatatgctagagggagaccctacacactccagaagttctgagaatgagggccaagagagcaaatccatcactttacctgactccacactgggtataacgagcagtacgtctccagttaagaagcctgcggaaaccacagttgtcaccctgctacacaaagacaccacaacagaaacaactccaaggcaaaaagtggcttcatcatccaccatgagcactcacccttctcgaaggagacccaatgggagaaaattacaccctcacaaattccaccaccggcacaagcaaaccccacccacaacttttgctccattagagactttttctactcaaccaactcaagcaactgacattaagatttcaaatcaaatggagagttctctggttcctacatcttgggagattaacacagttaatacccccaaacagctggaaatggagaagaatgtagagctcatatcaaagggaactccacggagaaaacacgggaagaggccaaacaaacatcgatataccccttctacagtgagttcaagagcatctgcatccaagcccagcccttctccagaaaataaacatagaaacattgttactcccagttcagaaactacacttttgcctagaaatgtttctctgaaaactgagggcgtttatgattccttagattacacgacaaccaccagaaaaatacattcatctcaccataaagtccaagacacacttccagtcatgtataaacccacatcagatggaaaagaaattcaggatgatgttgccacaaatgttgacaaacataaaagtgacattttagtccctggtgagtcaattacaaatgtcacacaaacttctcgctccttggtctccactatgggagaatttaaggaagaatcctctcctgtgggctttccaggaattccaacctggaatccctcaaggaaagctcagcctgggaggctacagacagacatacatgttaccacttctggggaaacccctacagaccctccccttgttaacgagcttgaggatgtggattttacttctgagtttttgtcctctgtgacagtctccacaccatttcaccaggaagaagctggtttttccacaattctctcaagcataaaagtggagatggcttcaagtcaggtagaaactaccacccttggtcaagatcatcatgaaaccactgtggctattctccactctgaaactagaccacagaatcacatccttactgctgcctggatgaaggagccagcatctttgtcccctcccatgattctcctgtctttgggacaaaccaccaccactaagccagaacttctcagtccaagaacatctcaaatatgtaaagattccaaggaaaatgttttcttgaattacatggggaatccagaaacagaagcaaccccagtgaaaaatgaaggaacacagcgtatgtcagggccaaatgaattatcaacaccatcttctgaccacgatgcatttaacttgtctacaaagctagaattggaaaagcaagtatttgatagtaggagtctaacacgtggcccagatagccaccaccaggatggaagagttcatgcttctcatcaactaaccagaatccctgccaaacccatcctaccaacaggaacagtgaggctgcctgaaatgtccacacaaagcacttccagatactttgtaactttccagccacctcatcacgggaccaacaaaccagaaataactacatatccttctagggctttgccagagagcaaacagtttacaactccaagagtagcaagtacaactcctctcctatcacacatgtccaaacccagcatttctagtaagtttgctgacctaagaactgaccaatccaatggctcctacaaagtgtttggaaatagcaacatccctgaggcaagaaactcagttggaaagcctctcagtccaagaatttatcattattccaatggaagactccctttctttaccaacaggactctttctttttcacagttgggagtcacccggagaccccagataccctcttctcctgtcccagtaatgagagagagaaaagttaatccaggttcctacaataggatatattcccatagcaccttccatctggactttggccttccagcacctccactgttgcacactccatggaccatggtatcacccccaactaacttacagaatatccctatggtctcatccacccagagttctgtctcctttataacatcttctgtccagtcctcaggaagcatccaccaaagcggctcaaagttctttgcaggaggaccgcctgcatccaaattctggcctcttggggaaaagccccaaatcctcaccaagtccccacagactgtgtctgtcactgctgaaacggacgctgtgttcccgtgtgaggcaataggaaaaccaaagcctttcgttacttggacaaaagtttccacatggacaggaagtgaggaactagaatggatgtga

SEQ ID NO: 122665 - DNA, 1285 bp, Homo sapiens
ttgagcttcaccacttgctccacattctccaccaactaccgatccctgggccctgcccaggcgcccagctacggcaccggccggtcagcagtgtggccagcgtctatgcaggcactgggaactctggttccaggatctccgtgtcctgctccacgagcttccggggcagcatggagtccggaggcctggccgcggggatgactggggtctggcaggaatgggaggcatccagaacgaggagaccatgcaaagcctgaacgactgctggcctcctacccggacagagtgaggcacctggagaccaagaaccggaagctggagagcaaaatctgggagcacctggagaagaagggaccccaggtcagagactggagccattacttcaagaccatcaggaaccagagggctcagagcttggcaattactgtagacaatgcctgcattgttctgcagatcaacaacacccatcttgctgctgatgactttagagtcaagtatgagacagagctggccatgtgccagtctgtggagagcaacatccatggactctgtaaggtcaatgatgacaccaacgtcactcggctgcagctggagacagagatcaaggctctcaaggaggagctgctcttcatgaagaagaaccacgaagaggaagtaaaaggcctacaagcccagattgctagctctgggttgaccatggaggtagatccccaaatctcagcacctcgccaagatcatggcagccatccgggcccaatatgacgagctggcttggaagaacggagaggagctggacaagtacttgtctcagcagattgaggagagcaccacagtggtcaccacgcagtctgccaaggctggagctgctgagatgacgctcacagagctgagatgtacagtccagtccttggagatcaacctgaactccatgagaaatctgaaagccagtttggagaacagcgtgagggaggtgaaggcctgctacaccttgcagatggagcagctcaacgggatcctgctgcacctggggtcagagctggcacagacccaggcaaagggacagtgccaggcccaggagtatgaggccctgctgaacatcaaggtcaagctggaggctgagatcgccacctactgccacctgctggaagatggcaaggacttcaatcttggagatgccctggacagcagcaactccatgcaaaccattccaaagaccaccacccaccagagagtggatggcaaagtggtgtctgagaccaacgacaccaaagttctgagacattaa

SEQ ID NO: 122666 - DNA, 1458 bp, Homo sapiens
tcgtccgcaaagcctgagtcctgtcctttctctctccccggacagcatgagcttcaccactcgctccaccttctccaccaactaccggtccctgggctctgtccaggcgcccagctacggcgcccggccggtcagcagcgcggccagcgtctatgcaggcgctgggggctctggttcccggatctccgtgtcccgctccaccagcttcaggggcggcatggggtccgggggcctggccaccgggatagccgggggtctggcaggaatgggaggcattcagaacgagaaggagaccatgcaaagcctgaacgacggcgtggcctcttacctggacagagtgaggagcctggagaccgagaaccggaggctggagagcaaaatccgggagcacttggagaagaagggaccccaggtcagagactggagccattacttcaagatcatcgaggacctgagggctcagatcttcgcaaatactgtggacaatgcccgcatcgttctgcagattgacaatgcccgtcttgctgctgatgactttagagtcaagtatgagacagagctggccatgcgccagtcatgtggagaacgacatccatgggctccgcaaggtcattgatgacaccaatatcacacgactgcagctggagacagagatcgaggctctcaaggaggagctgctcttcatgaagaagaaccacggaagaggaagtaaaaggcctacaagcccagattgccagctctggggttgaccgtggaggtaagatgcccccaaatctcaggacctcgcaaaagatcattggcagacatccggggcccaatattgacgagctgggctcgggaagaaccgagaagaggctagacaagtactggttctcagcagattgaggtgagcaccacagtggtcaccacacagtctgctgaggtttggagctgcttgagacgacgctcacagagctgagacgtacagtccagtcctttggagatcgacctggactccatgagaaatctgaaggccagcttggagaacagcctgagggaggtggaggcccccgtacgcccttacagatggagcagcttcaacggggatccctgctgcaccttgagtcagagctggcacagaccccgggcagagggacagcgccaggccccaggagtatgaggccctgcttgaacatcaagggtcaagcttggaggctgaaattcgccacctaccgccgcctgctggaagatggcgaggactttaatctttggtgatgccttggacagcagcaactccatgcaaaccatccaaaagaccaccacccgccggatagtggatggcaaagtggtgtcttgagaccaattgacaccaaagttctgaggcattaagccagcagaagcagtggtacccttttggggagcaggaggccaataaaaagttcagagttcaaaaaaaaaaaaaagaaaaagaaagttttg

SEQ ID NO: 122667 - DNA, 399 bp, Homo sapiens; identical to SEQ ID NO: 114110

SEQ ID NO: 122668 - DNA, 287 bp, Homo sapiens
tcagcttgcggggaggtgtggagggagaggcgcgagcgggaaccggggctgcgtgcggcgcttgcgggccagctggagttccgggtgggcgtgggcttggcggccccacactcggagcagccggccggcccgggccttagctgccttcccgccgggcagggctcgggacctgcagcccgccatgcctgagcctcccacccgcttcacgggctcctgtgcggcccgagcctctccgatgagcgccgccccctgctccacggcgcccagtcccatcgaccacccaaggg

SEQ ID NO: 122669 - DNA, 630 bp, Homo sapiens; identical to SEQ ID NO: 120517

SEQ ID NO: 122670 - DNA, 1533 bp, Homo sapiens
ctattctggaaacagatgcctgaaagaacttttgtatctgcccaaggggtttttcctgaccactgcacaaagaaagaccatggcatttttgtagagaaagagtttaacagacacaagggtggccacgccatgtgggagactgagttgagaggtgacagcgtgctggcagtcctcacagccctcgctcgctctcagtgcctcctctgcctgggctcccactttggcggcacttgaggagcccttcagcccaccgctgcactgtgggagcccctttctgtgctggccaaggccacagctggctccctcagcttgcagggatgtgtggagggagaggcgcgagcgggaaccggggctgcgtgcacgcttgggggccagctggagttccgggtgggcgtgggtttggcgggcctgcactcggagcagccggccagccctgctcgcacaaggcagtgagggacttggcacccgggccagcggctgcagagggtgtactaggtcccccagcagtgccggcccaccggcgctgtgctcgatttctcgccaggccttagctgcctttccatggggcagggctcgggacatgcagcccgccatgcctgagcctcccacccactccatgggctcctgtgcggcccgagcctccccgacgagcaccaccccctgctccacggcacccagtcccatcgaccacccaagggctgaggagtgcgagcgcacagcgtggcactggcaggcagctccacctgctgccctggtgcgggatccactaggtgaagccagctgggctcctgagttctttgggtccacgctgcttttatgagctgtaacactcaccgcgaaggtctgcagcttcactcctgaagccagagagaccacgagcccacggggaggaatgaacaactccagacgcgccgccttaagaactgtaacactcaccgcgaaggtctgcggcttcactcctgaagccagcgagaccaccagcccatggtgattttcctcccttcgtcgcagtggttccccctccaaataccactcccttgatcccatggacacagcactcatagcagcttttaagtcctcctggctgaggaggtcctttgcctgggctatggcttcagctgaagagtctgccgagaaggcactgatgcaaagaggggctgcagccaggacaaaggagacccatgggcatcctttcacccacttattccacaagcgcttgcccctcttatgcgccagggctgagccaggaaccgggaggttgatggctgcctccacacccagggtggaacaggggcccacttgccggcgtctttcggtgaaggcgcaggctcggtttcggtctagagggatggtcgcggggggcgtattcgcctttgatcctttgccaacctgggacagtcttttcttccttttggccccatggatttctgcccaggcctggagctctggaaaccaggggggccgatgcacagccaggagcacgtgaggagccactgtatgggagatgctgccctctcctaggggctgaaccat

SEQ ID NO: 122671 - DNA, 457 bp, Homo sapiens; identical to SEQ ID NO: 120523

SEQ ID NO: 122672 - DNA, 1410 bp, Homo sapiens; identical to SEQ ID NO: 120525

SEQ ID NO: 122673 - DNA, 801 bp, Homo sapiens; identical to SEQ ID NO: 120330

SEQ ID NO: 122674 - DNA, 2234 bp, Homo sapiens; identical to SEQ ID NO: 117270

SEQ ID NO: 122675 - DNA, 444 bp, Homo sapiens; identical to SEQ ID NO: 116839

SEQ ID NO: 122676 - DNA, 843 bp, Homo sapiens
tcagccttggcaaaaacaccttctaaataactgagacttgctcagaaattcaggaacacaaaccaaaggctcagggtagaaaaacttggaattatcgctgtctttaaagacacggcccgcgtttttccagctgtcgattgagttgtcgccgaccttttgataaaacatgtagattgatgtgtcatcagcgtctttcgggcttcccgcaagagcaaacacaacgtgatagccgttgtattcagctactgttccgtcagcgttttgcagcggccagctgtcccacacatcaagtccttttgcagactcaatatttttaatcgttgattgatcgaattgaggcacttggtatttttcgttttgctgctgtttagggatctgcagcatatcatggcgtgtaatatgagagacgccgtacgtttctttgtatgctttttggttattttctttcgcgaaggcttgagtcgctcctccggcgctgtgatcgatttctcgccggaccttagctgctttcccgcggggcagggctcgggacctgcagcccgccatgcctgagcctcctacccactccatgggctcctgtgctgccccagcctccctgacgagcaccaccccctgctccacggcgcccagtcccatcgaccacccaagggctgaggagtgcaagcgcacggcacgggactggcaggcagctccacctgcagccccggtgcgggatccactaggtgaagccagctgggctcctgagttgttgcccactctcagttccttgaaatgtgcctcttcagtgtggcagtgttcttcatcgaagcatgcaagccacaaggccccagggagagccagcat

SEQ ID NO: 122677 - DNA, 1449 bp, Homo sapiens
atgcccgccgccgcgccgcccgcgtccgcgtgctccgccacaccatcgtccgcccgccgcaggggctcggacagccgcgccggggaccggagccggcacgggcccgcgagccgtgttggaacagggcctggacagcaaatgaggaagacttattgcagaaattcagagcctagtgacctggaccagggtggaggcagcagaggaggacccaggaggcagtccaaatgtgtccggaattggtgggttcttggtctcactgacttcaagaatgaagccgcggaccctcacgactcaggagcccagctggcttcacccagtggattccgcactagggctgcaggtggagctgcctgccagtcccgcgccatgcgctcgtactcctcagcccttgggtggtcgatgggactgggcgccgtggagcagggggtggtgctcgtcggggaggctcaggccgcacaggagcccatggagtgggtgggaggctcaggcatggtgggctgcaggtcccgagccccacccgcgggaaggcagctaaggccggacaagaaattgagcacagcgccagtgggccggcaccgctggagacccagcacaccctccgcagccactggcctgggtgctaagtccctcattgcccggggccagcagggccggctggctgctccgaacaaaacagacttcaaagcaagagcagttaaaaaagacaaagagggacattatataatgataaaaggccttgtccaaaaggaaagtatcacaatcataaatatatatgcacctaacactggagctcccaaatttacaaaacaattaccactagacctaagaaataagacagacagcaacacaataatagtggggtatttcagtactccactgacagcactaaacaggtcatcaagacagaaagtcaacaaagaaacaatggatttaaactataccctggaacaaatggacttaacagatatttacagaacattctacccaacaaccgctgaatatatattctattcatcagagcatggaactttctccaagacagaccgtatgataggacacaaaacaagtcttaataaatttaagaaaattgaaattataccaagtactctccctgaccacagtggaataaaactagaaatcaactccaaaaagaaccttcaaaaccagacaaatacatggaaattaaataacctgctcctgagtgatcattgggtcaacaatgaaatcaagatggaaattttaaaattcttcaaaccaaatgataatagtgacacaacctatcaaaacctctgggagacagcaaaggcggtgctaagaggaaagttcatagccctaaatgcttacatcaaaaagtctgaaagagcacaaatagacaatctaaggtcacacctcaaggaactagagaaacaagaacaaaccaaacccaaacccagcagaagaaagaaatag

SEQ ID NO: 122678 - DNA, 626 bp, Homo sapiens
ctcagactttcatttctttcagggcaggtcagttttgaaaacttaatgaggtagtcaagttcttttgaaggcaaatacactgcaccattcaaaccccctttgaagtctttttgtacgtgctcctgtgtcaagttctgcaatacatactgaacttgaagtatagttcgaagctttttcttctcagcctcaagttttagcatgtgctcccttctctgggccttcttttgcgcttttagtagccgggccagtggctgcggagggtgtactgggtcccccagcagtgccggcccaccggcactgcgctcgatttctcgccgggccttagctgccttcccacggggcagggctcgggacctgcagcccgccatgcctgagcctcccaccccctctgtgggctcctgtgcggccgagcctccccgacaagcaccaccccctgctccatggtgcccagtcccatcgaccacccaagggctgaggaatgcgagcacacggcgcaggactggcaggcagctccacatgatatggcccttccctgcatctctgaagtcctctcctgccacactcccctgtgagcactgtgctccaacaacactgaccttttcttgttcctcaaacatgcaaaccat

SEQ ID NO: 122679 - DNA, 3594 bp, Homo sapiens; identical to SEQ ID NO: 116845

SEQ ID NO: 122680 - DNA, 1513 bp, Homo sapiens
ctaactgggaggcaccccccagtaggggcagactgacacttcacacggccgggtactcctctgagacaaaacttccagaggaacgatcagatggcagcattcgcagttcacgaaaaaccgctgttctgcaaacaccgctgaatccaggtgatccaggtgccaggggtcggtggcggacgacatgggggagagggtcagcggcgaggccccgcagttggactccaccagctcgccctggatgtggacgtgagccgaggcgtttgtctgcctcaaggcggccttgagaggggcgatctggttgaactggactctggagaggcaaccagtgaatcctggggtgttgtatttgtgaatctcttggtcaattttccctgtttctagtggatcccgcactggggctgcaggtggagctgcccgccagtcctgcaccgtgcgctcgcattcctcagcccttgggtggtcgatgggactgggcgctgtggagcagggggtggcgctcgtcggggaggctcgggccgcacaggagcccatggagtgggtgggaggctcaggcatagcgggctgcaggtcccgagccctgccccgcgggaaggcagctaaggctcggtttgagtcctgctggccggccctgatgaaggatgctcatggagtggtgatcgtcttcaatgctgacatcccaagccaccggaaggaaatggagatgtggtattcctgctttgtccaacagccgtccttacaggacacacagtgtatgctaattgcacaccacaaaccaggctctggagatgataaaggaagcctgtctttgtctggcggcggcggtaaccgcaggcaaggcaggagctgccctcggggctggactctcggggtggcaggggctgcagctgcagctgctcagggcaaggaagcccgtgggctccacgtgggctccacgtgggctcctgcaacgccgctggggaatctctcgcccgctgccccctattctggagaccttgattccaaccactgcccggaggaggtagtggaggcgagcccggtgttaatgagccccgaaggcccaagcaaagacctttatttgcactcattttcacagagtggaaaaactgttttggccaactttctgacagaatcttctgacatcactgaatacagcccaacccaaggagtgaggatcctagaatttgagaacccgcatgttaccagcaacaacaaaggcacgggctgtgaattcgagctatgggactgtggtggcgatgctaagtatgtttcctttaaagaaagtcacttcatcaaatggtttaaaaatcagctgcccaagccaggggcggtggctcacacctgtaattccagcactttgggaggccaaggtggcgccatggccacccccgggacgctcagggctgcggctccggagcccgcatttgaatttccccagaaaaccataagcatgcaagtaaaagttgccaaacgcctcgtttgcataactcgcttgaatttagcttttctcatttag

SEQ ID NO: 122681 - DNA, 952 bp, Homo sapiens
atgtgggaaagtttgacactttctagagacttcttgaatggctttgaccaaaatgctgatagtggtatagacaataaagttcaggttgaggtggcctcagatgaagatgaggaacttgttgggaactggaataaagaaagggaaaacccattttctggggagaaattaaagccagctgccgaaatttgcataagttacaaggagccaaatgctaatcaccaagataatggggaaaatgtcgccagggcatgtcagagacctttgcagcatcccctcccatcacaggcccagaggcctaggaggaaacaacggtttcctgggccaggttcagggcccacctgggacttggtgccatgcatcccaggtgctcctgccttgactaaaaggggccaaggaaaccaaaatcatggtattctgaaggccagagatatgaatctccgtcatttggcatcccactgggatcggatttgtttcactactaatgctctgctgctaaaaccatacaagttgcctccctctaggcccagggactactgcggaagagctgccttccctcgtggcagggttcgggacctgcagcccgccatgcctgagcctcccacccactccatgggctcctgtgcggcccgagcctccccgatgagcaccaccccctgctccacagcgcccagtcccatcgaccacccaagggctgaggaatgcgagcacacggcacaggactggcaggcagctccacctgcagccccggtgcgggatccactaggtgaagccagctgggctcctgagttctttgggtccatgctgcctttatgagctgtaacatttatcgcgaagatctgcagcttcactcctgagcccagcgagaccacaagcccaccaggaggaacgaacaactccagacacgctgctttaagagctgtaacactaaccgcgaaggtctgcagcttcactc

SEQ ID NO: 122682 - DNA, 858 bp, Homo sapiens
atgtggccacgcctggattcaaggcagtctgaggaggtgagtgtttcaaagaggcacatggatgccacagacaaaatcaagtttccatggttgaaggagaagaggacgatagagtttggggaggcagcaggctacgtctgccacagaagatataaagatatggagccacacgagaagatgggggaggctgccaaaaaagtccactgggtacagatgaggagcagggctcgggacctgcagcccgccatgcctgagcctcccacccactcaaagggctcctgtgcggcccgagcctccccgacgagcaccaccccctgctccacgacgcccagtcccatcgaccacccaagggctgaggagtgcaagcacacggcacaggactggcaggcagctccacctgcagccccagtgtggggtccactaggtgaagccagctgggctcctgagtctggccctagaaacaagaaccaatccagcagcaacaagcatctctggcagtctatcatttcccttcaactgaaatcagatcttcttaaagaaatgcttggctctcagactgggaacggaaatgtacaagatgtgcttcgatatctggtcaaatcagaaactcaaaaagctatcaaagtctctttggactgtgtcagaaagagatactatcggtcttccctcagtctgcagctgaaactctgtgactgctgggggcaggccctgttctcttcagctctcactctggaccccaaggaggttgtggtccgagatttagaagaactttccaactataaaactaccctagaaggaagtggaatctttgactctgtggctcgagtgagggaggagtcagaagcagaagggacatga

SEQ ID NO: 122683 - DNA, 653 bp, Homo sapiens
atggccatactgccaaaagcaatctacacattcaatgcaattcccatgaaagtaccaacattattcctcacagagctagaaaaaacaatcccaacattcatatggaaccaaaaaagagcccacataggcaaagcaagactaagcaaagagaacaagtccgaaggcatcacattacctgacttcaaactatactatgaagctatagtcaccaaaacagcatgccagccagccctgctggccccgggcagtggggaacttagcacccgggccagtggctgcggagggtgtactgggtcccccagcagtgccagcccaccggcgctgcgctcgatttctcaccgggccttagctgccttcccgcggggcagggctcgggacctgtagcccgccatgcctgagcctcccacccactccatgggctcctgtgcggcccgagcctccccaaggagcaccaccccctgctccacggcgcccagtcccatcgaccacccaagggctgaggagtgcgagcgcacggcacgggactggcaggcagctccacctgcagccctggtgcgggatccactgggtgaagctagctgggctcctgagttgtttgggtccacgctgcttttaagagctgtaacactcaccgcgagggtccgtggcttcat

SEQ ID NO: 122684 - DNA, 642 bp, Homo sapiens
tcagcccgccgccgcactgtgggagcccctctctgggctggccgaggtcggagccggctccctctgcttgcaggaagatgtggagggagaggcgtgggagacgatcacgggccagcgcgagttccaggtgggtgtggccccacactcggagtggccggccagcgccactggccccatgcaagtgaagacttctgtccccagctgcctgcagatctggtaccatgatctttccctcaatccatccatcccaatgcaggatgattggtttaggttggaaaaaataaagttctgttcataacgccactccatgggctcctgtgccgcccgagcctcccggacgagcaccaccccctgctccagggcggccagtcccattgaccacccaagggctgaggagtgcgagcgcacggcgcaggactggcaggcagctccacctgcagccccagtgcgggatccactgggtgaagccagctgggctcctgagtcatgagggtccgcggcttcgttcttcaagtcagtcagaccaagaacccaccaactccggacacagtggcatgtgcctgtagtcccacctgtggtgatcccccttgcaaagtcaatctgagcggctggcaggctttccttcaagccttttccattcat

SEQ ID NO: 122685 - DNA, 2850 bp, Homo sapiens
atgagaaaattttgcaggggcagagatattgagaaacacagcatccagttctacccactcctgggaccctcttttactgtcttcgttaagcatcttctgcatataacttgtggcctgcagcacctggctaagatcttcctccactccctccctgggagactgcacagcctagctgggaaagtcaaagccatcaaggacccagaaaatgttacaagggctcctcaaaagccagcaagtgccagaaccaccacccaagcagctggttgcagagccgactccccgttcttaaagggcctgagcctatgggaccggaagagctccacagtctgcctgtctctggtggtggaagaccactctcagaagcgcgggctgaggcttgcacacagtcagattcccgcgcagcacgtgcacagacccacctctgctcagagtgagcctaaggtaggagcaggagagagagcatgtcttaagagagaaagccaccttcatgaacagacgctcacctgctccattaatgccaagagcagccagccagccctgctggcccggggcaatgggggacttagcacccgggccagtggctgcggagggtgtaccgggtcccccagcagtgccggcccaccggcgctgtgctcgatttctcgccgggctttagctgccttcccacggggcagggctcgggacctgcagcccgccatgcctgagcctcccacccactccatgggctcctgtgcggcccgagcctccccgacgagcaccaccccctactccacggcgcccagtcccattgaccacccaagggctgaggaatgtgagcgcacggcgcaggactggcaggcagcttcacctgcagccccggtgcgggatccactaggtgaagccagctgggctcctgagtctggaactaacatttccattacacctggaaatgccacatttgtgacccgggtgcagggacaggcttggtttgcctcatgtatcactggtcatgatatgtctagtttaaaaacttccagtgtcgtggtattaaggagacaatctgaggcacttctaccagccaatttgacatgcaattggcaagattcttctgcccttgccaccttagaaagtgccctgtcccaggtcagacacaaaagattcacatttacacttatggtctttacaggctcagccatagacattatggcaactgttagcattgctgttgtatctattactgaatcagtacaaacaactgcttttgtagataatctggccaaaaatatatgtgatgaacttctcctacaggacatggatgaagctggaaaccaacattctcagcaaaataacacaagaacagaaaaccaaacaccacatgttctcactcataagtgggagttgaacaatgagaacatacggatacagggaggggaacattacatactggggcctgttggtggcaggttgccaacatccaaactcgctgttgattgccagctcctgctccttgcagcagcccagcatgctctctgctggtgccaaaatacccttccaccaaaccccgctaacttctggaactgtcctagagggtttcctaccctagcaagtgagcttgcctatgtcagccctaaccttgctcttgtcattcagctgagccagaggaaaaaatttgagctattctggggtggtctacagagaaccatcttctttcccttcagtgttctcagaatattgactgttgatgaacaagccaatgatgtgagtgtggctgcagcaaggacccttcaaattttcagagatgacatgattgtatatctagaaaaccccattgtctcagcccaaaatctccttaagctgataagcaacttcagcaaaatctcaggatacaaaatcaatgtacaaaaatcacaagcattcttatacaccaacaacagacaaacagagagccaaatcatgagtgaactcccattcacaactgcttcaaagagaataaaatacctaggaatccaacttacaagggatgtgaaggacctcttcaaggagaactacaaatcactgctcaaggaaataaaagaggatacaaacaaatggaagaacattccatgctcatgggtaggaaaaatcaatatcgtgaaaatggccatactgcccaaggtaatttacagattcagtgccatccccatcaagctaccaatgactttcttcacagaattggaaaaaactactttaaagttcatatggaaccaaaaaagagcccacactgccaagtcaatcctaagtcaaaagaacaaagctggaggcatcacactacctgacttcaaactatactacaaggctacagtaaccaaaacagcatggtactggtaccaaaacagagatatagatcaatggaacagaacagagccctcagaaataacgctgcttatctacaactatctgatctttgacaaacctgagaaaaacaagcaatggggaaaggattccctatttaataaatggtgctgggaaaactggctagccatatgtaggaagctgaaactggatcccttccttataccttatacaaaaatcaattcaagatggattaaagacttaaatgttagacctaaaaccataaaaaccctagaagaaaacctaggcattaccattcaggacataggcatgggcaaggacttcttgtctaaaacaccaaaagcaatggcaacaaaagacaaaattgacaaatgggatctgattaaactaaagagcttctgcacagccaaagaaactaccatcagagtgaacaggcaacctacaaaatgggaaaaaattttcgcaacctactcatgtgaaaaagggctaatatccagaatctacaatgaactcaaataa

SEQ ID NO: 122686 - DNA, 2040 bp, Homo sapiens
ggaaattaaaaaagaaaactggaaactcaaagaagagcaaaatcctgtatcaggaagccacggaccaaatctgacaaagactgcagtgtggaatgttttgagctacttgtggagtgtaaagaaaaaggcccacttgaccttcactcttagaacatcgtttgtcaagtggaccaagggaggtgtggagggagaggcacgagcgggaaccggggctgcgtgcggcgcttgccggccagctggagttccgggtgggcgtgggcttggcgggccccgcactcggagcagccagccagccctgctggccccgggcaatgggggacttagcacctgggccagtggctgtggagggtgtactgattcccccagcagtggctggcccacctgcgctgtgctcgatttctcgtggggccttagctgccttcccgcggggcagggctcgggaactgcagcccgccatgcctgagcctcccacccactccatgggctcctgtgcagcacaagcctccccgacgagcaccaccctcctactccacggcacccagtcccatcgaccacccaagggctgaggaatgcgagtgcatggcgcaggagtggcaggcatctccacctgcagccccagtgtgggatccactaggtgaaaccagctgggctcctgagttctttgggtccacgctgcttttatgagctgtaacactcactgcgaagatctgcagcttcactcttgagtccagagagaccacgagcccaccggaaggaatgaacaactccagaggcactgccttaagagctgcaacactcactgggaaggtctgcagcttcactcctcctgcatttggtgcacccacaggcttaacaccacctgaaagctgccaagacttagggcttgcaccctctgaagcagaaacctgagctctacttgggtgccttttacctatagctggagctggaggagctgcaatatagtgaacagtggcccgagtatgtgcattgcagtggggtcctgggcctggttcatgaaacctttctttcctcttagacctctgggcataattatagaggccaaaatgtttcataacatgctgtctgccagctggagaaccaggaaagccattggtgtaattcaatcccaatggcctgaggagcaagagtgacaatggtgtcatccaatctgaggccaaaggcctgagaactgggggtagggttgtactagcataagtcttagagtctgcaggctgaggaatcagcacctctgatgtctgtgggtgaattatggtgctcggtttcacagttgtgtacgttagtaggatacatttttgttgtcgtcgtttgggcttggacccttttagccaccgttggagcaactgagatgcaaggcaacaggcccctaggatgcacacagcagggtggccctgggcctggccctcaaaacaatttttccctcctaggcctccaggcctgtgatgggagggattgccacgaaggtctctgacatgacctgcagacattttctccattgtcttggtgatcaacattttatgctccactttctcttcaatgctttgctgcttagaaatttcttgcaccagatcccctaagttatctctctcaagttcaaaggtccacagatctgtatggtgggggccaaataccaccagtctctttgcatagcaaaagtgatctttactccagttcccaacaagttcctcatctccatttgagaccacctcagcctgtatttcattgtccatatcattatcaggattttggtcaaagccattcaacaagtctctaggaagttccatactttcccacatcttcttgtcttctgaactctccaagtttattatttctctggccaggacttccaatactatgatgaacaggtgtggtgggacagggcatcctcatcttgtgccagttttcaaggggaatacattcagcttttgactgtttagtatgattttgtctgtgcttgtagaaatctttgcccagaccaatgtccgggagactttccgcaatatttccttgcaggagtttcat

SEQ ID NO: 122687 - DNA, 395 bp, Homo sapiens; identical to SEQ ID NO: 118244
  misc_feature (1)...(395): n = a,t,c or g

SEQ ID NO: 122688 - DNA, 1743 bp, Homo sapiens; identical to SEQ ID NO: 121396

SEQ ID NO: 122689 - DNA, 1536 bp, Homo sapiens
tcaagacacctgaaaccttatcatgagccagatgctgaggaagagattccaggaggatcccgaggaccccccatttgcagtcatgtcgagactgatgctgaggaggaccccaactgtcacaagcaacacccgttgaacacagccacccacctggggacagatcaagaagctgtcatagatggtggaagaaaacttgtttaggaagattgcattgcagaacgggcagaggtgctgcgcaacgaatcctatggaatcattattgattggtccccttaggggatgtttagcttgaattgcacctctcagtctgcgtgccatggccacactatgttcagctggtctgtcaatggcaatggccagcaaggcattggtggagacgtagagggagacggtgcgcaggtagttgacggaggcacagagcacgtggccatgctcccaggagagctgccgtaccacgtagtagtccatctcgaaggggcagcagatgatggccaccaggaagtcggagatggccaggttggcaatgagcagattggtgaggttgcgcaacttcttatagcgggtgagggcagcgataaagacaaagttaccgatgccgcagaccagcatgatgcctgccagtgcaatgccaatgacgatcttggctgcgaagaaggtccgggtcttggtcatgtcctcatcctcatccatagggaggtcataatcaccataacgtcctggatcctggaaggaggcacaaccagtgggcaacatgcaggagaacatctggtcacattccctgagttccccaagtataggccaaccagacccactgcctaaccagatggaactacccgggatgcggggagaggagacctgagatctgtaagttgggaaaccctccgtggctgcccagctgtcaggaaggacagcataggatggatcagactgtccagaactctcaagaagaatgtgcacctttgccctttgcccaggggccagggcctctttgtctgcccagtcacatcctccagcccccaacacatcagctcccacaggggcttctggaacatttccaaggatgctcccatgagctggccaggctcctacagctgtcacaacgttgtggcacctgttggccagggacaatgaagcaggagggccaggatgctgcggggtcttctctccaaagcaggacaccactccttctgtactgaccaagccatagacttggaaatcaccaagttcactttcacatggacagactgagtcaccctgggccagtgatttatgctctctgagtcctaatcttcctgtaaaccaaattcctgctgcccagtccagtgcctggtgcatagtgggggctagacagacatctgttgagtgcatgaccagggcgctggaaacgactccacatgtgggcgccgcgggatgctgggtagcaaggagatgacccagctgaacaatgcatttggtccactcccctcctcggctttccagccccctaacccaagacaagagggcgcgcgcccgggctgggacaggtcccagccgcat

SEQ ID NO: 122690 - DNA, 760 bp, Homo sapiens
ctgagcaggactgtgaatggtttgtatttacaattcttgcagtaaacaatctgcagcttaagcctgctaaacgttttcactggaaagtgttgccacaaggaccaaatcaacagccaatttggataccatcaagatacctgaaaccttatcataagccagatgccaaggaagagattccggaaggatcccaaggattcccagttgcagccatgtcaagactgacgctgaggaggaccccaactgtcacgagcaacacccatcgaacacagccacccacctggggacagatcgagaagctgccacagatggcggaagaaaacctgaggaaagctggacaaccagtcacaataagtaattggattctccctagaataactaaatttaaaccaattgaaggtgctgagaatgtttttacagatgggtctagcaacggtaaagcttcttattctggctcaaaaggacctttgactgaagggaatcaaatggctgatcgccttgttgctaaagtaatatctaatgctagacactttcacaatttaacccatgttaatgcctctggtctcaaacgcagatacagcattacctggaaagaagctaaagctattatccagcgatgcccaacttgccaaatggtacattcctcatcttttacaggaggagttaatcctcgaggattggaacctaattctcaagctctagctaaatttttctctatacggaatattaaacacattactgatatcccatataattctgaagg

SEQ ID NO: 122691 - DNA, 1354 bp, Homo sapiens
atgggtatttcctgcccagggtcctcaaaaatgcttaatagtcgagcgctccctgtgctgaaactgacccaaggagctctgcgggattgtaaagaacgagcaaactacacaaacttcaacatttacaaggctgtagagagccagggaaagtttgtatgtgttctctataatggacagcaaagccctgaatatgtcatgataccatgtacatctgtgtctccaacaggccaggaagtccctgaggacagaggaatgagaatggtgatgaagaataaacccaataagcctagcaaaatgcagagtctgaaatccagtaagcatctcacaaattctgtcattgttattgctgtaggaattttcttctcggtcactttgcaagccagggacccccagctggatgatgccatagaacagcttagaggagtgtgcattagagcttgggaaaaaatcacttcaggtggagaacaatacccttcctttagtgctataaaacagggaccaaaagaaccatacattgattttatagctcggttacaggagtctcttaaaaagatgattgcagattcggctgctcaggatatagtgttgcagttattagctttcgacaatgctaatcccgattgccaggctgctctgcgacctatcagagggaaagcacatttagttgattgtatcaaggcctgtgatgatattggagatgggtctagtaatggtaaagcttcttattttggctcaaaaagtaaagttttccagacatcctatacttcagctcaaaaagcagagcttgtagcggtaattgaggtattgactgcttttgatatgcctattaatgtgatttctgattcttcatacatggtttattccacacagttaattgaaaatgctcagttacgatttcatacagatgaacaactgatgactttatttacccaattgcaaacagcatttaggagtacaatgcatcctttttacatcactcacattagggctcgctcatacacctcttccaggacctttgactgaagggaatcaaatggccgattgcctagttgctactgcagtatctaatgctagacactttcacaatttaacccatgttaatgcctctggtctcaaatgcagatacagcaatacctggaaagcagctaaagctattatccagcgacgcccaacttgccaaatggtgcattcctcatcttttacaggaggagttaatcctcaaggattggaacctaattctctttggcaaatggatgtcacacatgttccctcgtttgggagactagcttatgtacatgtatgtgtggacaccttttctcactttgtctgggctacatgccaatcaggagagtct

SEQ ID NO: 122692 - DNA, 1822 bp, Homo sapiens
atgggacaagtgtggggtctggtttgttccaccttggaactttttcacactgatgatgaggaggaaggagagtataacgaattaacagaagaggttacagagcaggtttatttgccagctaaagctaaagcggcaaaggagggagaggttcattcctacccttctgcaccccctcattattattttgaagaaaaagagtggcctgaccctccagatctttcttttccagaggacagtgggcgaaaagtagttgcccctggtgactgttcgaccagcgccttgagcgactgctcttagttctattcaggcaggaattcgagcaagctagacaagagggtgatttagaaggcttggcagctccctgttagaatacaccccccagatcaacagggaaatattatagctacatttgagccttttccttttaaattactcaaagaatttaaacaagctattcatactaaaaaagaatgtagaaataatcagcaagtcagctgccagataggggaaaaaagaaaactgctgagtctgaaatatgtccaacatgtaaaaaaggaaaacactgggctaatcagtgtcactctaagtttgataaagaagggaacctgatttcaggaaatgccatgaggggcctgtcctgggccccattccaaactggggcatttccagctcaggccattccctcacacccgtacaatgtctgtcccccgccacagccggtagtgccgcagtagatttatgctgcacaaaagctgtgagccttctacctggggaacccctgcaaaaggtcccaacaggagtctgtggacccttgccagcagggacaataggattacttttaggaaggtctagtttaggtttaaaagggatacaaatacatacaggagtcattgattcaaattacaatggggaaattcaaattgttatatctacttctgtttcctggaaagcagagccgggagagcgcatagcacagctcctgatcgtgccatatgtgggaatgggaaaaagtgaaattaaacgaacaggaggatttggaagcacaaataaacaaggcaaagcagcttattgggtaaatcaaattactgataaacatcctacctgtgaaacaaccattcagggaaagaaatttaaaggtttggtagatacaggagtggacatttcgatcatttctctgcagcactggctgtccacgtggcgaattcaacccactcaatttaacataggacctttgactgaagggaatcaaatggctgatcacctagttgctaatgcaatatctaatgctagacactttcacaatttaacccatgttaatgcctctggtctcaaacacagatacagcattacctggaaagaagctaaaaatattatccagcgatgcccaacttgccaaatggtacattcctcatcttttagaggaggagttaatcctcgaggactggaacctaattcactttggcaaatggatgtcacacatattcccttgtttgggagactagcttatgtacataaaagaagaagaataagaggaggaggaggaggagaaggagaaggagaaggagaaggagaaggagaagaagaagaagaagaagaagaagaagaagaagaagaagaagaagaagaagaagaagaagaagaagaacaagaacaagaacaagaagaacaagaacaagaagaacaagaacaagaagaacaagaacaagaagaaagaagaagaaaagacactgaagagctttcatactctctccccctcaacagaacccaaccatgctggcaccctgattttggacttccagccaccagaactgtgagaagataa

SEQ ID NO: 122693 - DNA, 1764 bp, Homo sapiens
atgggacaggtatggtgtctggtttgtatcaccttggaactttttcacactgataatgaggaggaacaagagtatagcgaagtaacaaaagaggttacagagcatgtttatttaccagctaaagctaaagcggcaaaggaaggagaggttcatccctacccttctgcaccccctccttattattttgaagacaaagaccctccagatctttcttttctggaggacactgggcaaaaagcaggaattcagcaagctagacgagagggtgatttagaggcttggcagttccctgttagaatacaccccccagatcaacagggaaatattatagctacatttgagccttttccttttaaattcgggaaagcacattcagttgattatatcaaggcctgtgatggtatcggaggacctttgactgaagggaatcaaatggctgattgcctagttgctaatgcaatatctaatgctagacactttcacaatttaacccatgttaatgcctctggtctcaaacgcagatacagcattacctggaaagaagctaaagctattatccagcaatgcccaacttgccaaatggtacattcctcatcttttacaggaggagttaatcctcgaggactggaacctaactctctttggcaaatggatgtcacacatgttccctcatttgggagactagcttatgtacatgtatgtgtggacaccttttctcactttgtctgggctacataccaatcaggagagtcttctgcctgtgttagttaaacatccccttttgcagtgttttgtggtggtgggcattccagcttttattaaaacagataatgccccaggctatactagccaagctctagctacatttttctctgtgtggaatattaaacacattaccggtatcccatacaattctcaaggacaagccatagtggaaagaatgaatctctccctaaaacagcagttgcaaaagcaaaaagggggaaacagggactacaggacaccccatagatgcaactgaacctagcattattaactttaaattttctgagcctgcccaaaggccagatgttttcagcagctgaacagcatctacagaaaccagctgcaaagacaaaaacagaacaactgatttggtggagagatctgataacaaaaagttgggaaataggtaaaataataacttggggtagaggttatgcttatatttctccaggacaaaatcaacagccaatttggataccatcaagacacctgaaaccttatcatgagccagatgccgaggaagagactccaggaggatcccgaggacccccccagttgcagccatgtcaagactgatgctgaggaggaccccaactgtcacgagcaacacccgtcaaacacagccatccacctgaggtcagatcaagaagctgtcacagatggcagaagaaaacctgaggaatggtctggaacacggacctggtggagaccctggagctgcagaacctgatgctgtgtgcgctgcagaccatctacggagcagaggcgcggaaggagtcacggggcacgcacgccagggaaggctacaaggtgcagattgatgagtacgattactccaagcccatccaggggcaacagaagaagccctttgaggagcactggaggaagcacaccctgtcctatgtggacgttggcactgggaagctaccaaagaagagacaacatccagcagcagccactcccgcaggactccagggaacaaggatggaatgagaattg

SEQ ID NO: 122694 - DNA, 1284 bp, Homo sapiens
tcagaagtcatcatctaaagaattccattgctcacctcctgcatagcagcacagccccatgaggccacacaccagatggaggggataaaagtacgaggtcatggcttcttgcaagaggctttttcttaaactaaccctgactcttatcttggcctttggcttcccactgcagacagcccttgcaggtccatccaggttggggaagatggttttaaaaggttcattagttaagaaaggccctggggccctgagggaaactcggaaggtagcttctgccctaaggggcttgagcaccaggacgtgtctacgcgggccggcagcgtcagcagcagcaggagcagaaggcaggcaagacccccctggggggccatggtgttcgccggcggctggggacctaggatcacctggggtccagagcccgggaggaggatccccgagaggggcgcaagttgcgatgtccggaagccgacgacggcgtgccgaacccggggtctggggcgcgctgcagtgacaccggcgctgagcacggaggatgcactcatttcctccatccttgcgcttctgtgaaatgggtagagtcctttgtttctcgtatctaaatgtctcacgggctctcctctcaggagcgcgtccccgtgccctccagctgcccgttcctgctgaaagcatccggacagctccccgggccgcggccctggggcccgccagagccctgccttgcaccccgctctcccctctctggcccggagggctgcgccgggcagatcctttcctctgaccagtaggaagtaaggtgaaatagtatgtaacatttctgagaatagtccttggcttctgtggggtggagtagagggaagtagtgaccttaccccggatttctttccttcctactgattggaatgtggatatgatggctgaagcaagagcaacagtcttacacgacaaagtaaaaacatcatattttgctaggactgcctgaacatctggataggcctgtaattctaaaagtgattctaagagattttcatggatgttcaacatggtaagaggaggaaattctttcatcaactctgcccccagagtggacaacctaggatgaggcttggctccttctgcttctttgtcccctctcctctgagtccccagttccccgggaggaatcccaggctgcaggagccagctgactgcaagagctgcactcaaccacttaacaacaggttctgttctacaaggtagtttgccagtgcctagaacctgaaacatttcttcaccttctacattcat

SEQ ID NO: 122695 - DNA, 422 bp, Homo sapiens
tggaacctgcacaggagtggtgaaggggacagtgacacacttcatgctggctgtcctgtcctggtgggagataagtgggtggccaacaagtggatacatgagtatggacaggaattccgcagaccctgcagctccagccctgaagactgaactgttggcagagagaagctggtggagtcctgtggctttccagagaagccaggagccaaaagctggggtaggagaggagaaagcagagcagcctcctggaagaaggccttgtcagctttgtctgtgcctcgcaaatcagaggcaagggagaggttgttaccaggggacactgagaatgtacatttgatctgccccagccacggaagtcagagtaggatgcacagtacaaaggaggggggagtggaggcctgagagggaagtttctggagttc

SEQ ID NO: 122696 - DNA, 2544 bp, Homo sapiens
atgggtcctggggcgcggctggcggcgctgctggcggtgctggcgctcgggacaggagacccagaaagggctgcggctcggggcgacacgttctcggcgctgaccagcgtggcgcgcgccctggcgcccgagcgccggctgctggggctgctgaggcggtacctgcgcggggaggaggcgcggctgcgggacctgactaggtgcaatgatgaaacaataacatacctgttagataagaggttgactgttctcactgcagctaacatcccctactcgtctccggaaaacggtgcgaagagaaggcgccaagacgccttccctccaatacactacaatacccaggacgctttgctacaatacctctccggggttggctggggggcgcctccagctgcgcaagcgcatagggatgcgccctttgtggactccattgcgcaggtgctgttgcgcacttccggtggaagcgctgaagcgagtgggtggagtttacggagccggtgggcggtaggcggtgctacgggtagctgggtgctgtccaaaggcgacagggcgtcgttaggggagcgagtcgtgaccggttgggccacactcaacgtgggacgaagcttcgcctactgtttgactacgtgcgtgcagcctcccctcgatgtcggccctcgaaaagagcatgcacctcggccgccttccctctcgcccacctctacccggcagcgggggcagtcagagcggagccaagatgcgaatgggagaaggaaacagaagaccaagtcagagcctgagagatttgaagatgctgtgttgcttgccggctttaaagtggaggaagaacctgtccagagacctaggaggaaagaatggtttcagggcccaagcccagggcactgctgccctgctcagcctcaggactctgcaccttgtatcctggctactcatgctccagccagggctcaaaatgccccaggcacagcttgggccgctgctctagagggcacaagcactgtaagccttgaccacttccatgtggttggtgtagtggttgtatcaggaggtgagatcattctactcctttctttcagattctacgacaaggtactttctttgcatgaggattcaacaacccctgtggctaaccctctgcttgcatttactctcatcaaacgcctgcagtctgactggaggaatgtggtacatagtctggaggccagtgagaacatccgagctctgaaggatggctatgagaaggtggagcaagaccttccagcctttgaggaccttgagggagcagcaagggccctgatgcggctgcaggacgtgtacatgctcaatgtgaaaggcctggcccgaggtgtctttcagagagtcactggctctgccatcactgacctgtacagccccaaacggctcttttctctcacaggggatgactgcttccaagttggcaaggtggcctatgacatgggggattattaccatgccattccatggctggaggaggctgtcagtctcttccgaggatcttacggagagtggaagacagaggatgaggcaagtctagaagatgccttggatcacttggcctttgcttatttccgggaacagagctcctcaccagcaacggaacaaagctggatggagaatgactttgatgagttgagagaagaaggcttcagacgatcaaactactccgagctacaggaggaaattcgaaccaatggcaaagaagttaaaagctttgaaaaaaaattagacgaatggataactagaataaccaatgcagagaagtccttaaaggacctgatggagctgaaaaccaaggcacgagagctacgtgacgaatgcagaagcctcagtagccgatgcaatcaactggaagaaagggtatcagtgatggaagacgaaatgaatgaaacgaagcgaggagagaagtttagagaaaaaagaataaaaagaaacgaacaaagcatccaagaaatatgggactatgtgaaaagaccaaatctacgtctgattggtgtacttgaaagtgacagggagaatggaaccaagttggaaaacactctgcaggatattatccaggagaacttccccaatctagcaaggcaggccaacattcaaattcaggaaatacacagaacgccacaaagatactcctcgagaagagcaactccaagacacataattgtcagattcaccaaagttgaaatgaaggaaaaaatgttaagggcagccagagagaaaggtcgggttacccacaaagggaagcccattagactaacagctgatctctcagcagaaactctacaagccagaagagagtggggaccaatattcaacattcttaaagaaaagaattttcaacccagaatctcatatccagccaaactaagcttcataagtgaaggagaaataaaatcctttacagacaagcaaatgctgggaggttttgtcaccaccaggcctgccctacaagagctcctgaaggaagcactaaacatggaaaggaacaactggtaccagccactgcaaaaacatgtcaaattgtaa

SEQ ID NO: 122697 - DNA, 1248 bp, Homo sapiens
atgcaaagaggccagcaggccacgggtagctctgccaatgcatggggcatcttgcagccaaagtgggtacaaacaggcccagataataagaggatggccaggaatgtcttgaaatatgaaaggctcttggcagagagccccaaccacgtggtagctgaggctgtcatccagaggcccaatataccccacctgcagaccagagacacctacgaggggctatgtcagaccctgggttcccagcccactctctaccagatccctagcctctactgttcctatgagaccaattccaacgcctacctgctgctccagcccatccggaaggaggtcatccacctggagccctacattgctctctaccatgacttcgtcagtgactcagaggctcagaaaattagagaacttgcagaaccatggctacagaggtcagtggtggcatcaggggagaagcagttacaagtggagtaccgcatcagcaaaagtgcctggctgaaggacactgttgacccaaaactggtgaccctcaaccaccgcattgctgccctcacaggccttgatgtccggcctccctatgcagagtatctgcaggtggtgaactatggcatcggaggacactatgagcctcactttgaccatgctacgtcaccaagcagccccctctacagaatgaagtcaggaaaccgagttgcaacatttatgatctatctgagctcggtggaagctggaggagccacagccttcatctatgccaacctcagcgtgcctgtggttagggtagtacagtgcctggcacatcctgagcattcgataatcaatgccagaatgcagcactgttttggtggaacctgcacaggagtggtgaaggggacagtgacacacttcatgctggctgtcctgtcctggtgggagataagtgggtggccaacaagtggatacatgagtatggacaggaattccgcagaccctgcagctccagccctgaagactgaactgttggcagagagaagctggtggagtcctgtggctttccagagaagccaggagccaaaagctgggggagggaaaggagaattagatgctgaccctgcccctagaaatggagcagaccctcaaatcatcatgaaaccatgtggccacgagtggagacatgaacaggctgcattaagaggctcccctcacccctggaagtttcatgggaaggagggacttgagcaaatcttgaagatgagcagggtccctagaggctga

SEQ ID NO: 122698 - DNA, 1162 bp, Homo sapiens
tgcctggctgaaggacactgttgacccaaaactggtgaccctcaaccaccgcattgctgccctcacaggccttgatgtccggcctccctatgcagagtatctgcaggtggtgaactatggcatcggaggacactatgagcctcactttgaccatgctacgtcaccaagcagccccctctacagaatgaagtcaggaaaccgagttgcaacatttatgatctatctgagctcggtggaagctggaggagccacagccttcatctatgccaacctcagcgtgcctgtggttagggtagtacagtgcctggcacatcctgagcattcgataatcaatgccagaatgcagcactgttttggtggaacctgcacaggagtggtgaaggggacagtgacacacttcatgctggctgtcctgtcctggtgggagataagtgggtggccaacaagtggatacatgagtatggacaggaattccgcagaccctgcagctccagccctgaagactgaactgttggcagagagaagctggtggagtcctgtggctttccagagaagccaggagccaaaagctgggcttgatggagaaaggtttcctactgggctccgcagcaagacttcccacctcggggctttgtgtcctgttctgtgtgcatcgcaaaacttcaagttcagacagttggcaaatgccatcaaggaaaggggtcccaatccagacctgaagagagggttcttggatctcactcaagaaagaattcagggcgagtccacagtgcaaactctgaaggatggctatgagaaggtggagcaagaccttccagcctttgaggaccttgagggagcagcaagggccctgatgcggctgcaggacgtgtacatgctcaatgtgaaaggcctggcccgaggtgtctttcagagagtcactggctctgccatcactgacctgtacagccccaaacggctcttttctctcacaggggatgactgcttccaagttggcaaggtggcctatgacatgggggattattaccatgccattccatggctggaggaggctgtcagtctcttccgaggatcttacggagagtggaagacagaggatgaggcaagtctagaagatgccttggatcacttggcctttgcttatttccgggtaagggagtaa

SEQ ID NO: 122699 - DNA, 467 bp, Homo sapiens
  misc_feature (1)...(467): n = a,t,c or g
tggacggccgacccacgcgtgcggcttgtagccggtgcgcggagtggctggggctacgtgctgagctgtcgcggagccggaacagcagcggtgaagcccctcggctcggccgagaccgccgtgcccactgctcgcctcggatgccgccgctttagccgcagccgctgctgccgccgccgggggagaggcagcctattgtctttctccgcggcgaaggtgaggagctgtctcggctcggcccgcgggggagccccgggagccgcacggatatagaagacttagatcactatgagatgaaagaagagcctgttagtgagaagaagttggaggatgaaggaactgaaaaagaaaattgggcaatattagagaaaattaggaagactgaaaggcaaggccatttaaatgttgttcctgacagcatctcanaggatggtgtcctctggcttactctctggggaatgctgctc

SEQ ID NO: 122700 - DNA, 417 bp, Homo sapiens
tttcgtgcggccccagccccagagagtgggggtgagtctgtgtttggtgagacccaccgggccctgcagggggccatggagaagctgcagcgactttatggaaggagaaggtggacctgaaggagcgggtagagaaactagagcttcaattcatccacctctcaggacagacagacaccatagggagaaagtacatcagccagggggcagtgtcagagacgcagcactgggagaggaggacatcgtcaggctggcccaggaccaggaggagatgaaggtgaacctgcaggagctgcggggcaggtgttgcagcttgtgggagaccacaaggaggggcatggcaaattctgaccattgcccagaaccctgctgatgagcccactctaggagccccaatagcccaggagcttgggtgtg

SEQ ID NO: 122701 - DNA, 433 bp, Homo sapiens
agcagcggtgaagcccctcggctcggccgagaccgccgtgcccattgctcgcctcggttgccgccgctttagccgcagccgctgctgccgccgccgggggagaggcagcctattgtctttctccgcggcgaaggtggcatttttcaactccgctggagccaatgcccaggaggaacaaagggtgtgctgccagcccctggctcacccagtggcctcgtcccagaaaaagccagaggtagcggccccagccccagagagtgggggtgagtctgtgtttggggagacccaccgggccctgcagggggccatggagaagctgcagcgactttatggaaggagaaggtggacctgaaggagcgggtagagaaactagagcttcaattcatccacctctcaggacagacagacacccataataaaatatcatattaaa

SEQ ID NO: 122702 - DNA, 2772 bp, Homo sapiens
atgtcagaaaaaacacaacaggggaaattggccgcagccaagaaaaagttaaaagcatattggcagaggaagagccctggcattccagcaggagctaacaggaaaaagaaaatcaatggcagtagccctgacacagccacttctggtggttaccactcacctggggattcagcaacaggtatctacggggagggccgtgcatcctctactaccctggaggatctggagagccagtaccaagaactagcagtggccctggattcaagctccgcaataatcagtcaactcactgaaaacatcaattcactggttcgcacatctaaggaggagaagaagcatgagatacatctggtacagaagcttgggaggagcttgttcaaactcaaaaaccagacggctgaacccctggccccagagcccccagcagggccatctaaggtagagcagctacaagatgagaccaaccacctaaggaaggagctagagagtgtgggaagacagctccaggctgaggtggaaaacaatcagatgttgagtctcctgaacaggagacaggaggagaggctacgtgaacaggaggagaggctacgtgaacaggaggagaggcaacgtgaacaggaggataggctacatgaacaggaggagaggctacgtgaacaggaggagaggctgtgtgaacaggaggagaggctgtgtgaacaggaggagaggctacgtgaacatgaggagaggctgtgtgaacaggaggagaggctacgtgaacaggaggagaggctgtgtgaacaggaggagaggctacgtgaacatgaggagaggctgtgtgaacaggaggagaggctatgtgaacaggaggagaggctacatgaacaggaggagaggctacgtgaacaggaggagaggctgtgtgaacaggaggagaggctacgtgaacatgaggagaggctgtgtgaacaggaggagaggctacgtgaacatgaggagaggctgtgtgaacaggaggagaggctacgtgaacaggaggagaggctgtgtgaacaggaggagaggctacgtgaacaggaggagaggctgtgtgaacaggagaagctgccagggcaggagaggctgctggaagaggtggagaagctgttagaacaggagaggcggcaggaggagcaggagaggctgctggagagggagaggctgctggaagaggtggagaagctgttagaacaggagaggcagcaggaggagcatgagatgctgctggagagggagaggctgctggaagaggtggagaagctgttagaacaggagaggcggcacgaggagctcgagacgctgctggagagggagaggctgctgtactcgaccccggagttcatcatctcggagccgctggccaatatgtactcatgtgggaaccagaacacactgatggaggagttggcagagcaggcacagcagcacgacgagatgctgcacatgcaccacgcgctgaaggaggcgctcagcatcatcggtgacatcaacaggaccactgttaccatgcccccgcccgtggacgacacctggttgcaggtgcagagcatccctgacgcacacaggccagaggcttcccctgatccctttgggccctacccccctggtgctcttgtgccccagccggggtccccagtgtgccgagtggctgcacgccccagatccatgcggcacgtgccggccgggcccggtgggtctccccaaacacagactcacccccactctctggggctggggccgctacctctggcttcttctgggactttgttcctcctgggcactggctccagcggagttgaaaaatgccacctgaagacaagaggactaaaggcctcttggcacatacaccaccccttgaatttccagttcaccaccaccagcccggacagtgaccacattctcatcaaagtgcaaatttctattcttatccccacttctgccaaccctaaacctactttaagtcgcttatacggcataggagccaaaatagcagggacacatcttatagaatcctttgaaatgcatttcattactttctcacctcctccacctccttctacactctctctcaacgaaaccgctgttcttccttcaaccaaggataaaatcaagcacttgttcgcggcgcggactccacaccgcggccgcccgccccaggggaggagtgagtccgccccagcggcgccaacccggggacccggggcaagggttcggggccatccgccgccgggcgcgccccccatccggaaagcggcgacggcccccaagttgggctgcggagtgggaggcgcgccgagccccaagcagacaatgcgggagaagggtgatgcgcagggaggaggggtccgcaaagctgaggtccccgcgccgcccggctacccatccgtgccgcccgcccctgaagccccgcgcagcccccgaccctcctactgggcccgccccaccgagcggccgcaggggacgggccgcgtccgcaccccgacccctcctcaaatcacaaaacttcccccaactccgccaactaagttgcgctctcaccgtgcggctcccggggctcccccgcgggccgagccgagacagctcctcaccttcgccgcggagaaagacaataggctgcctctcccccggcggcggcagcagcggctgcggctaaagcggcggcaaccgaggcgagcaatgggcacggcggtctcggccgagccgaggggcttcaccgctgctgttccggctccgcgacagctctgcacgtag

SEQ ID NO: 122703 - DNA, 473 bp, Homo sapiens
ttcgttaacctcttcgagatccctgtccgtgtggtggaattcggggctacgtgcagagctgtcgcggagccggaacagcagcggtgaagcccctcggctcggccgagaccgccgtgcccattgctcgcctcggttgccgccgctttagccgcagccgctgctgccgccgccgggggagaggcagcctattgtctttctccgcggcgaaggtgaggagctgtctcggctcggcccgcgggggagccccgggagccgcacgaatgggacaacagaagaagtgacttcaaaagaagacgaagaggaagagatggatgaagatatagaagacttagatcactatgagatgaaagaagagcctattagtgagaagaagttggaggatgaaggaactgaaaaagaaaattgggcaatattagagaaaattaggaagactgaaaggcaaggccatttaaatgtgttgaccctgatagtcc

SEQ ID NO: 122704 - DNA, 383 bp, Homo sapiens
cacttgttcgcggcgcggactccacaccgcggccgcccgccccaggggaggagtgagtccgccccagcggcgccaacccggggacccggggcaagggttcggggccatccgccgccgggcgcgccccccatccggaaagcggcgacggcccccaagttgggctgcggagtgggaggcgcgccgagccccaagcagacaatgcgggagaaggctctgcacgtagccccagccaccccgcgcaccggctacaagccgcccgggggtggccggggcacgcaagagggcagtaacgtctgcgagtcctcccgtgagtacacgcggagcaagggctgcgagctgggattgcacggcagagctgcccatcccgctccacgagaccaata

SEQ ID NO: 122705 - DNA, 4584 bp, Homo sapiens
atgggcagctctgccgtgcaatcccagctcgcagcccttgctccgcgtgtactcacgggaggactcgcagacgttactgccctcttgcgtgccccggccacccccgggcggcttgtagccggtgcgcggggtggctggggctacgtgcagagctgtcgcggagccggagcagcagcggtgaagcccctcggctcggccgagaccgccgtgcccattgctcgcctcggttgccgccgctttagccgcagccgctgctgccgccgccgggggagaggcagcctattgtctttctccgcggcgaagccaatcgtgtttaaggagaaactaacaatgaaaacggactcgttgatggaggaaaagttggaatgcagcctctggtgctgtttgagcgatccctctaccccgggtcgctgctgtgttctggaaaggcgcattgtaccctggatgcagcagctgctagcgaatataaagcaggcagaaaaacatgaaaagaaccacccggaggtgactgtggccatggctctgactgacatagacctgcagctgcagttctccatgtcccaacccgaagccctccttctcctggcagcaggcccagctgaccacctcctgctgcagctctactctggacacctgcaggtcaggcttgtcctgggccaggaggagctgaggctgcagaccccagcagaaattctactgagtggctccgtcccccacaccacagttctgactgtctcagaggactggcccacattgtcagtcaatgggtttctgaatgcctcctctgtagtcctgggagcccccctagaagtcccctatgggctctttgttgggagcactgggagacttggcctgccctacctgaggggaaccagccatcccctgaggggttgcctccatgcagccgctctcaatggccgcagactcctccagcctctgacccccaataagcatgagggctgtgctgaagagttttctgccaatgatgatgtggccctgggcttctctgggtcccactctctggctgccttgcctgcctggggcactcaggatgaaggaaccctggagtttacactcaccacacagagctggcaggcacccttggccttccaggcagcaggctggcatggggacttcatccatgtggacatatttgagggccacctgtggtccatggttgagaagggccagggtactgtattgctcctcaacagtgtgcctgtgactgacgcacagccccacaaggtcagcatccacatcaacattcaccagctagaaatctccatggaccagtaccccacacgaactgaggagtcctcagctacctggagccacgaacaccgctcaggcctgacaccaggggctgccaatgcctccctgctgggctggctgcatggaagacctcagtgtcaatggctagaggcaggggctgtgggaagccttgctgacgcacaacatggtggctggctgcagactggaggagctgctatcagcgcagtggtggtgaccgagggtggcacagcctggcttgagtggtggcatgtgcagcccatgctggcactgatggaggctgaactgcgtaaatcccaggcccgcttcatccacgatggccctgaggacacctctgaccagctggtgctggaggtgtcagtgatggcttggttgcccatgccctcatgcctgcggaggggccaaacagacctcctgcccatccaggtcaaccctgtcaatgacccaccccacatcatcttcccacatggcagccttatggtgatcctggaacacacacagaagcctctggggcctgaggttctccaggcctatgacctggactctgcctgtgagggcctcaccttccagctccttggcaccccctctggcctccccgtggagcaccgagaccagcctggggagccggtgactgagttctcctgctgggagttggaggccggcagcctagtctatgtccactgtggtggccctacacaggacttgacattccgggtcagcaatggactgcaggccagccccccggccatgctgaaggtggtggctgtccagctggccatacaaatccaccgcagcacagggctgcatctggcccagggctctgccatgcccatcttgcctaccaacctgttggtggagaccagcgccgtggggcaggatgtgaccgtgctgttccgtgtcaccggaggcctgccgttcagggagctgcagaagcagggggctggtgggcactacaccgaggacaccgtggagaacctggatctgcaggtgcaggtgagctggaaaatcctgagcaatctgtccttcctagtgaccatccagagagccactgtgtggatgctgcagctggagccactgcacactcagaacacccagcaggaggccctcaccacagcccacctggaggccaccctggaggaggcaggcccaagccccccaaccttccactgtgaggtggttcaggctcccaggaaaggcaactttcaactacagggcacgatgctgtcagacggtcagggcttcacccaggatgacgtacaggctgcagaggtgacctatggggccatggcacatgcctcagtggcagtggaggacaccttctgtttccatgtcacagctccaccatatttctccccactctgtaccttctccatccatattggcggtgacccagacatgcctgtcctcgtggtgcccgagggtggtgggtgtgtcctctctgctgaccagctcttcatcaagagtctcaacagtgccaggtacctctatgaggtcatggagcagccccgccatgggaggttgacttggcgtgggacacaggacaagatcactatggtgacatccttcaccaatggagacctgatgcatggccagctgaccatcagctgcgtcttccacgtggcctggggtaggtggcggctgctgactacagacaacatggccttcagcaatgctgattcgggctttgctgaggcccagctggtgctgacccaccaggacctcctctctggcagtatcatggccacggatgagcccatgcagcccatctgccgcttcatccaggaggggcctcaggaagaggcgagtcctgtgtccgatgggcagcaccaggccatcacggtgctggaggtgcaggccttggagccttacctctgtgtggccaatggctccggcctcatggttcctcaaggaggccagggtaccatcaacatggccgagctccacctgggcaccaacctcaacatctgcagtagggatgaggcccactaccacgtcacagacagccctcactggggacagttgctccaagccactcagccagccacagccttctctcagcaggacctgctggttggggctgttttctatggccacaatggcagcctcagctcccgcaacaccctggccttctcaatggatgtgggaccagtgcacacagatgccaccctacaagtgaccattgccctagagggcccagtagccccactgaagctggcccagcacaaggagatctacatcttccagggagaggcagctgagatcagaagggaccagctggaggtagcccaggaggcagtgccgccagcagacatcgttttctcagtgaagagcccaccgagtgccggctacctggtgatggtgctgcgtggcatcttggcagatgagccacccagcctggaccccgtgcagagcttctcccaagaggcagtggacacaggcaggatcctctacctgcactcccgccctgaggcatgccttctcgctggatgtggcctcggcctgggtgctccccttgaggacgtcacgtggagctggaggtgctggagccaccccggcatggggccctgcagaaggaggatgggcctcaagccaggaccctcagcaccttctgctggagagaggtacggctgtggaagagcatctgatccagtacctgcacgatgggagcaagacactgacggttttgtcctgatggctaatgcctctgagatggaccgccagagccatcctgtggccttcactgtcaccatcctgcctgtcaatggccaacccccgacctcatacaaactcaggcctgcagaggctctgaggagcatggatggttactctgggcccaaggacctggtgtacaccattaagcagcccagcaatgggtgggtagtgcagtgggcggtgccgggcactgagagtccgtccagccactcagcagccagagcctcagagccagcaggcaccgacccccagctcctgctctaccatgtggtgcggggcctccagctaggccggctcttccacgcccagcatgacagcacaggggaggacctggtgaacttcactcaggcagagaccccggagttcatcatctcggagccgctggccaatatgtactcatgtgggaaccagaacacactgatggaggagttggcagagcaggcacagcagcatgacgagatgctgcacatgcaccacgcgctgaaggaggcgctcagcatcatcggtgacatcaacaggaccactgtcaccatgcccatgcccccgcccgtggacgacacctggttgtcagagcatccctga

SEQ ID NO: 122706 - DNA, 542 bp, Homo sapiens
tgtgccgagtggctgcacgccccagatccatgcggcacgtgccggccgggcccggtgggtctccccaaacacagactcacccccactctctggggctggggccgctacctctggctttttctgggacgaggccactgggtgagccaggggctggcagcacaccctttgttcctcctgggcactggctccagcggagttgaaaaatgccaccatggcctcccggctctccaggtcccctgggatgttcggcatgggccgaggcgcctcctgctcactgtccagatgtcctcctccatctccgtgcggctcccggggctcccccgcgggccgagccgagacagctcctcaccttcgccgcggagaaagacaataggctgcctctcccccggcggcggcagcagcggctgcggctaaagcggcggcaaccgaggcgagcaatgggcacggcggtctcggccgagccgaggggcttcaccgctgctgttccggctccgcgacagcacgaagtggtcgactcggcaaatccgaaccggtacgtcagt

SEQ ID NO: 122707 - DNA, 1037 bp, Homo sapiens
tgcaaatttctattcttatccccacttctgccaaccctaaacctactttaagtcgcttatacggcataggagccaaaatagcagggacacatcttatagaatcctttgaaatgcatttcattactttctcacctcctccacctccttctacactctctctcaacgaaaccgctgttcttccttcaaccaaggataaaatcaagcacttgttcgcggcgcggactccacaccgcggccgcccgccccaggggaggagtgagtccgccccagcggcgccaacccggggacccggggcaagggttcggggccatccgccgccgggcgcgccccccatccggaaagcggcgacggcccccaagttgggctgcggagtgggaggcgcgccgagccccaagcagacaatgcgggagaagggtgatgcgcagggaggaggggtccgcaaagctgaggtccccgcgccgcccggctacccatccgtgccgcccgcccctgaagccccgcgcagcccccgaccctcctactgggcccgccccaccgagcggccgcaggggacgggccgcgctccgcaccccgacccctcctcaaatcacaaaacttcccccaactccgccaactaagttgcgctctcaccgtgcggctcccggggctcccccgcgggccgagccgagacagctcctcaccttcgccgcggagaaagacaataggctgcctctcccccggcggcggcagcagcggctgcggctaaagcggcggcaaccgaggcgagcaatgggcacggcggtctcggccgagccgaggggcttcaccgctgctgttccggctccgcgacagctctgcacgtagccccagccaccccgcgcaccggctacaagccgcccgggggtggccggggcacgcaagagggcagtaacgtctgcgagtcctcccgtgagtacacgcggggcaagggctgcgagctgggattacacggcagagctgcccatcccgctccacgagaccaatagtaaggcacctgggcggggcgctcaggttgctaa

SEQ ID NO: 122708 - DNA, 2370 bp, Homo sapiens
atgggcagctctgccgtgcaatcccagctcgcagcccttgctccgcgtgtactcacgggaggactcgcagacgttactgccctcttgcgtgccccggccacccccgggcggcttgtagccggtgcgcggggtggctggggctacgtgcagagctgtcgcggagccggagcagcagcggtgaaggccctcggctcggccgagaccgccgtgcccactgctcgcctcggttgccgccgctttagccgcagccgctgctgccgccgccgggggagaggcagcctattgtctttctccgcggcgaaggtgtcagatgaactgaaggataatggaaacaatagcaaatttatcttctcagtcacctgtgagtcttcctttgagagtgggacttgcagagtacttggagatggaggaggacatctggacagtgagcaggaggcgcctcggcccatgccgaacatcccaggggacctggagagccgggagccgcacggtggcatttttcaactccgctggagccagtgcccaggaggaacaaagggtgtgctgccagcccctggctcacccagtggcctcgtcccagaagaagccagaggtagcggccccagccccagagagtgggggtgagtctgtgtttggggagacccaccgggccctgcagggggccatggagaagctgcaggtgacgactttatggaaggagaaggtggacctgaaggagcgggtagagaaactagagcttcaattcatccacctctcaggacagacagacaccatagtgagcgagaggctagggcaccgctggggggagctgccaggccatccgaggggccccagcatctgagccatgtcctcctgcaggaaagtacatcagccagggggcagtgtcagagacgcagcactgggagaggaggacatcgtcaggctggcccaggaccaggaggagatgaaggtgaacctgcaggagctgcggggcaggtgttgcagcttgtgggcgaccacaaggaggggcatggcaaattttgaccattgcccagaaccctgctgatgagcccactctaggagccccagtagcccaggagcttgggtgtgctgacgagcagggtggcttttatcctagatcaccactggattgctgacagatagaggaggtgggaccctgactatcacccctaatctgcagtggatttggctctcggcactcccaggctgggagctggatacctgccctggcagcatggctcagactgcatgacaggtacggcgtgcccaggatgatgtgcccaggcctctggccacctgagtccagccccccacacaaccccctccaagctcccagcccctacaccataaaccatgagctctgtgccctctctgatggttccacatctgccaccttgggcatggagcctgttgtaagagcccccaggctcagccatggagaccttgagcagtggcactgagtcctgtggctggcagggagggaagtgagacagccagcagcacaaggacagaaagaggaaagagcaaggctgcagctctagaagggaggtgcaggcagcctggctctgaggctccaggtatgccccctgtgtggagctggggcagcggggcaggcagaccattcatgcagcaggcagtgaggcatgtacctaccatggctgatgctcctcaggggccactgatagtgattctgaaagacagcatcaaatcacatggcaggtcccatgcatgggtggggcaggcctgggggtggcggacacacgcacacgccagattgtgcacacacatgctgtgaggccccacggcccgcatgcacactctaacacatgcccacaaacaacacgcatacgttgtcctcttcgccacctcccggtgcccagaaccctcaccagccggcacgtgccgcatggatctggggcgtgcagccactcggcacactgaagcacatgcgtgggcagagtcacaacacagatgctcacccgcacacagaggcatttgcaccagctccctgcacactcgtgcctggcgtgctcagaggaccacccatcctgctcagggagacagggcttgctcactaatgtccggctgtcatttctccacctaagagccttccatggctccctactgcctacagcgttgaatcccaacaagtcatactctttggactttgaaggttctccaccctgtgcgctggacttggagccccttggagtatggcttttcacacgggcttctataccgcttcgactggaagatccacctccccactgccttttctcactcagatggggacaccgaggtccagaggaaaagacacctgtcaaatgtcacagatctgggaggggacttaagaattatcatgccaagagg

SEQ ID NO: 122709 - DNA, 482 bp, Homo sapiens
ctaactctcatctgcccaaaaaaacttctcctttttatttaatttacatctgagttattctaacaatataacaatgattttaggtctctcttttagctgtggacgaaatgcacatgagcttacccaagatgaagaaggacatttactgggacgattctgctgctcgcccaccatacacattggcagctgctgactactgcataccctcatttctggggtcaacagtccagatggggtaagtgcatttttaaaaaatctctaatattttccagcctgagcaacatagtgagaccttgtctctataaaaaaaaaaagaaataaaataatttaaagtagccaactgtgatgtcacctgtagtcctagctacttggggaggctgcagttggaggattgcttgagcccaggggttcaaggctgcagtgagctgtgattgtgccattgcactccagcctgggtgacaaagtgaagccctgtctcaaga

SEQ ID NO: 122710 - DNA, 2104 bp, Homo sapiens
atggcctttatgctaagtcctttgctcaaacgctatacctggaacagcgcctggctgtattacgcgcgtatttttattgcgctttgtggaaccacagcgtttccgtggtggctgggtgatgtaaaactgacgattccgctaacgctggggatggtggcagcggcgctgaccgatctcgatgaccgactggcgggacgtttgcgtaacctcatcattacgctgttctgcttttttatcgcctcggcctcagtagaattgctgtttccctggccctggctatttgcgattggcttaacgctctctaccagcggcttcattttgctcggcggtctgggtcaacgctatgcaacaattgccttcggtgcattgctgatcgccatttacactatgttgggaacatcactgtatgagcactggtatcagcagccgatgtatctgctggccggtgccgtctggtacaacgaaatgaatcgataccgctcttggtgcagcctcttattcggttatgactgggttgggattccgctggtttacacccaggttgtcactcttgctgtctataccttcttctttgcgtgcctgattggacgccagtttttggatcccaccaaaggctacgcagggcatgacttggatctttacattcccatcttcaccctcctacaattcttcttctatgcaggatggcttaagggcagtgcgccgctgcaactttcacaaccgcatcacacggcttatatcatctttacctctggctccaccggcaggccgaaaggggtaatggtcgggcagacggctatcgtcaaccgcctgctttggatgcaaaatcattatccgcttacaggcgaagatgtcgttgcccaaaaaacgccgtgcagttttgatgtctcgcaattctttgccgaatatggcgtaacgaccacgcactttgtgccgtcgatgctggcggcatttgttgcctcgctgacgccgcaaaccgctcgccagagttgcgcgacgttgaaacaggttttctgtagtggtgaggccttaccggctgatttatgccgcgtatggcaacagttaactggcgcaccgttgcataatctatatggcccgacggaagcggcggtagatgtcagctggtatccggcttttggcgaggaactggcacaggtgcgcgggcagcagtgtgccgattggttatccgggctatctcggacgccccgatctgacacgccagccgctttattgccgatccttttgccaccaggtgaacggatgtaccgtaccggagacgttgcccgctggctggataacggcgcggtggagtacctcgggcgcagtgatgatcagctaaaaattcgcgggcagcgtatcgaactgggcgaaatcgatcgcgtgatgcaggcgctgccggatgtcgaacaagccgttacccacgcctgtgtgattaaccaggcggctgccaccggtggtgatgcgcgtcaattggtgggctatctggtgtcgcaatcgggcctgccgttggataccagcgcattgcaggcgcagcttcgtgaaacattgccaccacatatggtaccggtggttctgctgcaacttccacagttaccacttagcgccaaggcggggtgccccgctgcccaagtgccccgggtggcccaggtccgcgtgtgcgcggttctggaggatctgggtgacatcagagaatcagagggagaaaggaaacaggaggcagacgctgtgctgggcactcaggacacaccccgagtgacctcacagcccaatggcctcctgttgaagatagagccccaggagaatgtgaagattgaggggcagcaccagggcctggtgtggctgtgtgtggccgcgtcgccggtcctcgtccgcgtgacaagggagaaagaagagaaaaagaaagaagagggcaataacatgaggtttacctcgttggtattgtctgttttggtaaatattgtgcgtgcacttgaaaagaaggtgttggatataatgttcaacaattgtcgtaccggggtccaggccattacgttatctcatcggcgtgctctagcaattgcaattgcattggctcgctatattaaatcggcgctatacgatggca

SEQ ID NO: 122711 - DNA, 1526 bp, Homo sapiens
gttttatgacaacagatgaaaggaaattattcaaccacctcaagtctcctcatctgaaatattgggttccattcatctggtttggaaatcttgcaactaaagcccggaatgaaggtagaatcagagacagtgttgatctgcaatcattgatgactgaaatgaatcgataccgctcttggtgcagcctcttattcggttatgactgggttgggattccgctggtttacacccaggttgtcactcttgctgtctataccttcttctttgcgtgcctgattggacgccagtttttggatcccaccaaaggctacgcagggcatgacttggatctttacattcccatcttcaccctcctacaattcttcttctatgcaggatggcttaaggtagcagagcagcttatcaacccttttggagaagatgatgatgattttgaaactaactggtgcattgacagaaatttgcaggtctctcttttagctgtggacgaaatgcacatgagcttacccaagatgaagaaggacatttactgggacgattctgctgctcgcccaccatacacattggcagctgctgactactgcataccctcatttctggggtcaacagtccagatggggctgtctgggtccgactttcctgacgaggagtggctgtgggattatgagaagcatggccatcggcattccatgataagaagagtcaagcggttcctgagtgcccacgaacacccctccagccccagaagaagaagctacaggaggcagacaagtgacagctccatgttcttaccccgagatgacctcagcccagccagggacctactggatgtgccctcaagaaacccccccagggcctcacccacctggaagaaatcctgcttcccagaaggaagccccacgctgcacttcagcatgggagagctgtccaccatcagggagaccagccagacaagcactttacagagcctgaccccacagtccagtgtgagaacttcccccatcaaaatgccactggtacctgaggtattgatcacagcagccgaagcaccagtgcccacatcagggggctaccaccatgattccgctacctccatcttgagctctgagtttacaggggttcagccaagcaagactgagcagcagcagggccccatgggatccatcctgtctccctcagagaaggagacacctcctggaggccccagtccccagacagtttcagccagcgctgaggaaaatatattcaactgtgaagaagaccctggtgatacctttctaaaaaggtggagtcttccgggattcctggggtccagccacacttccctgggaaacctaagtccagaccccatgagctctcagccagctcttttaattgacacagaaacatcctcagagatcagtgggatcaacattgtggctggctctcgagtctcttctgatatgctgtatttaatggaaaacctggacaccaaggaaacagatatcatagagctgaacaaggaaactgaggaatcacccaaatga

SEQ ID NO: 122712 - DNA, 397 bp, Homo sapiens
aaaacctgatcttcaatttggaacttttggatttcatcagtgcagttggccatgagcaagtcgacctggacacctgctggctgtcagaaaggcctaagctggctcccgatgcagaggacagcaagctcttgccagagccccgggcttttccagaacagtgtgtggtggatgcagctctggagtacgttcccggcgctcaccagtttggtctcacacaaaacagccatttcatcttgccttttaatcagtcggctgtcagaaagaagctctcggttgagctaagcatccgcacgttcgcctccagcggcctgatttactacatggctcatcagaaccaagcagactacgctgtgctccagctgcacgggggccgcctccacttcatgtttgaccttgg

SEQ ID NO: 122713 - DNA, 642 bp, Homo sapiens
tcacctggtctccttggaactgctgcgcagccgccagtaaaacggctctgcacggatgtgctgccggacggtggcggcatccagcaggaagtcgggggcctggtagtaaaccccctcggtcgtgcccctcaagttactctgagaaaccacacgcagaagaggctgatcggagcccagcgttactggggtcctcacgtagtcctccagctctgagcagaggtgggacagcccggagcagaagcacgggctgcagcccagggggttgtctgcgcggagagcgaaggtgccctctcgacattcgttgcactgaggaccaaagacattttccaagatatttgcttttaggtcttgttccatgtcaacaatggtgctggcaggataacagctgcatatgagcccaaaaccgccactgtgctctgcatgaagatgtttcttagagaaaggcagccgccagttgtggacgtgctgtttctgtagcaccagccatgggaggaatgcagacttttcaaaggcagctcctgggcagctgggctcagaagaggcacctgcccgtctcagcggcagtgcacgtgcaccgagaacctctttgctgggctgtgggtggtctttggtttcatgtttcataatagcttcaaggttcat

SEQ ID NO: 122714 - DNA, 1673 bp, Homo sapiens
atgcacagtacctggctctgtttcccagcaaggctcttgaaagagctgccctttcctcagggactgtttcctcgtttaaccatccggtcagcctcccgcacacccccagctgctcttgagagagttactcgagacccctgtgcagctacatgtttagacagaggatctcttaaaggaattctcggccactccccctttcaaagccctcctgtgacttcccactgtgccgaaaatccaaacaccctcaaagcccctcctccctatgttggagccacatctgccctggtgctgtccctgggtggtccagtgacaccgtggctctcggttgagctaagcatccgcacgttcgcctccagcggcctgatttactacatggctcatcagaaccaagcagactacgctgtgctccagctgcacgggggccgcctccacttcatgtttgaccttggcaaaggcagaacaaaggtctctcaccctgcactgctcagtgatggcaagtggcacacggtcaagacagactatgttaaaagaaaaggcttcataactgtcgacggccgagagtctcccatggtgactgtggtgggagatggaaccatgctggatgtggagggtttgttctacctaggaggcctgccctcccagtaccaggccaggaaaattggaaatatcacccacagcatccctgcctgcattggggatgtgacggttaacagcaaacagctggacaaggacagcccggtgtctgccttcacggtgaacaggtgctacgcagtggcccaggaaggaacatactttgacggaagcggatatgcagctcttgtcaaagagggctacaaagtccagtcagatgtgaacatcacactggaagtttcgaacctcctcgcagaatggcgtcctcctggggatcagcactgccaaagtggatgccattggactagagcttgtggacggcaaggtcttgttccatgtcaacaatggtgctggcaggataacagctgcatatgagcccaaaaccgccactgtgctctgtgatggaaaatggcacactcttcaagctaacaaaagcaaacaccgtatcactctgattgttgatgggaacgcaggttggcgctgaaagtcccacacaccccagtctactccagtggacaccaaccaatcccatttatgttggtggctaatcctgctggtgtgaagcaaaaatgcctgcgcagccagacctcgttccgcgggtgtttgaggaagctagctctatttaagaggcccgcaggtgcagtcctttgacttcagcagagcgttcgaactgcacggagttttccttcattcctgtcctgggaccgagtcctgaacttcaagcagaatcctcagttggaatcattgctcaatattttgaggagaagtgtatgtgtgaattaagaatctcttcagttcatatttcatttccaactcaggttaagtgtttctggggagagatgttgtgtttcacgttacactaaaaccacatgtgcaacaaatacctccattaaatggtctaaaatgtaaattgaattccctggctctctttttaaacgtatttttaaaaaaatctttatacacattgaatgttctgttgattacttgatagtattttatgttcctcattttgagctttttaaaaaagtatcaaaaaagatgat

SEQ ID NO: 122715 - DNA, 915 bp, Homo sapiens
ctattcctcctcctcctcttcctcctcctcctcctcttcctcctcctcctcctcttcctcctcctcctcaccctcctcttctccatctataactgtttcacggctttcatattctctgggctgttcccctgtgtctttcggcttttgcccgagaggtttattgggccctgaatgcactcttgtctgagtaaaaactgtcacgttgaggcctgagagtggagcgcaggcttctgcctgtggggaggaccagtggtccagacacccagagactggagacacctgaagatctcgctgtgtcctaaacacactgttgcccagtctgctttctttctgcaccacattcacttccaattcgagagtgcctggtgctgccagctcgcagggctgcagggatcccacggggtaaggagatgctcttatggggtcctcactgctgactcgggactccacgttccaggccgggcgtcttcccgcatctgtgtgcttgcagctactgaggactgtcacagcctgggtccctcctggggtcaacaatatctttcttgtacttgctactgagaaagctgttgtgaatgttggcatgctggcagattttaagaaacacctttcacactcttgcacaacatctactgaggcagacatgcatccacgacactggctgtttgctacaggcactgtgtgactgcttgtcaggcttccagtgaggcgtctgcatcctggctctaacgtcgacttaagcgtcgagcgagcccacgtctgatggattgtctctgaggatatttctgactgggccccgtcccagggtttctggttcggcaggtctgggtgatgcctacgcactgcatttctaacaagcttccagcgatgctgctggcctggagaccatgttcggagaccacctagattacacaacat

SEQ ID NO: 122716 - DNA, 525 bp, Homo sapiens
tcacacatttccaaccttctcatcatcgccgcatcttgtaatgatgatccagccatcgtcgtcatctcctcctcctcctcttcctcctcctcctccttcttcttcctcctcttcctcttcctccttctcctcctcctcttcttcttttttttttgtagcgatgaagccttgccagcttgggtaatagcccattaaggccccaccatacggcaggtcccgaggtccggtccggtgctcagcaagaacgaggaatacggacaagtggagggtgagcaaggccaagaggagctctactgggcccataggaccgcttagtggacacgctcgatgggtagctcgtctccacaaccagggtgtaccaatgtgagtgtcagctatcagcagagagtagaccctggagtggatagctcctctccacaggtaggtcatcctcagctttgctccaagatcagagcaggtgccgctatgggttgggggagcttccggggcccctgagagtacagagatgcctgggtccgcagccat

SEQ ID NO: 122717 - DNA, 471 bp, Homo sapiens
tcagccttgcaaagtgctgagatggaccacaggatcaaccaccacaccagccatcgtcgtcatctcctcctcctcctcttcctcctcctcctccttttcctcctcctcttcctcttcctccttctcctcctcctcttcttctttttttttgtagcgatgaagccttgctgtgttgccacactggtgttgaacttttttttgtgatatttgcttattgcagtggtctgaaactgaacctgcaatatctccaaggtatgcatcatcatcaggtctgaatgggtttcctctaccccgcacaccacctgcatatgcataaataccaagttctggcatccatttcaacccgtcactcgcaatcaagccgagcacgaccaccacactggtgcgcacacccacgacgcaccaccacagcagaagaccaaccatcacgacacaaagcagcaccaccgcaccgagccgactgcaccccat

SEQ ID NO: 122718 - DNA, 476 bp, Homo sapiens
cggtggctccatcctggcctcactgtccaccttccagcagatgtggattagcaagcggagtacgcacgagtcgggcccctccatcgtccaccgcaaatgcttctaaacggactcagcagatgcgtagcatttgctgcatgggttaattgagaatagaaatttgcccctggcaaatgcacacacctcatgctagcctcacgaaactggaataagccttcgaaaagaaattgtccttgaagcttgtatctgatatcagcactggattgtagaacttgttgctgttacttgctttgagttggaagcggtttgcatttacgcctgtaaatgtattcattcttaatttatgtaaggtttttttttgtacgcaattctcgattctttgaagagatgacaacaaattttggttttctactgttatgtgagaacattaggccccagcaacacgtcattgtgtaaggaaaaataaaagtgctgcc

SEQ ID NO: 122719 - DNA, 849 bp, Homo sapiens
  misc_feature (1)...(849): n = a,t,c or g
tccgcaaagacctgtacgccaacacgggcgctgtcgggcggcaccaccatgtacccgggcattgctgacaggatgcagaaggagatcaccgccctggcgcccagcaccatgaagatcaagatcatcgcacccccagagcgcaagtactcggtgtggatcggtggctccatcctggcctcactgtccaccttccagcagatgtggattagcaagcaggagtaccgacgagtcgggcccctccatcgtccaccgcaaatgcttctaaacggactcagcagatgcgtagcattctgctgcatcgggttaattgagaatagaaatttgcccctggcaaatgcacacacctccatgctagcctcacggaaactggaataagccttcgaaaagaaattgtccttgaagcttgtatctgatattcagcactgggattgtaggaacttgttgctgattttgaaccttgtatttgaagttaactgtttccccttggtatttgttttaattacccctggtaacaaatctttgaggttcaacctttagtacggtgtgggcttggtcacttcgtgggctaaaggtaagaacggtgcttggtggaagacaaagtctgtgggcttgggtgagtctggtgtggccagcagcctctgatctgtgcagggtattaacgtgtcagggctgagtgttctgggatttctctagaggctggcaagaacccagttggtttgtctttggggtctgtcagggttggaaagtccaagccgtaggacccagtttcctttcttagctgatgtctttggccagaacaccgtgacctgtacttgctttgaggtggaggcgnttcatttacgcccggaa

SEQ ID NO: 122720 - DNA, 1379 bp, Homo sapiens
tcaacacccctggccatgtacatggccatccaagctgtgctgtccctctacacctctgggcgcaccactggcattgccatggattctggagatggggtcgcccacacggtacccatctatgagggctacaccctcccccatgccatcctgcatctggacctggctggctgggacctgactgactacttcatgaagatcctcatggagtgcagctaccgtttcaccaccatggctgagcaggagattgtgtgtgacatcaaggagaagctgtgcaatattgccctggacttcgagcacaagatggccactggcgcatcctcctcctctctggagaagagctacgaggtgcctgatggccaggtcatcaccatcggcaacgagtggttctggtaccggaggcactgtttcagccttccagggcatggaatcttgtggcatccaagagaccaccttcaactccatcatgaagtgtgatgtggacatctgcaaagaactgtatgccaaaatggtgctgtccagtggcaccaccatgtatctgggaattgccgacaggatgcagaaggagatcacggcccttggccgcccaagcacattaagattcagattcatcgcacccccaggaggcgcaagtactcggtgttggatcggtgggctcaatcctggcctcactgtccaccttccagcaggatgtggatttagcaagcaggaagtacgacgagtcggggcccctccatccgtccaccgcaaattgcttctaaacggactcagccagatgccgtagcatttgctggcatgggttaattgagaatagaaatttgcccctgggcaaatgcacacaccttcatggctaagcctcacggaaacttggaataagccttcggaaaaaggaaattgtccttggaagctttgtatctggatatcagcactgggattgtaggaacttgttgctggattttgaaccttgtatttgaagttaactgttccccttgggtatttaacgtgttcaggggctgagtgttctgggatttcttctaggaggctgggcaagaacccagttgtttttgtcttgcggggtcttgtcagggtttggaaaagtccaagccgtagggaccccagtttcctttcttaagctgatgtcttttggccaaaaccccggtgggctgttaattgcttttaagttgggaagcggtttgcatttacgcctgtaaatgtattcaatcctaaattaaggtaaggttttttttgtacgcaattctcgattctttgaagagatgacaacaaatctttggttttctcctagttatgtgagacacattagggccccagcgggctcgtctttgtgtaaggaaaaataaaagtgctgccgtcccccaaaaaaa

SEQ ID NO: 122721 - DNA, 392 bp, Homo sapiens
catgtccactatgccgaggcaatcactggaaggtgcactgccccagcggacgaaggttccctaggtcagaagcccccaaccagatgatccaacaacaggacagagggtgcccggggcaagcgccagctcatgtcatcaccctcactgagccccgggtacgtttaaccattgagggccaggaaactgacttcctcctggacactggcgcggccttctcagtgttaatctcctgtcctggacgactgtcctcaaggtctgttaccatccgatgaatcctgggacagcctgtaaccaggtatttctcccacctcctcagttgtaattgggagactttgctcttttcacatgcctttcttgttatgcctgaaagtcccacacccttattagggagg

SEQ ID NO: 122722 - DNA, 567 bp, Homo sapiens
tcacccagtaggacttgttaccagtgtggtttgcaaggacacttttaaaaagattgtccagtgagaagccgccccctcgtccatgtctgctatgccaaggcaatcactggaaggtgcactgccccagaggacaaaggttctctgggtcagaagcccccaaccagatgatccagcaacaggattgagggtgcctgacgactgagaacatactatacgccgtgcatacgccttggggaagtctgctgtgacatctaagccgccaccgccatacccggctcggtccaggctgaatgtgaggcgtttgtgctctcttgcgaccaactgagtatagagacacgctgtacgagaatctctggcatgcagctgacgcagtgtttggaggtttgtttctcgccaccagatgcccaccgaagaggagtgggaaaggtctataatcagcattctggctttactattataaatgttggagaagcgggggcaggcagattcaaatgctagctcataaatgatgatgccacaagcatcatctttgtatatagagctcttttcctccactgaagcagcatg

SEQ ID NO: 122723 - DNA, 377 bp, Homo sapiens
agatgtcccctatggttgtgacaaagatgaaggaaattgcagaagcctaccttgggaagactgttaccaatgctgtgctcacagtgccagcctactttaatgactcagcatcaggctaccaaaaagatgctagaactattgctggtctcaatggacttagaattagcaatgagccaactgctgctgctattgcttatggcttaaaccaaaaggtttatgaaggcgagcgtgccgtgagcaaggataacagcctgcttggcaagtttgaactcacgggcatacttcctgtgacagtgctcctcacactgaagtcacttgacactgatgctagtgacatcctcagtgtctctgctgtggacaaaagtataggaagctgg

SEQ ID NO: 122724 - DNA, 423 bp, Homo sapiens
atggtttttgatgccaaacgtctgattgcacacagatttgatgatgctgttgtccagtctgagatgaagcattggcccttcatggtggtgaatgatgctggcaggcccaaggtccaagtggaatacaagggagagagcaaaagcttctatccagagaaggtatcctctatggttctgacaaatatgaaggaaattgcagaagcctaccttgggaagactgttacccatgctgtggtcgcagtgccagcttactttaatgactctcagcgtcaggctaccaaagatgctggaactattgttggtctcaatgtacttagaattattaatgagccaactgctgctgcttatggcttagacaaaagacacagatcctcactacctattctgacagccagcctggtgtgctggttcaggtttatgaag

SEQ ID NO: 122725 - DNA, 1662 bp, Homo sapiens
atggacactaaacagttgattggtgatgccgcaaagcatcaagttgcaatgaaccccaccaacacagtttttgatgccaaacgtctgattggacgcagatttgatgatgctgttgtccagtctgatatgaagcattggcccttcatggtagtgaatgatgctgacaggccccaggtccaagtagaatacaagggagagaccaaaagcttctatccagaggaggtatcctctattgttctgacaaagatgaaggaaattgcagaagcctaccttgggaagactgttaccagtgctgtggtcacagtgccagcttactttaatgactctcagtttcaggttaccaaagatgctggaactattgctggtctcaatgtacttagaattattaatgagccaactgttgctgctattgtttacaaaagttcagacaaaaaggttggagcacaaagaaacgtgcttatctttgacctggggggtggcactttcggtgtgtcaatcctcactattgaggatggaatctttgaggtcaagtctacagccagagacaaccacttgggtggagaagattttgacaaccgaatggtcaaccattttattgctgagctcaagcgcaagcataagaaggacatcagtgagagcaagagagctgtaagatgcctccgtactgcttgtgaacatgctaagcgtactctctcttccagcacccaagtcagtattgagatcgattctctctatgtaggaattgacttctatacctccattacctgtgcccagtttgaagaattgaatgctgacctgttctgtggcaccctggacccagtagagaaagcccttcgagatgccaaaccagacaagtcacaaattcatgatattgtcctggcagccatcctgtctggagacaagtctgaaaatgttcaagatttgctgctcttggacgtcactcctctttcccttggtattgaaactgctagtggagtcatgaccatcctcatcaactgtaataccaccattcctaccaagcagacacagaccttcattacctattctgacaaccagcctggtgtgcttattcaggtttatgaaggtgagcgtgccatgtccaaggataacaacctgcttggcaagtttgaattcacgggcatacctcctgaaccccaaggtgttcctcagattgaagtcacttttgacattgatgccaatggtatcctcagtgtctctgctgtggacaaaagtacaggaaaagagaataaaattactatcactaataataagggccatttgagcaaggaagacattgaacctgaagatgagaagcagagggacaaggcgtcatccaagaattcacttgagtcctatgcattcaacatgaaagcaactgtcgaagatgagaaacttcaagacaagattaatgatgaggacaaacagaagattctggacaggtgtaatgaaattatcaactggcacaataagaatcggactgccaagaaggaagaatttgaacatcagcagaaagagctggaggaactttgcaacccaatcatcaccaagctgtaccagagtgcagaaggcatgccaggaagaatgcctgggggattccctgttggtggagctcctccttctggtggtgcttccttagggcccaccatcgaagaggttgattaa

SEQ ID NO: 122726 - DNA, 1452 bp, Homo sapiens
atggtgaatgatactgacaggcccaaggtccaagtagaatacaagggagagaccaaaatcttctatccagaggaggtgtcctctatggtcctgacaaagatgaaggaaattgcagaagcctaccttgggaagactgttaccaatgctgtggtcacagtgccagcttactttaataactctcagcatcaggctaccaaagatgctggaactattgctggtctcaatgtacttagaattatcaatgagccaagtgctgctgatattgcttacggcttagacaaaaaggttggagctgaaagaaatgtgtttatctttgacctgagaggtggcacttttgatgtgtcaatcctcattattcaggatggaatctttgaggtcaaatctggagacacccacttgggtgaagaagactttgacaaccgaattgtcagccattttattgctgagttcaagcataagtataagaaagacatcaccattcgagatgtcaaactagacaagtcacagattcatgatattgtctctattggtggttatactcatatccccaagattcagaagcttctccaagacatcttcaatagaaaagaactgaataagagcatcaaccttgatgaagctgttgcttatggtgcagctgtccaggcagccatcctatctggagacaaatctgaaaacgttcaagatttgctgctcttggatgtcaatcctctttcctttggtattgaacttgctggtggagtcatgactgtcctcctgtcctcatcaagcatagtactaccattcctaccaagcagacagagaccttctgacagcctatctattctgacaaccagcctggtttatgaaggtgagtgtgctatgaccaaggatgacaacctgcttgacaagtttgaactcacaggcataccttctgcaccccatggtgttcctcagattgaagtcacttttgacattgatgccaatggcatcctcaatgtctctgctgtggacaagagtgtaggaaaagagaacacgattactaccactaatgacaagcaccgtttgagcaaggaagacatgaacatatggtccgctgagaagtacaaagctgaagataagaggcagagggacaaagtgtcatccaagaattcacttgagtcctatgcattccacatgaaagcaacagtcaaagatgagaagcttcaaggtaagattaatggtgaggacaaacagaagattctggacaagtttaatgaagttatcaaatggctggataagaatcaggctgctaagaaggaagaatttgaacatcagcagacagagctggagaaagtctgcaatctcatcattagcaagcggtaccagagtgcaggaggcatgcctggaggaatgcctgggggattccctggtggtggagctcctccctctagtggtgcttcctcaaggcccatcactgaagaggttgattaa

SEQ ID NO: 122727 - DNA, 1388 bp, Homo sapiens
gaaaccggtctcattgaactcgcctgcagctcttgggttttttgtggcttccttcgttattggagccaggcctacaccccagcaaccatggtccaaggggacctgcagttggtattgatcttggcaccacctactcttgtgtgggtgttttccagcacggaaaagtccgagataattgccaatgtatcagggaaaccgaaccactccaagctatgtcgcctttacggacactgtaacggttgatcggtgatgccgcaaagaatcaagttgcaatgaaccccaccaacacaagtttttgattgccaaacggtctgattggacggcagatttgattgatgctgttgtcccagtctgatatgaaacattgggccctttatggtggtgaatgatgctggcaggcccaaggctccaagttagaataccaagggagagaccaagagccttgtatccagaggagggtgtctttctatgggtctgaccaaagatgaaaggaaatttgcagaagccttaccttggggaagactgttaccaatgcttgtggtcacagtgcccagtttactttaatgactctccagcgtcaggctaccaaagatgctggaactattgctggtctcaatgtacttagaatttattaatgaggccaactgctgctgctattgctttacggcttagacaaaaaaggtttggagcagaaaagaaaccgtgctcatcttttgacctggggaggtggcactttttgatgtgtcaatcctcactattgaggattggaatctttgaaggtcaagtctacagctggagacacccacttgggtgggaggaagattttgacaaccgaatggtcaaccattttattgctgagtttaagcgcaagcataagaaggacatcagtgagaacaagagagctgtaagacgcctccgtactgcttgtgaacgtgctaagcgtaccctctcttccagcacccaggccagtattgagatcgattctctctatgaaggaatcgacttctatacctccattacccgtgcccgatttgaagaactgaatgctgacctgttccgtggcaccctggacccagtagagaaagcccttcgagatgccaaactagacaagtcacagattcatgatattgtcctggttggtggttctactcgtatccccaagattcagaagcttctccaagacttcttcaatggaaaagaactgaataagagcatcaaccctgatgaagctgttgcttatggtgcagctgtccaggcagccatcttgtctggagacaagtctgagaatgttcaagatttgctgctcttggatgtcactcctctttcccttggtattgaaactgctggtggagtcatgactgtcctcatcaagcgtaataccaccattt

SEQ ID NO: 122728 - DNA, 2130 bp, Homo sapiens
acgatatctcaactggataggaacaccaactaaaggtatgtctctgaaagcctttgttcaacaaccccataaaagctactggctgaaaaccttacttccagacaacatggaagccctgcaaatcaggaagtaagtacccaatattttaggaacctgtgctgtctcatggctgaaaggcccttgttcagatgttgcggtaaagaaattttttattttttccttgggtaactactgggaagggaattagctaatatgagaacatggttacaaggtatggtaacactccaactcttatctagagcctatttctccagcacaaaccccaaagaaaaggaccaccagttacttttccactttgctctgccttaggcttagatcatgcctaagctttctaaagagaattgagtgctatgaggtcaactaccaacccttggatgaggaactggacaggtaagagccagcaccccaaagtcaaggtctagatctttcacccagttttgatatcctgtaggatcacatccagagccgcacagtctactacctcatgaatatccatgtcacacctcgctccatctacctttgccgacatggcgagagtgaactcaacatcagaggccgcatcggaggtgactctggcctctcagttcgcggcaagcaggtagggtgggccacacacacccagatgggttggctgggctgtcctaggtgggctgcaggcttcccaattctgccctcccgaccttatcccaacgcaggtgtcacactggcagcccctgtccccactcatgacagtgtccttcctgccctccccactagggcaggcggccaggatgagacagagccaggactgaaagccgggcctactggcctgccctcagctcccccactggagatggggggaggtgccccaggcaaggcactatcctggatggccacaccctggtgtctccctttctgttacgtcgaggtagctctcacttgcgcagcacccactgtgtaccaggctgtggtctgggtgctccccatccactatctaaagtgcagcccccagacagcaggccagatgagacaatgctctttggatatgaggccagagaggggcagggatgtgtccgagggcacaagggaccatgtaagggagctgagggagtttaacctatggctcatacctccctgtcaagggctccttccgaccagtcacatgaagaggaccatccagacagctgaggccctgggtgtcccctatgagcagtggaaggccctgaatgagattgatgcggtgagatgcatggggtgaatctcctgtgtgtgggggtgacttgagtctgggattatcccactgcgagaccaagataaatatcgctaccgctatcccaagggagaggtaaggtttgcggggtggcctaatgcctaggactactccccagtgtcttcattgcaactgaatgtatctgttgatctgccaccaggcgtctatgcggtgcctcctggcctatttcctgataaaaagttcaggtactaccctcatctctgctttgggaatgtttgatggtatttgagacactgaccccaacaattagatatctatatcttagtagttaagagaagagtatctagaacaaggatgcctaggttcagattctttctctttcacatactagctgtactgcctttcacaaatttctttaacttctctggcctcagtgtcctcatctgtaaaatggggagaataatgatgaattttaaataaacataagtaaaaagtttagaacagttcatgacacattgtgtgggctatatattaactgctattattagtatagtattattcttagctaacattttcaaagccaacgttaacagtctgcctcaatctggaaaagatgagctagtatttctgtgaagcatgctaccatcaggtgatagtagggcctttcatagcttcatgatcctgattacaagtttctgtccttgctataggggtaatttccccaagatagtgatgttttcattttaaattgtttttcaaatgataatttatttttaaaaaaatatgtaggcattgcatttacagagtatttacacactgactgcataggctgaactgcaaactggggcagctggcctggc

SEQ ID NO: 122729 - DNA, 206 bp, Homo sapiens
  misc_feature (1)...(206): n = a,t,c or g
acttgggagctgaaaatgtccggagtgtccacgacttccacgtggnacttgtcnccactgcggctgcccgtggtgnaggccctggttacagacgtggcccccagcctggagaagaaccgtagacattttcttcatctgtcgccatcttccttcctcccatgcttacctttcctggtgacaggctctgaagttggccacaagaagcc

SEQ ID NO: 122730 - DNA, 413 bp, Homo sapiens
gcaattctttgaagaaagtcattggtagcttgatggggatggcatttaatctataaattaccttgggcagtatggccattttcacgatattgattcttcctacccacgagcatgaaatgttcttccatttgtttgtatcctcttttatttccttgagcactggtttgtagttctccttggccatcagagaaatgcaaatcaaaaccacaatgagataccatctcacaccagttagaatggcaatcattaaaaagtcaggaaacaacaggtgctggagaggatgtggagaaataggaacacttttacactgttggttggactgtaaactagttcaaccattgtggaagtcagtgtggtgattcctcaggaatctagaactagaaataccatttgacccagccatcccattactg

SEQ ID NO: 122731 - DNA, 5976 bp, Homo sapiens; identical to SEQ ID NO: 119514
  misc_feature (1)...(5976): n = a,t,c or g

SEQ ID NO: 122732 - DNA, 1734 bp, Homo sapiens
gaacgcagctcctcaccagcaacggaacaaagctggatggagaatgactttgatgagttgagagaagaaggcttcagacgatcaaacttctccgagctaaaggagaaagttcgaacccatcacaaacaagataaaaaccttgaaaaaaggagctggttttttgaaaagatcaacaaaatcgatagacctctagcaagactaataaagaagaaaagagagaagagtcaaataaacgcaataaaaaacgataaaggggatatcactgccgatcccacagaaatacaaactaccatcacagaatactataaacacctctatgcaaataaactagaaaatctagaagcaatggataaattccttgacacatacaccctcccaagaataaaccaggaagaagttgaatctctgaataggccaataacaggctctgaaactgaggcaataattaatagcttaccaaccaaaaaaagtccaggaccagatggattaacagctgaattctaccagaggtacaaggaggagctggtaccattccttctgaaactattccaatcaatagaaaaagagcgaatcctcccgaactcattttatgagggcatcatcctcctgataccaaagcctggcagagacaacacaaaaaaagataattttaaaccaatatccctgatgaacatggatgcaaaaatcctcaataaaatactggcaaaccgaatccagcagcacatcaaaaagcttatccaccatgatcaagtgggcttcatccctgggatgcaaggctggttcaacatatgcaaatcaataaatgtaatccagcatataaacagaaccaaagacaaaaaccacatgattatctcaacagatgcaggaaaggcctttgacaaaattcaacagcccttcatgctaaaaactctcaataaattaggtattgatgggatgaatctcaaaataataagagctatttatgacaaacccacagccaatatcatactgaatagacaaaaactggaagcattccctttgaaaactggcacaagacagggatgccctctctcaccactcctattcaacatagtgttggaagttctggccagggcaatcaggcaggagaaggaaataaagggtattcaattaggaaaagaggaagtcaaattgtccctgtttgcagatgacatgattgtatatctagaaaaccccatcgtctcagcccaaaatctccttaagctgataagcaacttcagcaaagtctcaggatacaaaatcagtgtgcaaaaatcacaagcattcttatacaccaataacagacaaacagagagccaaatcatgagtgaaatcccattcccaattgcttcaaagagaataaaatacctaggaatccaacttacaagggatgtgaaggacctctttaaggagaactgcaaaccactgctcaaggaaataaaagagaacacaaacaaatggaagaacattccatgctcatggatagaaagaatcaatattgtgaaaatggccatactgcccaaggtaatttatagtttcaatgccatccccatcaagcacccaatgactttcttcacagaattggaaaaaacaactttaaagttcatatggaaccaaaaaagagcccgcatcaccaagtcaatcctaagacaaaagaacaaagctggaggcatcacgctacctgaattcaaactatactacaagactacagtaaccaaaatagcatggtacgggtaa

SEQ ID NO: 122733 - DNA, 1675 bp, Homo sapiens
tgcaatcaaactagaactcaggattaagaatctcactcaaaaccgctcaactacatggaaactgaacaacctgctcctgaatgactactgggtacatagcgaaatgaaggcagaaataaagatgttctttgaaaccaacgagaacaaagacacaacataccagaatctctgggacacattcgaagcaaaaagcaagagcaaacaacattcaaaagctagcagaaggcaagaaataactaaaatcagagcagaactgaaggaaatagagatacaaaaaacccttcaaaaaattaatgaatccaggagctggttttttgaaaggatcaacaaaattgatagaccactagcaagactaataaagaaaaaaagagagaagaatctaatagacgcaataaaaactgataaaggggatatcaccaccaatcccacagaaatacaaactaccatcagagaatactacaaacacctctacgcaaataaactagaaaatcgagaagaaatggataaattcctcgacacatacactctcccaagactaaacgaggaagaagtcgaatctctgaatacaccaataacaggctcagaaattgtagcaataatcaatagcttaccaaccaaaaagagtccaggaccagatggattcacagccgaattgtaccagaggtacaaggaggaactggtaccattccttctgaaactattccaatcaatagaaaaagagggaatcctccctaactcattttatgaggccagcatcattctgataccaaagccaggcagagacacaaccaaaaaagagaattttagaccaatatcgttgatgaacattgatgcaaaaatcctcaataaaatactggcaaaaggaatccagcagcacatcaaaaagcttatccaccatgatcaagtgggcttcatccctgggatgcaaggccggttcaatatacgcaaatcaataaatgtaatccagcatataaacagaaccaaagacaaaaaccacatgattatctcaatagatgcagaaaaagcctttgacaaaattcaacaaccctttatgctaaaaactctcaataaattaggtattgatgggacgtatttcaaaataataagagctatctatgacaaacccacagccagtatcatactgaatgggcaaaaactagaagcattccgtttgaaaactggcacaagacagggatgccctctctcaccactcctattcaacatagtgtttgaaattctggcccgggcaattaggcaggagaaggaaataaagggtattcaattaggaaaagaggaagtcaaattgtccctgtttgcaggcgacatgattgtatatctagaaaaccccattgtctcagcccaaaatctccttaagctgataagcaacttcagcaaagtctcaggatacaaaatcaatgtgcaaaaatcacaagcattcttatacaccaataacagacaaacagagagccaaatcatgagtgaactcccattcacaattgcttcaaagagaataaaatacctaggaatccaacttacaagggatgtgaaggacctcttcaaggagaactacaaaccactgctcaaggaaataaaagaggatacaaacaaatggaagaacattccatgctcatgggtaggaagaatcaatatcgtgaaaatggccatactgcccaag

SEQ ID NO: 122734 - DNA, 2142 bp, Homo sapiens; identical to SEQ ID NO: 118316

SEQ ID NO: 122735 - DNA, 1245 bp, Homo sapiens; identical to SEQ ID NO: 120483

SEQ ID NO: 122736 - DNA, 1785 bp, Homo sapiens
cttcagtagctgatttgatcaagtggaagaaagggtatcagtgattgaagatcaaatgaatgaaatgaagcgagaagagaagttcagagaaaaaagagtaataagaaatgaacaaagcctccaagaaatatgggactatgtgaaaagactaaatctgcatctgattggtgtacctgaaagtgactgggagaatggaaccaagttggaaaacactcttcaggatattatccaggagaacttccccaatctagcaaggcaggccaacattcagattcaggaaatacagagaatgccacaaagatactcctcgagaagaacaactccaagacacataattctaaatgcccacaagagaaagtaggaaagatataaaattgacaccctaacatcacaattaaaagaactagagaagcaagagcaaacatattcaaaagctagcagaaggcgagaaataactaagatcagagcagaactgaaggaaatagagacacaaaaaacccttcaaaaaatcaatgaatccagaagctgttttgaaaagatcaacaaaattgatagactgctagcaagactaataaagaagaaaagagagaagaatcaaacagacgtaataaaaaatgataaaggggatatcaccaccgatcccacagaaatacaaactaccatcagagaatactataaacacctctacacaaataaactagaaaatctagaagaaatggataaatttctggacacatacaccctcccaagactaaaccaggaagaagttgaatctctgaatagaccaataacaggctctgaaattgaggcaataattaatagcctaccaaccaaaaaaagtacaggaccagacagattcacagccgaattctaccagaggtacaaagaggagctggtaccattccttctgaaactattccaatccatagaaaaagagggaatcctccttaattcattttatgaggccagcaccatcctgataccaaaggctggcagagacacaacaaaaaaagagaattttagaccaatatccctgatgaacattgatgcaaaaatcctcaataaaatactggcaaaccgaatccagcagcacatcaaaaagcttatccactacaatcaagtcagctttatccctgggatacaaggctggttcaatatatgcaaatcaataaatgtaatccagcatataaacagaaccaaagacaaaaaccacacgattatctcaatagatgcagaaaaggcctttgacaaaatccaacagcccttcatgctaaaaactcttaataaactaggtattgatgggacgtatctcaaaataatgacagctatttatgacaaacccacagccagtaccatactgaatggacaaaaactggaagcattccctttgaaaactggcacaagacagggatgccctctctcaccactcctattcaacatagtgttggaagttctggccagggcaatcaggcaggagaaagaaataaagggtattcaattaggaaaagaggaagtcaaattgtccctgtttgcagacgacatgattgtatatttagaaaaccccattgtctcagcccaaactctccttaaactgataagcaacttcagcaaaatctcaggatacaaaatcaatgtgcaaaaatcacaagtattcccatacaccaataacagacaaacagagagccaaatcatgagtgaactcctattcacaattgcttcaaagagaataaaatacgtaggaattcaacttacaagggatgtgaaggacctcttcaaggagaacta

SEQ ID NO: 122737 - DNA, 5130 bp, Homo sapiens; identical to SEQ ID NO: 116418

SEQ ID NO: 122738 - DNA, 1461 bp, Homo sapiens
atgggagactttaacaccccactgtcaacattagacagatcaacaagacagaaagttaacaaggatacccaggaattgaattcagctctgcaccaagtgagcctaacagacatctacagaactctccaccccaagtcaacagaatatacattcttctcagcaccacatcgcacttattccaaaattcaccgcatagttggaaaaataccaactaccatcagagaatactgtaaagacctctatgcaaataaagtagaaaatctagaagaaatggataaattcctcgacacatacaccctcccaagactaaaccaggaagcagttgaatctctgaatagaccaataacaggctctgaaattgaggcaataattaatagcctacaaccaaaaaaagttcaggaccagatgaattcaaagccgaattctaccagagtgttggaagttctggccagggcaatcaggcaggagaaagaaataaagtgtattcgattaggaaaagaggaagtcaaattgtctctgtttgcagatgacatgattgtatatttagaaaaccccattgtctcagcccaaaatctccttaagctgataagcaacttcagtaaagtctcaggatacaaaatcaatgtgcaaaaatcacaagcattcttatacaccaataccagacaaacagagagccaaatcatgagtgaactcccattcacaattgcttcaaagagaataaaatacctaggaatccaacttacaagggatgtggaagacctcttcaaggagaactacaaaccactgctcaatgaaataaaagaggacccaaacaaatggaagaacattccatgctcatggataggaagaatcagtatcctgaaaatggccatactgcccaaggtaattgatagattcaatgccatccccatcaagctaccaatgactttcttcacagaattggaaaaaactactttaaagttcatatggaaccaaaagagagcccacattgccaagacaatcctaagccaaaagaacaaagctggaggcatcatgctacctgacttcaaacaatactacaaggctacagtaaccaaaacagcatggtactggtaccaaaacagagatagagaccaatggaacagaacagagccctcagaaataataccacacatatacaaccatctggtctttgacaaacctgacaaaaacaagcaatggggaaaggattccctatttaataaatggtgctgggaaaactggctagccatgtgtagaaagctgaaactggattccttccttacaccttatacaaaaattaattcaagatggattaaagacttaaatgttagacctaaaaccataaaaaccctagaagaaaacctaggcaataccattcaggacataggcatgggcaaggacttcatgtctaaaacaccaaaagcaatggcaacaaagccaaaattgacaaatgggatctaa

SEQ ID NO: 122739 - DNA, 1929 bp, Homo sapiens
tgcacccaatacaggagcacccagattcataaagcaagtcctgagtgacctacaaagagacttagactcccacacaataataatgggagactttaacaccccactgtcaacattagacagatcaatgagacagaaagttaacaaggatatccaggaattgaactcagctctgcaccaagcggacctaatagacatctacagaactctccaccccaaatcaacagaatatacattcttttcagcaacacaccacacctattccaaaattgaccacatagttggaagtaaagctctcctcagcaaatgtaaaagaacagaaattataacaaactgtctctcagaccacagtgcaatcaaactagaactcaggattaagaaactcactgaaaaccgctcaactacatggaaactgaacaacctgctcctgaatgactactgggtacataacgaaatgaaggcagaaataaagatggtctttgaaaccaatgacactctcccaagactaaaccaggaagaagttgaatctctgaatagaccaaaaacaggctctgaaattgaggcaataattaatagcctaccaaccaaaaaaagtccaggaccagatggattcacagctgaattctaccagaggtacaaggaggagctggtaccattccttctgaaactattccaatcaatagaaaaagagagaatcctccctaactcattttatgaggccagcatcatcctgataccaaagcctggcagagacacaacaaaaaaagagaattttagaccaatatccctgatgaacattgatgcaaaaatcctcaataaaatactggcaaaccgaatccagcagcacatcaaaaagcttatccaccatgatcaagtgggcttcatccctgggatgcaaggctggttcaacatatgcaaatcaataaatgtaatccagcatataaacagaaccaaagacaaaaaccacatgattatctcaatagatgcagcaaaggcctttgacaaaattcaacaacccttcatgctaaaaactctcaataaattaggtattgatgggacttatctcaaaataataagagctatctatgacaaacccacagccagtatcatactgaatggacaaaaactggaagcattcactttgaaaactggcacaagacagggatgccctctctcaccactcctattcaacatagtgttggaagttctggccagggcaatcaggcaggagaaggaaataaagggcattcaattaggaaaagaggaagtcaagttgtccttgtttgcagatgacatgattgtatatctagaaaaccccatcatctcagcccaaaatctccttaagctgataggcaacttcagcaaagtctcaggatacacaatcaatgtgcaaaaatcacaagcattcttatacaccaataacagacaaacagagagccaaatcatgagtgaactcccattcacaattgcttcaaagagaataaaatacctaggaatccagcttacaagggatgtgaaggacttcttcaaagagaactacaaaccactgctcaatgaaataaaagaggataaaaacaaatggaagaacattccatgctcatgggtaggaagaatcaatattgtgaaaatggccatacctcccaaggtaatttatagattcaatgccatccccatcaagctaccaatgactttctttggcatgatctttctatcccagaaatatggccatgtcactctgctgtttagactccttcagtggctcctcaacgttgccaggaacaacaacaaagtattttacaagatctataaagttggtcataaactgtcttctgcttatgtcctgtgtcttacctgttcacacttttctgtaagcttcctttagtccacctatgcttgctttcttcctggtctttacattcttttctctggcta

SEQ ID NO: 122740 - DNA, 1299 bp, Homo sapiens
atgaagcttccagaggaaggatcaggcagcattatttgctgttctgcaatatttgctgttctgcagcttccactggtgatacacaggcaaacagggtatggagaggacctccagcaaactccaacagaccttcagctgagggacctgactgatcacagctcctcgccagcaatggaacaaagctggatggagaatgactttgatgagctgaacagaagtaggcttcagaaggcaaataaactagaaaatctagaagaaacggataaattcctcgacacatacaccctcccaagactaaaccaggaagaaactgaatctctgaatagaccaataacaggctctgaaattgaggcaataattaataacgtaccaaccaaaaaaagtccaggaccagatggagtcacagccaaattctaccagaggtacaaggaggagctgagaaccgtcaacaaaaaccacatgattatctcaatagatgcagaaaaggccttcgacaacattcaacagcccttcatgctaaaaactctcaataaactaggtattgatgcaacatatctcaaaataataagagctatcgatgacaaacccacagccaatatcatactgaatgggcaaaaactggaagcattccctttgaaaactggcacaagacagggatgccctctctcaccactcctattcaacatagtgttggaagttctggccagggcaatcaggcaagagaaagaaataaagggtattcaattaggaaaagaggaagtcaaattgtccctgtttgcagatgacatgattgtatatctagaaaaccccattgtctcagcccaaaatctccttaagctgataaacaacttcagcaaagtctcaggatacaaaatcaatgtgcaaaaatcacaagaattcctatacaacaataacagacaaacagagaaccaaatcatgagtgaactcccattcacaattgcttcaaagagaataaaatacctaggaatccaacttacaagggatgtgaaggacctcttcaaggagaactacaacccactgctcaatgaaataaaaaaggacacaaacaaatggaagaacattccatgctcatggataggaagaatcaatatcatgaaaatggccatactgctcaaggtaatttatagattcaatgccatccccatcaaactactaatgattttcttcacagaattggaaaaaaactactttaaagtgtatatagaaccaaaaaagagcccatattgcaaagccaatcctaagccaaaagaacaaagctggaagcatcactctacgtga

SEQ ID NO: 122741 - DNA, 2187 bp, Homo sapiens
atgggagactttaacaccccactgtcaacattagacagatcaaggaaacagaaagttaacaaggatatccaggaattgaactcagcactgcaccaagcagacctaaaagacatctacagaactcttcatcccaaatcaacagaatatacattcttttcagcaccacaccacacttattccaaaattgaccacatagttggaagtaaagcactcttcagcaaatgtaaaagaacggaaattataacaaactgtctctcagaccacagtgcaatcaaactagaactcaggattaagaaactcactcaaaaccgctcaactacatggaaactgaacaacctgctcctaaatgactactgggtacataacgaaatgaaggcagaaataaagatgttctttgaaaccatgttggaagttctggccagggcaatcaggcaggagaaggaaataaagggctttcaattaggaaaagaggaagtcaaattgtccctgtttgcagatgacatgattgtatatctagaaaaccccatcaactcagcccaaaatctccttaagctgataagcaacttcagcaaagtctcagcatacaaaatcactgtgcaaaaatcacaagcattcttatacaccaataacagacaaacaaagagccaactcatgagtgaactcccattcacaattgcttcaaagagaataaaatacctaggaatccaacttacaaaggatatgaaggacctcttcaaggagaactacaaaccactgctcaatgaaataaaagaggatacaaacaaatggaagaacattccatgctcatgggtaggaagaatcaatatcgtgaaaatggccatactgcccaagttaatttatagattcaatgtcatccccatcaagctaccaatgactttcttcacagaattggaaaaaactactttaaagttcatacggaaccaaaaaagaacccacatttccaagtcaatcctgagccaaaagaacaaagctggaggcatcacgctacctgacttcaaactatattacaaggctacagtaaccaaaacagcatggctaaagttcttgagaagacttgtaagccagggaaagggctaccttcactgttattcaacggtctggaaaaaaccacgagctgatcaccaggatgagtctgctttccagggacagcacatcatcctaaacgtcccagccagcagacccctgcactctcctggttttatctctgaaagaggactgggcagcattggctggagaacttcctggaaggcttcactgatcaatcaattggctgtcgcttatgggttggtagcaacagcagaccggatctccgaggatgcagagtccatacccaaggctgcgccctggggaacaggtgctgtatccacagctgagaaatccatagagcgttcacatcacaggactctgtgcagacaacccccagtaccagcccagagccaggaagacttgctggagcctaatcaaatgaaaaggcaccagaaaacaaaccctggtaatatgacaaaacaaggctctttaatacccccaagaaatcacactagcttaccaacaatgaatccaaatcaagaagaaatccctgatttacctgaaaaaaagttcaggagcaaaattggcctacaagggacatacttgaatgtaatacaagccgtctatgacaaacccacagccaacataatactgaatggggaaaagttgaaagcattccctctgagaactggaacaagacaaggatgcccactctcaccattcctcctcatcgtagtactggaagttctagccagagcaatcagacaagagaaagaaatcaagagcatccaaatcagtaaagaggaaatcaaactgtcactgtttgctgatgatatgatcatttacctcgaaaaccctaaagactcctacagaaagctcctagaaccgataaaagaattcagcaaagtttctagatacaagattaatgtacacgaatcagtagctcttctatacaagaacagcaaccaagcagagaatcaaatcgagaattcaaccccttttactgaaaaaaaaaaacttaagaatatacctaaccaaggaagagaaagacatctacaaggaaaactacaaaacactactgaaagaaatcatagacaacacaaacaaatggaaacacatcccatgctcatggatgggtag

SEQ ID NO: 122742 - DNA, 1698 bp, Homo sapiens; identical to SEQ ID NO: 121178

SEQ ID NO: 122743 - DNA, 5076 bp, Homo sapiens; identical to SEQ ID NO: 118069

SEQ ID NO: 122744 - DNA, 1410 bp, Homo sapiens; identical to SEQ ID NO: 118421

SEQ ID NO: 122745 - DNA, 1443 bp, Homo sapiens
atgaagcttccagaggaagcatcaggcagcaatatttgctgttatgcaatatttgctgttctgcagcctctgctggtgatacccaaggaaacagtgtctggagtggacctccagcaaactccaacagatctgcagctgagcgacctgactcctggaaggaaaactaacaaacagaaaggaatagcatcaccatcaacaaaaaggacatccacaccaaaaccccatctacaagcaaatgctcagagattttgtcaccaccaggcctgtgttacaagagttcctaaaggaagcactaaacatggaaaggaacaactggtaccagccactgcaaaaacctgccaaattgtaaagaacatcaatgctatgaagaaactgcatcaattaacagaaatacaaattaccatcagagaataccataaacacctctatgcaaataaactaaaaaatctagaagaaatggataaattcctggacacatacaccctcccaagactaaagcaggaagaagttgaatctctgaatagaccaataatgggctctgaaattgaggcaataattaatagcctaccaaccaaaaaaagtccaggaccagatggattcacagccaaattctacgagaggtacaaagaggagttggtatcattccttctgaaactattccaatcaatagaaaaagagggaatcctccctaactcattttatgaggctagcatcatcttgataccaaaacctggcagagacacaacaaaaaaagagaattttagaccaatatccctgaagaacatcgatgcaaaaatcctcaataaaatactggcaaaccgaatccggcagcccatcgaaaagcttatccaccacgatcaagtcggcttcatccctgagatgaaaggctggttcaaaaaatgcaaatcaataaacgtaatccatcacataaaccaaaccaatgacaaaaaccacatgattatctcaatagatgcagaaaaggccttcgacaaaactcaacagcccttcatgctaaaaactctcaataaactagggacaatcaggcaaaagaaagaaataaaaggtattcaattaggaaaagaggaagtcaaattgtctctgtttgcagatgacatgattgtctatttagaaaactccatcgtctcagcccaaaatctccttaagctgataagcaacttcagcaaagtctcaagatacaaaatcaacctgcaaaaatcacaagcattcctatacaccaataacagacacatggagagccaaatcacgagtgaactcccattcacaattgatacaaagagaataaaatacctaggaatccaatttacaagggatgtgaaggacctcttcaaggagaactacaaattactgctcaatgaaataaaagaggacacaaacaaatggaagaacattccatgctcatggatagaagaatcaatatcatga

SEQ ID NO: 122746 - DNA, 1881 bp, Homo sapiens; identical to SEQ ID NO: 121951

SEQ ID NO: 122747 - DNA, 1482 bp, Homo sapiens
atggagctgaaaaccaaggctcgagaactacgtgaagactcaggagccgatgcgatcaactggaagaaagggatcaacaaaattgatagaccgctagcaagaataataaagaaaaaaagagagaagaatcaaatagatgcaataaaaaatgataaaggggatatcaccaccgatcccacagaaataaaaactatcatcagagaatactacaaacacctctatgcaaataaactagaaaatctagaagaaatggataaattcctcgacacatacactctcccaagactaaaccaggaagaagttgaatctctgaatagaccaataacaggagctgaaattgtggcaataatcaatagcttaccaaccaaaaagagtccaggaccagatggattcacagccgaattttaccagaggtacaaggaggaactggtaccattccttctgaaactattccaatcaatagaaaaagagggaatcctccctaactcattttatgaggccagcatcatcctgataccaaagccgggcagagacaaaaccaaaaaagaggattttagaccaatatccttgaggaacattgatgccaaaatcctcaataaaatactggcaaaccaaatccagcagcacatcaaaaagcttatccaccatgatcaagtaggcttcatccctaggatgcaaggcttgttcaacatatgcaaatcaataaatgtaatccagcatataaacagaaccaaagacaaaaaccacatgattatctcaatagatgcagaaaaggcctttgacaaaattcaacaacacttcatgttaaaaactctcaataaattaggtattgctgggacgtatctcaaaataataagagctatctatgtcaaacccacagccaatatcatactgaatgggcaaaaactggaagcattccctttgaaaattggcacaagacagggatgccctctctcaccactcctattcaacatagtgctggaagatctgtccagggcaatcaggcaggagaaggaaataaagggtattcaattaggaaaagaggaagtcaaattgtccctgtttgcagatgacatgattttatatctagaaaaccccattgtctcagcccaaaacctccttaagctgataagcaacttcagcaaagtctcaggatacaaaatcaatgtacaaaaatcacaagcattcttatacaccaacaacagacaaacagagagccaaatcatgagtgaactcccattcacaattgcttcaaagagaataaaatacctaggaatccaccttacaagggatgtgaagcacctcttcaaggagaactacaaaccactgctcaacgaaataaaagaggatacaaacaaatggaagaacattccatgctcatgggtaggaagaatcaatattgtgaaaatggccatactgcccaaggtaatttacagattcaatgccatccccatcaagctaccaattactttcttcacataa

SEQ ID NO: 122748 - DNA, 2091 bp, Homo sapiens
atggtgtttctggaaaagattagcgttggaatcagcagactgagtaaacaacatccgcccttcatccgtgtggccctcccactggatgcggacccaactgtgtccagaattggttccttccagtgggttcttggtctcgctgacttcaggaatgaagccgtggaccctcgcgatgttcagatgtgtccggagtttattccttctggtgggttcgtggtcttcctgacttcaggagtaaagccgcagaccttcacagtgagcattacagctcttaaaggtgagcctacccaaatgagaaggaaccagaaaaccaactctggtaatatgacaaaactaggctatttaacaccccaaaaaaatcacactagctcaccagcaatgagtccaaaccaagaacaaatccctgattcacctgaaaaagaattcaggaggaccgaagaggcttcattgactgagggaggaacaataaatcctattatttcttgggccgtagggaatggtagcagcaaaaatctataccacattttggggaaaggaagaaaaatcttctcgtcctcaggaatcaagcaaaaatccattgcttctggggaaagacaaaacttccagaggaacgatcagacagcagcatttgcggttcatgaaaatccgttgttctgcagccaccgctgctggtacccaggcaaacaagagaagtgcttaaaggagctgatggagctgaaagccaaggctcgagaactacgtgaagaatgcagaagcctcaggagccgatgcgatcaactggaagaaagggtatcagtgatggaagatgaaatgaatgaaatgaagcgggaagggaagtttagagaaaaaagaataaaaagaaacgaacaaagcctccaagaaatatgggactatgtgaaaagaccaactctacatctgattgatgtacctgaaacactaaatgcccacaagagaaagcaggaaagatctaaaaccgacaccctaacatcacaattaaaagaactagagaagcaagagcaaacacattcaaaagctagcagaaggcaagaaataactaaaatcagagcagaactgaaggaaatagagacagaaaaaacccttcaaaaaattaatgaatccaggagctggttttttgaaaggatcaacaaaattgatagaccgctagcaagactaataaagaagaaaagagagaagaatcaaatagatgcaataaaaaatgataaaggggatatcaccagcgatcccacagaaatacaaactaccatcagagaatactacaaacacctctacgcaaataaactagaaaatctagaagaaatggataaattcctcgacacatacaccctcccaagactaaaccaggaagaagttgaatctctgaatagaccaataacaggctctgaaattgtggcaataatcaatagcttaccaaccaaaaagagtccaggaccagatggatccacagctgaattctaccagaggtacaaggaggaactgctgataagcaacttcagcaaagtctcaggatacaaaatcaatgtacaaaaatcacaagcattcttatacaccaataacagacaaatggagagccaaatcatgagtgaactcccattcacaattacttcaaagagaataaaatacctgggaatccaacttacaagggacattaaggacctcttcaaggagaactacaaaccactgctcaatgaaataaaagaggatagaaacaaatgcaagaacattccatgctcatgggtaggaagaattaatatcgtgaaaatggccatactgcccaaggtaatttatagatttaatgccattcccatcaagctacgaatgactttcttcacagaactggaaaaaactactttaaagttcatatggaaccaaaaaagagcccgcatcaccaagtcagtcctaagccaaaagaacaaagctggaggcatcacgctacctgacttcaaactatactacaaggctacagtaaccaaaacagcatggtactggtaccaaaacagagatataagatcaatggaacagaacagagccctcagaaataacaccacatatctacaactatctgatctttga

SEQ ID NO: 122749 - DNA, 3543 bp, Homo sapiens; identical to SEQ ID NO: 118071

SEQ ID NO: 122750 - DNA, 2094 bp, Homo sapiens; identical to SEQ ID NO: 120831

SEQ ID NO: 122751 - DNA, 2784 bp, Homo sapiens; identical to SEQ ID NO: 120657

SEQ ID NO: 122752 - DNA, 1584 bp, Homo sapiens
atgtctatatcaggcacagtcagaatgtcagccaagtccaaggggaacccctcctcgtcctgtccagccgagggaccgccggcagcctccaaaaccaaggtgaaggaacagatcaagatcatcgtggaggatttggaattagtcctgggcgacctgaaggacgtggccaaggaacttaaggagcaacattggtggcaccccataagtggtgacacagccacatcaatttgcacagttctggagagtgagaagtccaagatcaaggtaacggcatttgatgtctggctccacctctgggggaagggcacagacaaacaaaaagacagcagtaacttctgcagacttaagtgtccctgtctgacagctttgaagagagcagtggttctcccagcacgcagctggagatgtgagaatgggcagactgcctcctcaagtgggtccctgacccctgaccctcgagcagctaacagggaggcaccccctagcaggggcagactgacacctcacacggccagtgacggggagaatggaaccaagttggaaaacactctgcaggatattatccaggagaacttccccaatctagcaaggcaggccaacattcagattcaggaaatacagagaacgccacaaagatactcctcgagaaaagcaactccaagacacataattgtcagactcaccaaagttgaaatgaaggaaaaaatgttaagagcagccagagagaaagaaatacaaactgccatcagagaatactacaaacacctctatgcaaataaactagaaaatctagaagaaatggataaattcctcgacgcatacaccctcccaagacaaaaccaggaagaagttgaatctctgaatagaccaataacaggacctgaaattgtggcaataatcaatagcttaccaaccaaaaagagtccaggaccagatggattcacagccgaattctaccagaggtacaaggaggaacggcatattaacagaaccaaagatgaaaaccacatgattatctcaatagatgcagaaaaggcctttaacaaaattcaacaacccttcatgctaaaaactctcaataaattaggtattgatgggacgtatttcaaaataataagagctatctatgacaaacccacagccaatatcatactgaatgggcaaaaactggaagcattccctttgaaaactggcacaagacaggaatgccctctctcaccactcctattcaacatagtgttggaagttctggccagggcaattaggcaggagaaggaaataaagggtattcaattaggaaaagaggaagtcaaattgtccctgtttgtagactacatgattgtacatctagaaaaccccatcatctcagcccaaaatctccttaagctgataagcaacttcagcaaagtctcaggatacaaaatcaatgtacaaaaatcacaagcattcttatacaccaacaacagacaaacagagagccaaatcatgagtgaactcccattcacaattgcttcaaagagaataaaatacctaggaatccaacttacaagggatgtgaaggaccctcttcgaggagaacgataa

SEQ ID NO: 122753 - DNA, 1722 bp, Homo sapiens; identical to SEQ ID NO: 121958

SEQ ID NO: 122754 - DNA, 1034 bp, Homo sapiens
aaaatctagaagaaacggataaattcctggacacatacaccctcccaagactaaaccaggaagaagttgaatctctgaatagaccaataacagactctgaaattgaggcaataattaatagcttaccaaccaagaaaagttcaggaccagatggattcacagctgaattctaccagaggtacaaggaggagctgcctggcagagacacaacaaaaaaagagaattttagaccaatatccctgatgaacatcgatgcaaaagtcctcaataaaatactggcaaaccgaatccagcagcacatcaaaaagcttatccaccatgatcaagtgggcttcatccctgggatgcaaggctggttcaacatacacaaatcaataaacgtaatccagcatataaacagaaccaaggacaaaaaccacatgattatctcagtagatgtagaaaaggcctttgacaaaattcagcagcccttcatgctaaaaactctcaataaattaggtattgatgggacatatctcaaaacaataagagctatttatgacaaacccacagccaatatcatactgaatgggcaaaagctggaagcattttctttgaaaactggcacaagagagggatgccctctctcaccactcctattcaacatagtgttggaagttctggccagggcaatcaggcaggagaaagaaataaagggtattcaattaggaaaagaggaagtcaaattgtccctgtttacagatgacataattgtatatctagaaaaccccatcatctcagcccaaaatctccttaagctggtaagcaacttcagcaaagtctcaggatataaaatcaatgtgcaaaaatcacaagcattcttacacaccaataacagacaaacagagagccaaatcatgagtgaactcccattcacaattgctacaaagagaataaaatatctaggaatccaacttacaagggatgtgaaggacctcttcaaggggagctacaaaccactgctcaacgaagtaaaaaaggacacaaacaaatag

SEQ ID NO: 122755 - DNA, 1068 bp, Homo sapiens
gcaaataaactagaaaatctagaagaaacggataaattcctcgacacatacaccctcccaagactaaaccaggaagaaactgaatctctgaatagaccaataacaggctctgaaattgaggcaataattaataacgtaccaaccaaaaaaagtccaggaccagatggagtcacagccaaattctaccagaggtacaaggaggagctgagaaccgtcaacaaaaaccacatgattatctcaatagatgcagaaaaggccttcgacaacattcaacagcccttcatgctaaaaactctcaataaactaggtattgatgcaacatatctcaaaataataagagctatcgatgacaaacccacagccaatatcatactgaatgggcaaaaactggaagcattccctttgaaaactggcacaagacagggatgccctctctcaccactcctattcaacatagtgttggaagttctggccagggcaatcaggcaagagaaagaaataaagggtattcaattaggaaaagaggaagtcaaattgtccctgtttgcagatgacatgattgtatatctagaaaaccccattgtctcagcccaaaatctccttaagctgataaacaacttcagcaaagtctcaggatacaaaatcaatgtgcaaaaatcacaagaattcctatacaacaataacagacaaacagagaaccaaatcatgagtgaactcccattcacaattgcttcaaagagaataaaatacctaggaatccaacttacaagggatgtgaaggacctcttcaaggagaactacaacccactgctcaatgaaataaaaaaggacacaaacaaatggaagaacattccatgctcatggataggaagaatcaatatcatgaaaatggccatactgctcaaggtaatttatagattcaatgccatccccatcaaactactaatgattttcttcacagaattggaaaaaaactactttaaagtgtatatagaaccaaaaaagagcccatattgcaaagccaatcctaagccaaaagaacaaagctggaagcatcactctacgtga

SEQ ID NO: 122756 - DNA, 1055 bp, Homo sapiens; identical to SEQ ID NO: 120348

SEQ ID NO: 122757 - DNA, 2301 bp, Homo sapiens
atggggaaaaaacagagcagaaaaactggaaactctaaaaagcagagtgcctctcctcctccaaaggaacgcagttccacaccagcaacggaacaaagctggtcggagaatgactttgacgagttgagagaagaaggcttcagacgatcaaactactccaagctacaggaggaaattcaaaccaaaggcaaagaagttaaacactttgaaaaaaatttagacgaatgtataactagaataaccaatagagagaagtgcttaaaggagctgatggagctgaaagccaaggctcgagaactacgtgaagaatgcagaagcctcaggagccaatgcgatcaagtggaagaaaggactgctagcaagactaataaagaagaaaagagagaagaatcaaatagatgcaataaaaatgataaaggggatatcaccaccgatcccacagaagtacaaactaccatcagagaatactacaaacacctctatgcaaataaactacaaaatctagaagaaatggataaattcctcgacacatacatcctcccaagactaaaccagaaagaaattgactctctgagtagaccaataacaggatctgaaattgtggcaataatcaatagcttaccaaccaaaaagagtccaggaccagatggattcacagccgaattctaccagaggtacaaggaggaactgaaaatcctcaataaaatactggcaaaccaaatccaacagcacatcaaaaagcttatccaccatgatcaagtgggcttcatccctgggatgcaaggctggttcaatatatgcaaatcaagaaatgtaatccatcatataaacagaaccaaagacaaaaaccacatgattatgtcaatagatgcagaaaaggcctttgacaaaattcaacaacccttcatgctaaaaactctcaataaattaggtattgatgagacgtatctcaaaataataagagctatctatgacaaacccacagccaatatcatactgaatgggcaaaaactggaagcattccctttgaaaactggcacaagacagggatgccctctgtcaccactcctattcaacgtagtgttggaagttctggccagggcaatcaggcaggagaaggaaataaagggtattcaattaggaaaagaggaagtcaaattgtccctgtttgcagaagacatgattgtatatctagaaaaccccatcgtctcagcccaaaatctccttaagctgataagcaacttcagcaaagtgtcaggatacaaaatcaatatacaaaaatcacaagcattcttatacaccaataacagacaaacagagagccaaatgatgagtgaactcccattcacaattgcttcaaacagaataaaatacctaggaatccaccttacaagggacatgaaggacctcttcaaggagaactacaaaccactgctcaatgaattaaaagagaatacaaacaaatggaagaacattccatgctcatgggtaggaagaatcaatatcatgaaaacggccatactgcccaaggcaatttacagattcagtgccatccccatcaaactaccaatgactttcttcaaagaattggaaaaaactactttaaagttcatatggaaccaaaaaagagcctgcatcgccaagtcaatcctaagccaaaagaacaaagctggaggcatcacgctacctgacttcaaactatactacaaggctacagtatccaaaacagcatggtactggtaccaaaacagagatatagatcaatggaacagaacagagccctcagaaataacgccgcatatctacaactatctgatctttgacaaacctgtgaaaaacaagcaatggggaaaagattccctgtttaataaatggtgctgggaaaaccggctagccatatgtagaaagctgaaactggattccttccttacaccttatacaaaaattaattcaagatggattaaagacttaaacgttagacctaaaaccataaaaaccctagaagaaaacctaggcattaccattcaggacataggcatgggcaaggacttcatgtctaaaacaccaaaagcaatggcaacaaaagccaaaattgacaaatgggatctaattaaactaaagagcttctgcacagcaaaagaaactaccatcagagtgaacaggcaacctacaaaatgggagaaaattttcacaacctactcatctgacaaagggctaataatatccagaatctacaatgaactcaaacaaatttacaagaaaaaaaaaacaaccccatcaaaaagtgggcgaagaacatga

SEQ ID NO: 122758 - DNA, 3192 bp, Homo sapiens; identical to SEQ ID NO: 118064

SEQ ID NO: 122759 - DNA, 1139 bp, Homo sapiens
tgcacccaagcacacagcttatggtctccaaaaaggaactagggctggctggagaaaaggctgaatccaatcatagggctagaaggtataagcctccgctgctgatacccaggcaaacagggtctggagtggacctccagcaaactccaacagacctgcagctgagggtcctgactgttagaaggaaaactaacaaacagaaaggacatccacaccaaaaccccatctgtacgtcaccatcatcaaagaccaaagaaatacaaactaccatcagagaatactatcaacacctctacacaaataaactagaaaatctagaagaaatggataaattctttgacacatacaccctcccaagactaaaccaggaagaagttgaatctctgaatagaccaataacaggctctgaaattgaggcaataattaataacttaccaaccaaaaaagtccaggaccagatggattcacagccaaattctaccagagtgttggaagttctggccagggcaatcaggcaggagaaggaaataaagggcattcaattaggaaaagaggaagtcaaattgtccctgtttgcagatgacatgattgtatatctagaaaaccccatcgtctcagcccaaaatctccttaagctgacagccaacttcagcaaagtctcaggatacaaaatcaatgtgcaaaaatcacaagcattcttatacaccaataacagacaaacagagagccaaatcatgagtgaactcccattcacaatggcttcaaacagaataaaatacctaggaatccagcttacaagggatgtgaaagacctcttcaaggagaactataaaccactgctcaatgaaataaaagaggatacaaacaaatggaagaacattccatgctcatgggtaggaagaatcaatatcatgaaaatggccatactgcccaaggtaatttatagattcaatgccatccccatcaggctaccaagaactttcttcatagaattggaaaaaactactttaaagttcatatggaaccaaaaaagggcccacattgccaagtcaatcctaagccaaaagaacaaagctggaggcatcacactacctgacttcaaactatactacaaggctacagtaaccaaaacagcatag

SEQ ID NO: 122760 - DNA, 2202 bp, Homo sapiens
atggagctgaaagccaaggctcgagaactacgtgaagaatgcagaagcccctggagcagatgcgatcaactagaagaaggggtatcagtgatggaagatgaaatgaatgaaatgaagcaagaagggaagtttagagaaaaaagaataaaaagaaatgaacaaagcctccaagaaatatgggactatgtgaaaagaccaaatctacgtcagattggtgtacctgaaagtgatggggagaatggaaccaagttggaaaacactctgaaggatattatccaggagaacttccccaatctagcaaggcaggccaacattcagattcaggaaatacagagaacgccacaaagatactccttgagaagagcaactccaagacacaaaattgtcagattcaccaaagttgaaatgaaggaaaaaatgttaagggcagccagagagaaagcaccacaccactcctattccaaaattgaccacatcgttggaagtaaagctctcctcagcaaatggaaaagatcagaaattataacaaactgtctctcagaccacagtgaaatcgaactagaactcaggattaagaaactcactcaaaaccgctcaactacatggaaattgaacaacctgctcctgaatgactactgggtacataacgaaatgaaggcagaaataaagatgttctttgaaaccaacgagaacaaagacacaacacaacagaatctctgggacacattcaaagcagtgtgtaaaggaaaatttgcagcactaagtgcccacaagagaaagcaggaaagatcaaaaattgacaccctaacattacaattaaaagaactagaaaagaaagagcaaacatattcaaaagaaatacaaactacaatcagagaatactacaaacacctctgtgtaagtaaactagaacatctagaagaaatggataaattccttgacacatacaccctcccaagactaaaccaggaagaagttgactctctgaatagaccaataacaggctctgaaattgtggcaatgatcaatagcttaccaaccaaaaagagttcaggaccagatggattcacagccaaattctaccagaggtacaaggaggaactggtaccattccttctgaaactattccaaacaattgaaaaagagggaatcctccctaactcgttttatgaggccagcatcatcctgataccaaagccgggcagagacacaagcaaaaaagataattttaggccaatatccttgatgaacactgatgcaaaaatcctcaataaaatattggcaaaccaaatccagcagcacgtcaaaaaccttatccaccatgatcaagtgggcttgatccctggaatgcaaggctggttcaacatacgcaaatcaataaatgtaatccagcatataaacagaaccaaagacaaaaaccacatgattatctcaatagatgaagaaaaggcctttaacaaaattcaacaacacttcatgctaaaaactctcaataaattaggtattgatgggacgtatctcaaaataagagctatctatgacaaatccacagccaatatcatactgaatgggcaaaaactggaagcattccctttgaaaactggcacaagacagggatgccctctctcaccactcctattcaacatagtgttggaggttctggccagggcaattaggcaggagaaggaaataaatggtattcaattaggaaaagaggaagtcaaattgtccctgtttgcagatgacatgatagtatatctagaaaactccatcgtctcagcccaaaatctccttcagctgataagcaacttcagcaaagtctcaggatacaaaatcaatgtacaaatatcacaagcattcttatacaccaataacagacaaacagagagccaaatcatgagtgaactcccattcgccattgcttcaaagagaataaaatacctaggaatccaacttacaagggacgtgaatgacctattcaaggagaagttcaaaccactgctcaatgaaattaaagaggatacaaacaaatggaaaaacattccatgctcatgggcaggaagaatcaatatcgtgaaaatggccatactgcccaaggtaatttatagattcaataccatccccatgaagctaccaataactttcttcacagaattggaagaaactactttaaagttcaaatggaaccaaaaaagggcctga

SEQ ID NO: 122761 - DNA, 2241 bp, Homo sapiens
atgtctgtcttgttcactgtatcacctgtgcccagctcagtgcctggtgggcattcgacaactctgttgactggttcactgacaggctgtgaggggctttggcaactaggattcacaatgggctttggacgcttgccaggtgaggacagcattcccagaaaaaactgcgagtgtgggaaccagacctcaggaaggcaagggagggaacatgtgggccaaggaggcctggactgggggccagcctacggcagtggcaaggatgtaaacaaggcgactgcacaggcaggcagtaagattagcccagctggcagtggccagtggaaaaaggggtggctgttcagtgatggcaaacatgccatgcgggaaggtggtaatcagaagaggggtttggaaactcaagagcacataagtgaacaaaacatcaagcttgctcttaaaagtttttcaatcttacgcatgttgctggaaggaacgtctgctttctccatgggctgggtgatcacagaggggttgctggagctgatgagcactggggtgctgatctctaccatatggcgccctgaaggagaatggaccatccggttgagagtgttcaaggctgttgtgatggaaaactgcccaggcaccttcctcctggaccctgggcccctacggagggtagacgtgttgcctctggaggacgaggacaccagggacaggttttttgtgcgggatgactggcgacctttgttcttctctaaaaggtgtcttgcgttgccctctaaaaccgtatctcattctaatttagaaatccaaccaagactaaaccaggaagaagttgaatccctgaatagaccaataacaggctctgaaattgaggcaataattaatagcctaccaaccaagaaaagtccaggaccagacagattcacagccgaattctaccagaggtacaaggaggagctgcatataaacagaaccagcgacaaaaaccatatgattatctcaatagatgcagaaaaggcctttgataaaattcaacagcccttcatgctaaaaactctcaataaattaggtattgatgggacgtatctcaaaataataagagctatttatgacaaacccacagccaatatcatactgaatgggcaaaaactggaagcattgcctttaaaaactagcacaagacagggatgccctctgtcaccactcctatttaacatagtgttggaagttctggccagggcaatcaggcaggagaaagaaataaagggtattcaattaggaaaagaggaagtcaaattgtccctctttgcagatgacatgattgtatatttagaaaaccccatcgtcttagcccaaaatctccttaagctgataagcaacttcagcaaagtctcaggatacaaaatcaatgtgcaaaaatcacaagcattcttaaacaccaataacagacaaacagagagccaaatcatgagcgaactcccattcacaattgcttcaaagagaataaaatacctaggaatccaacttacaagggatgtgagggacttcttcaaggagaactacaaaccgctgctcaacaaaataaaagaggacacaaataaatggaagaacattccatgctcatggataggaagaatcaatattgtgaaaacggccatactgcccaaggtaatttatagattcattgctatccccatcaagctaccaatgactttcttcacagaatttttaaaaactactgtaaagttcatatggaaccaaaaaagagcccacactgccgagtcaatcctaagccaaaagaacaaagctggaggcatcacgctacctgacttcaaactatactaccaggctacagtaaccaaaacagcatggtactggtacctaaacagagatatagaccaatggaacagaacagaggcctcagaagtaacaccacacatctacaaccatctgatctttgacaaacgcgacaaaaataagaaatggggaaacgattccctatttaataaatggtgctgggaaaactggctagccatatgtagaaagctgaaactggatcccttccttacaccttatacaaaaatcaattcaagatggattagagacttaaatgttagacctaaaaccataaaaaccctagaagaaaacctaggcaataccattcaggacatcggcatgggcaaggacttcatgtctataacaccaaaagcaatggcaacaaaagccaaaattgacaaatgggatctaattaaatga

SEQ ID NO: 122762 - DNA, 1889 bp, Homo sapiens
acagatcaatgagacaaaaagtcaacaaggatacccaggaattgaactcagctctgcaccaagcggacctaatagacatctacagaactctccaccccaaatcaacagaatatacatttttttcagcaccacaccacacctataccaaaattgaccacatacttggaagtaaagctctcctccgcaaatgtaaaagaacagagattataacaaactatctctcagaccacagtgcaatcaaactagaactcaggattaagaatctcactcaaaaccgctcaactacatggaaactgaacaacctgcttctgaatgactactgggtacataacaaaatgaaggcagaaataaagatgttctttgaaaccaacgagaacaaagacacaacataccagaatctctgggacgcattcaaagcaaaatacaaactaccatcaaggaatactacaaacacctctatgcaaataaactcgaaaatctggaagaaatggataaattcctggacacataacactctcccaagactaaaccaggaagaagttgaatctctgaatagaccaataacaggagctgaaattgtggcaataatcaatagtttaccaaccaaaaagagtccaggaccagatggattcacagccgaattctaccagaggtacaaggaggaactggtaccattccttctgaaactattccaatcaatagaaaaacagggaatcctccctaactcattttatgaggccagcaccattctgataccaaagccgggcagagacacaaccgaaaaagagaattttagaccaatatccttgatgaacattgatgcaaaaatcctcaataaaatactggcaaaacgaatccagcagcacatcaaaaagcttatccaccatgatcaagtgggcttcatccctgggatgcaaggctggttcaatatacacaaatcaataaatgtaatccagcatataaacagagccaaagacaaaaaccacatgattatctcaatagatgcagaaaaagcctttgacaaaattcaacaacgcttcatgctaaaaactctcaataaattaggtattgatgggacgtatttcaaaataataagagctatctatgacaaacccacagccaatatcatactgaatgggcaaaaactggaagcaatccctttgaaagctggcacaagacagggatgtcctctctcaccactcctattcaacatagtgttggaagttctggccagggtaattaggcaggagaaggaaataaagggtattcaattaggaaaagaggaagtcaaattgtccctgtttgcagatgacatgattgtatatctagaaaaccccattgtcacagcccaaaatctccttaagctgataagcaacttcagcaaagtctcaggatacaaaatcaatgtacaaaaatcacaagcattcttatacaccaacaacagacaaacagagagccaaatcatgagtgaactcccattcacaattgcttcaaagagaataaaatacctaggaatccaacttacaagggatgtgaaggacctcttcaaggagaactacaaaccactgctcaaggaaataaaagaggatacaaacaaatggaagaacattccatgctcatgggtaggaagaatcaatatcatgaaaatggccatactgcccaaggtaatttacagattcaatgccatccccatcaagctaccaatgactttcttcacagaattggaaaaaactaaagttcatatggaaccaaaaaagtgcccacatcaccaagggaatcctaagccaaaagaacaaagctggaggcatcacactacctgacttcaaactatactacaaggctacagtaaccaaaacagcatggtactggtaccaaaacagagatataga

SEQ ID NO: 122763 - DNA, 1779 bp, Homo sapiens
atgggagactttaacaccccactgtcaacattagacagatcaacgagacagaaagtcaacaaggatacccaggaattgaactcagctctgcaccaagcggacctaatagacatctacagaactctccaccccaaatcaacagaatatacattcttttcagcaccacaccacacttactccaatattgaccacatagttggaagtaaagcactcttcagcaaatgtaaaagaacagaaattataacaaactgtctctcagaccacagtgcaatcaaactagaactcaggattaagaaactcactcaaaaccactcaactacatggcaactgaacaacctgctcctgaatgactactgggtaaataatgaaatgaaggcagaaataaagatgttctttgaaaccaatgagaacaaagacacaacagaccagaatctctgggacacattcaaagcagtgtgtagagggaaatttatggcactaaatgcccacaagagaaagcaggaaagatctaaaatgggcaccctaacatcacaattaaaagaactagaaaagcaagagcaaacacattcaaaagctagcagaaggcaagaaataactaagatcagagcagaactgaaggaaatagagacacaaaaacccttcaaaaaattaatgaatccaggagctgaaatacaaactaccatcagagaataccacaaacacctctatgcaaataaactagaaaatctagaagaaatggataaattcctcgacacatacatcctcccaagactaaaccaggaagaagttgaatctctgaatagaccagtaacaggctctgaaattgaggcaataatcaatagcttaccaaccaaaaagagtccagggccatatggattcacagccgaattctaccagaggtacaaagaggaactgcatataaacagaaccaaagacaaaaaccacatgattatctcaatagatgcagaaaaggcctttgacaaaattcaacaacccttcatgctaaaaactctcaataaattaggtattgatgggacgtatctcaaaatattaagagctatctatgacaaacccacagccaatatcatactgaatgggcaaaaactggaagctttccatttgaaaactggcacaagacagggatgccctctctcaccactcctattcaacatagtgttggaagttctggccagggcaatcaggcaggagaaggaaataaagggtattcaattaggaaaagaggaagtcaaatggtccctgtttgcagatgacatgattgtatatctagaaaaccccatcgtctcaacccaaaatctctttaagctcataagcaacttcagcaaagtctcaggatacaaaatcaatgtacaaaaatcacaggcattcctatacaccaataacagacaaacagagagccaaatcatgagtgaactcccattcacaattgcttcaaagagaataaaatacctaggaatccaacttacaagggatgtgaaggacctcttcaaggagaactacaaaccactgctcaatgaaataaaagaggatacaaacaaatggaagaacattccatgctcacgggcaggaagaatcaatatcgtgaaaatggccatactgcccaaggtaatttacagattcagtgccatccccatcaagctaccaatgactttcttcacagaattggaaaaaactaaagttcatatggaaccaaaaaagagcccacattgccaagtcaatcctaagccaaaagcacaaagctggaggcatcacactacctga

SEQ ID NO: 122764 - DNA, 2093 bp, Homo sapiens; identical to SEQ ID NO: 119728

SEQ ID NO: 122765 - DNA, 1983 bp, Homo sapiens
ccccactgtcaacattagacagatcatcgagacagaaagttaacaaggatatccaggacgttatctcagctctgcatgaagcaggcctaatagacatctacagaactctccaccccaaatcaacagaatatacattcttctcagcaccacatcacacttattacaaaattgaccacatagttggaagtaaagcactccttagcaaatgtaaaagaacagaaatcacaacaaactgtctctcagacgacagagcaatcaaattagaactcaggattaagaaactcactcaaaactacacaactacatggaaactgaacaacctgctcctaagtgactactgggtaaacaacgaaatgaaggcagaaataaagatgttctttgaaaccaatgagaacaaagacacaatgtaccagaatctctgggacacattcaaagcagtgtgtagagggaaatttatagcagtaaatgcctacaagagaaagcaggaaagatctaaaatccacaccctaacatcacaactaaaagaaccagagaagcaagagcaaacacattcaaaagctagcagaaggcaagaaataactaagattagagcagaactgaaggagatagacacacaaaaaacccttcaaaaaatcagtgtatccaggagctggttttctgaaaggatcaacaaaattgatagactgatagcaagactaatgaagaagaaaagagagaagaatcaaatagatgcaataaaaaatgataaaggggatatcactattgatcccacagaaatgcaaactaccatcagagaatactataaaaacctctacgcaaataaacttgaaaatctagaagaaatggataaattcttggacacatatatcctcccaagactaaaccaggaagaagttgaattgccaaatagaccaataacaggctctgaaaatgaggcaataattaatagcctaccaacaaaaaaagtccaggaccagatgagttcacagccaaattctaccagaggtacaaagaggagctgcagggcaatcaggcaagagaaagaaagagaggacactcaattaggaaaagaggaagtcaaattgttactgtttgcagaagacatgattgtgtatttagaaaaccccatcgtctcagcccaaaatctccttaagctgataaacaacttcagcaaagtctcaggatacaaaatcaatgtgcaaaaatcacaagcattcttacacaccaataacagacaaacagagagccaaatcatgagtgaatgcccactaacaattgcttcaaagagaataaaatacctaggaatccaacttacaagggatgtgaaggacctcttcaaggagaactacaaaccactgcttaacaaaataaaagaggacacaaaacaaatggaagaacattccacgctcatgtttaggaagaaacaatattgtgaaaatgaccatactgcccaaggtaatttatagattcatactttaaacttcatatggaaccaagaaagagcccgcattgccaagacaatcctaagcaaaaagaacaaagctggaggtatcacgctacctgacttcaaactatactacaaggctacagtaaccaaaacagcacggtactggaaacaaaacattaagaaaggaagcgtgtggcccatctccttgaaatctgagaagaggggtcatagaactagaccgctgtggaagttatgccataatgacgtccaaggagagctcctaaagacaatacaatttttgtttggctctcccttaggacactcatccttggatcccagtgccctggtgtgtaagtaagcccaggaagcccacagccagaaccaacttgccagcagtgtgagagccattttaggagtggatcttccagccccagtgacactccagctgataacccatgagcgagtaagtcttctacacctgaataaactagttcagagtcacacggccagtaagaaatagggtcaagatctgagct

SEQ ID NO: 122766 - DNA, 1743 bp, Homo sapiens
atggtttttgaaaagatcaacaaaattgatagacggctagcaagactaatacagaagaaaagagagaagaatcaaatagatgcaataaaaaatgataaaggggatatcaccaccaatcccacagaaatacaaactaccatcagagaatactataaacacctctatgcccataaactagaaaatctagaagaaatggataaattcctggacacatatactctcccaagactaaaccaggaagaacttgaatccccgaatagaccaataacagactctgaaattgaggcaatacttgagagcctaccaaccaaaaaaggtccaggaccagatggattcacagtcaaattctaccagaggtacaaagaggagttggtaccattctgtctgaaactattccgatcaatagaaaaagagggactcctccctaactcattttatgaggccagcatcatcctgataccaaagctgggcagagacacaacaaaaaaagagaattttagaccaatatccctgatgaacattgatgcaaaaatcctcaataaaatactggcaaagagaatccagcagcacatcaaaaagcttatccaccacgatcaagtcggcttcatccctgggatgcaaggctggttcaacataggcaaatcaataaaagtaatccgtcatagaaacacaaccaagtacaaaaaccacatgattatctcaacagatgcagaaaaggcctttgacaaaattcaacagcacttcatgctgaaaactctcaataacctagtgttggaagttctggccagggcaatcagacaggagaaagaaataaagggtattcaattaggaaaagaggaagccaaattgtccctgtttgcagatgacatgattgtatatttagaaaactccattgtctcagcccaaaatctccttaagctgataagcaacttcagcaaagtctcaggatacaaaatcaatgtgcaaaaattacaagcattctcatacaccaataacagacaaacagagagccaaatcatgagtgaactcccattcgcaattgcttcaaagagaataaaatacctaggaatccaacttacaagggatgtgaaggacttcttcaaggcgaactacaaaccactgctcaatgaaataaaaaaaggacacaaacaaatggaagaacaatccatgctcgtggataggaagaataaatattgtgaaaacggccatactgcccaagaattggaaaaaactaatttaaagttcatatggaaccaaaaaagagaccgtattgccaagacaatcctaagccaaaagaacaaagctggaggcatcacactacccgacttcaaactatactacaaggctacagtaaccaaaacagcatggtactggtaccaaaacagacatatagaccaatggaacagaacagagccctcagaaacaataccacacatctacaaccatctgaattttgacaaacctgacaaaaacaagaaatggggaaaggattccctatttaataaatggtgctgggaaaactggctagccatatgtagaaagctgaaactggatcccttccttacaccttatacaaaaattaattcaaggtggattaaacacttaaatgttagacctaaaaccataaaaatcctagaagaaaacctaggcaataccattcaggacataggcatgggcaaggacttcatgactaaaacaccaaaagcaatagcaacaaaaccaaaattgacaaatgggatctaa

SEQ ID NO: 122767 - DNA, 1260 bp, Homo sapiens
atggataaattcctcgacacatacaccctcccaagactaaaccaggaagaagttgaatctctgaatagaccaataacaggctctgaaattgaggcaataattaatagcttaccaaccaaaaaaagtccaggaccagatggattcacagccgaattctaccagaggtacaagaaggagctggtaccattccttctgaaattattccaatcaacagaaaaagagggaatcctccctaactcattttatgaggccaacatcatgctgataccaaagcctggcagagatacaacaaaaaaagagaattttagaccaatatccctgataaacatcgatgcaaaaatccttagtaaaatactggcaaaccaaatccagcagcacatcaaaaagcttatccaccatgatcaagtgggcttcatccctgggatgcaaggctggttcaacatacgcaaatcaataaatgtaatccagcatataaacagaaccaatgacaaaaaccatacgattatctcaatagatgcagaaaaggcttttgacaaaattcaacaacccatcgtgctaaaaactttcaataaattaggtattgatgggacccaatatcatactgaatgggcaaaaactggaagcattccctttgaaaaccggcacaagacagggatgccctctctcaccactcctattcaacatagtgttgaagttctggccagggcaatcaggcaggagaagggaataaagggtattcaattaggaaaagaggaagtcaaattgtccctgtttgcagatgacaagattgtatatctagaaaaccccatcgtctcagcccaaaatctccttaagctgataggcaacttcagcaaagtctcaggatacaaaatcaatgtacaaaaatcacaagcattcttatacaccaataacagacaaacagaaagccaaatcatgagtgaactcccattcacaattgcttcaaagagaataaaatatttaggaatccaacttacaagggatgtgaaggacctcttcaaggagaactacaaaccactgctcaatgaaataaaagaggatacaaagaaatggaagaacattccatgctcatgggtaggaaaaatcaatatcatgaaaatggccatactgcccaagaaacttctcacactgaaagctctagaactaaatcccagtggtgttgatactcccaaaatgctcaggaagagtctttcttttgagcagcaatgcactgaagtttcccagttgaccctccacatctga

SEQ ID NO: 122768 - DNA, 1842 bp, Homo sapiens; identical to SEQ ID NO: 114618

SEQ ID NO: 122769 - DNA, 1593 bp, Homo sapiens; identical to SEQ ID NO: 121955

SEQ ID NO: 122770 - DNA, 1578 bp, Homo sapiens
atgggagactttaacaccacactgtcaacattagagagatcagcgagacagaaagttaacaaggatatccaggaattgaactcaggtctgcaccaagcagacttaatagacatctacaaaactgtcaaacccaaatcaacagaatatacattcttctcaggaccacaccgcacttattccaaaattgaccacatagttggaagtaaagcactcctcagcaaacgtaaaagaacagaaattataacaaactgtctctcagaccacagtgcaatcaaactagaactcaggattaagaaactcactcaaaaccgctcaactacatggaaactgaacaacctgttcctgaatgactactgggtacataacaaaatgaaggcagaaataaaaatgttctttgaaaccaacgagaacaaagacacaacataccagactctctgggacacatttaaagcagtgtgtagagggaaatttatagcgctaaatgcccacaagagaaagcaggaaagatccaaaattgacaccctaacatcacaattaaaagaactagagaagcaagagcaaacacattcaaaagttagcagaaggcaagaaataactaagatcagagcagaactgaaggagatagagacacaaaaaacccttcaaaaaatcaatgaatccaaaatacaaactaccatcagagaatactataaacacctctatgcaaataaactagaaaatttagaagaaatggataaattccttgacacatacaccctcccaagactaaatcaggaagaagtagaatctcttaatagaccaataacaggctctgaaattgaggcaataattaacagcttaccaaccaaaaaaagtccaggaccagatggattcacagccgaattctaccagaggtataaggaggagctgaccaatatccttgatgaacatcgatgcaaaatcctcaataaaatactggcaaatggaatccagcacgacatcaaaaagcttatccacgatgatcaagtgggcttcatccctgggatgcaaggctggttcaacatacgcaaatcaataaacgtaatccagcatgtaaatagaaccagagacaaaaaccacatgattatctcaatagatgcagaaaaggcctttgacaaaattcaacagcccttcatgctaaaaactctcaataaattaggtattgatgggatgtatctcaaaataataagagctatgtatgacaaacccacagccaatatcatactgaatgggcaaagactggaagcattccctttgaaaactggcacaagacagggatgccctctctcaccactcctattcaacatagtgttggaagttctggccagggcaatcgggcaagagaaagaaataaagggtattcaattaggaaaagaggaagtcaaattgtccctgtctgcagatgacatgattgtatatctagaaaaacccatcatctcagcccaaaatctctttaagctgataagcaacttcagcaaagtctcagatacaaaatcaatgtacaaaaatcacaagcattcttatacaccaataacagacaaacagagagccaaatcatga

SEQ ID NO: 122771 - DNA, 2982 bp, Homo sapiens
atgggcaattacaacctctacccaataattaccatcctaagccatgaagtggagcaggccatgtccctgtgtgttcatccaaagacaatagtgtcccaagatgaggtggaaagtgagaaatggtacctgtctacagacttcccttcaacatccatcaagacagagccaattacagacgaaccacccccaggactcgttccgtctgtcactctgaccatcacagccatctccaccccgttggaaaaggaggaacctcctctggaaatgaacactggggttgattcctcgtgccagaccattattcctaaaattaagctggagcctcatgaagtggatcagtttctaaacttctctcctaaagaagccccagtggaccacctgcatttgccgcccacccctccgagcagtcacggcagtgactcagagggcagcctgagtcccaacccacgcctgcaccccttcagcctgcctcagacccacagcccctccagagctgcaccccgggccccctccgccctctccagctcccctctcctcacggctcctcataaactgcagggatcaggccctctggtcctgacagaggaggagaagaggaccctgatcgctgagggctatcccatccccaccaaattgcccctgtcaaaatcagaggagaaggccctgaagaaaattcggaggaagatcaagaataagatttctgctcaggaaagtaggagaaagaagaaagaatacatggacagcctggagaaaaaagtggagtcttgttcaactgagaacttggagcttcggaagaaggtagaggttctagagaacactaataggactctccttcagcaactccagaagcttcagactttggtgatgggcaaggtttctcgaacctgcaagttagctggcacgcagactggcacctgcctcatggttgtggtgctgtgctttgccgttgcattcggcagcttctttcaaggctacgggccctatccttctgccaccaagatggctctgcccagccagcattccctgcaggagccctacacagcctccgtggaaaatctagaagaaatggataaattcttggacaaatccacccttccaagactaaaccaggaagaagatgaatctctgaatagacaagtaacaggctctgaaattgaggcaataattaatagcctaccaaccaaaaagagtccaggaccagatggattcacagacaaattctgccagaggtacaaagaggagctggtaccattccttctgaaactattccaatcaacagaaaaagagggaatcctccttaactcattttatgaggccggcatcatcttgataccaaagcctggcagagacacaacaaaaaaagagaattttagaccaatatccctgatgagcatcaatgcaaaaatcctcaataaaatactggcaaaccgaatcctgcagcacatcaaaaagcttatccatcacgatcaagtcggcttcatccttgggatgcaaggctggttcaacatatgcaaatcaataaacataatccattgcataaacagaaccaatgacaaaaaccacatgattatctcaatagatgcagaaaaggccttcaacaaaattcaacagcccttcatgctaaaaactctcaataaactggtgttggaagttctggccaaggcaatcaggcaagagaaagaaataaagggtattcaattaggaaaagaggaagtgaaattgtctctgtttgcagatgacatcattgtatatttagaaaaccccatcgtctcagccccaaatctccttaagctgataagcaacttcagaaaagtctcaggatacaaaatcaatgtgcaaaaatcacaagcattcctatacaccaataacagacaaacagagagccaaatcatgagtgaactcccattcacaattgctacaaagagaataaaataccaaggaatccaacttacaagggatgtgaaggacctcttccaggagaattacaaaccagtgctcaacgaaataaaagaggacacaaacaaatggaagaacattccgtgctcatggttaggaagaatgaacatcgtgaaaatggccatactgcccaaggtaatttatagattcaatgccatccccatcaagctatcaatgactttcctcacagaattggaaaaaactactttaaagttcgtatggaaacaaaaaggagcccacattgccaagacaatcctaagcaaaaacaacaaagctggaggcatcatgctacctgacttcaaactatactacaaggctacagtaaccaaaacagcatggtactggtaccaaaacagagagatagaccaatggaacagaacagagccctcagaaataataccacacatctacaaccatctgatctttgacaaacctgacaaaaacaagaaatggggaaaggattccctatttaataaatggtgctgggaacactggctagccatatgtagaaagctgaaactagatcccttccttacaccttatacaaaaattaattcaagatggattaaagacttaaatgttagacctaaaaccataaaaactctagcaggacacctaggcaataccattcgggacataggcttgggcaaggacttcatgactaaaacaccaaaagcaatggcaacaaaagccaaaatagacaaatgggatctaattaaactaaagagcttctgcacagcaaaagaaacggccatcagagtgaataggcaacctacagaatgggagaaaatttttacaatctacccatctgacacagggctaatacccagaatctacaaagaacttaaacaaatttacaagagaaaacaaacagcccatcaagaactgggcaaaggatatgaacagatgtttctcaaaagaagacatttatgcagccaacagacacatgaaaaaatgctcatcatcactggccatcagagaaatgcaaatcaaaaccacaatgagataccagctcacaccagttag

SEQ ID NO: 122772 - DNA, 1155 bp, Homo sapiens
atggaggtgaaagccaaggctcgagaactacgtgaagaatgcagaagcctcaggagccgatgcgatcaactggaagaaagggtatcagtgatggaagatgaaatgaatgaaatgaagcgagaagggaagtttagagaaaaaataaaaagaaacgagcaaagcctccaagaaatatgggactacgtgaaaagaccaaatctacgtctgattggtgtacctgaaagtgacggggagaatggaaccaagttggaaaacactctgcaggatattatccaggagaacttcccaaatctagcaaggcaggccaatattcagatacaggaaatacagagaacgccacaaagatactcctcaagaagagcaactccaagacacataattgtcagattcactgaagttgaaatgaaggaaaaaatgttaagggcagccagagagaaagggtcggaaatacaaactaccatcagagaatactacaaacatccttacgcaaataaactagaaaatctagaagaaatggataaattcctcgacacatacaccctcctcccaagactaaacgaggaagaggctgaatctctgaatagatcaataagaggctctgaaattgtggcaataatcaatagcttaccaaccaaagagtccaggaccagatggattcacagccgaattctaccagaggcacaaggaggaactgctgataagcaacttcagcaaatctcaggatacaaaattgatgtgcaaaaatcacaagcattcttatacaccaataacagacaaacagagagccaaatcctgagtgaattcccattcacaattgcttcaaagagagtaggatacctaggaatccaacttacaagggacgtgaaggacctcttcaaggagaactgcaaaccactgctcaatgaaataaaaaaggatacaaagaaatggaagaacattccatgctcatgggtaggaagaatcaatatcatgaaaatggccatactgcccaaggtaatttatagattcaatgccatccccatcaagctaccaatgactttcttcacagaattggaaaaaaactactttaaggttcatatggaaccaaaaaagagaccacattgccaagtcaatcctaagccaaaagaacaaagctggaagcatcacgctacctga

SEQ ID NO: 122773 - DNA, 1827 bp, Homo sapiens
atggggaaaaaacagagcagaaaaactggaaactttaaaaagcagaggcacctttccttctccaaagggatcgcagttcttcaccagcaatggaacaaagctggacagagattgacttttgacgagttgagagaaggcttcagaccatcaaactattccaagctacagaaggaaattcaaaccaaaggcaaagaagttgaaaactttgaaaaaaattcagatgaatgtataactagaataaccaatacaaagaagtgcttaaaggagctgatggagctgaaagccaaggctcgagaactacgtgaagaatgcagaagcctcaggagccgatgtgatcaactggaagaaagggtatcagggatggaagatgaagcgaatgaaatgaagcgagaagggaagtttggagaaaaaagaataaaaagaaacgaacaaagcctccaagaaatatgggactatgtgaaaagaccaaatctacgtctgattggtgtacctgaaagtgacggagagaatggaaccaagttgaaaaacactctgcaggatattatccaggagaacttccccaatctagcaaggcaggccaacattcagattcaggaaatacagagaacgccacaaagatactcctcgagaagagcaactccaagacacataattgtcagattcaccaaagtcgaaggaaaaaatattaagggcagccagagagaaagggcggaaatacaaaccaccatcagagaatactacaaacacctctactcaaataaactagaaaatctagaagaaatggataaattcctcgacacatacaccctcccaagcctaaaccaagaagaagttgaatctctgaatagaacaataacaggatctgaaattgtggcaataattaatagcttaccaaccaaaaagagtccaggaccagatggatttacagctgaattctaccagaggtacaaggaggaagtggtaccattccttctgaaactattccaatcaatagaaaaagaggttatcctccctaactcattttatgaggccagaatcatcctgataccaaagcctggcagagacacaaccaaaaaagagaattttagaccaatatccttgatgaacattgatgcaaaaatcctcaataaaatactggcaaaccgaatccagcagcacatcaaaaagcttatccaccatgatcaagtgggcttcatccctgggatggcaattaggcaggagaaggaaagaaagggtattcaattaggaaaagaggaagtcaaattgtccctgtttgcagatgacgtgattgtatatctagaaaaccccatcgtctcagcccaaaatctcctcaagctgataagcaacttcagcaaagtctcaggatacaaaatcaatgtgcaaaaatcacaagcattcttatacaccaataacagacaaagagagagccaaataatgagtgagctcccatttacaattgcttcaaaaagaataaaatggctaggaatccaacttacaagggatgtgaaggacctcatcaaggagaactacaaaccactgctcaatgaaataaaagaggatataaacaaatggaagaacattccatgctcatgggtaggaagaatcagtatcgtgaaaatggccatactgcccaaggtaatttatagattcagtgccatccccatcaagctaccaatgactttctttacagaattggaaaaaactacttttaaacttcttatggaaaccaaaaaagagcccgccatcgccaagtcaatcctaagccaaaagaacaaactggaggcatcacgctacctgacttcaagctatactacaaggctacagtaa

SEQ ID NO: 122774 - DNA, 1554 bp, Homo sapiens
atggaaaaattcctcgacacatacaccctcccaagactaaaccaagaagaacttgaatccctgaacagaccaataacaggctctgaaattgaggcaataattaatagcctaccaaccaaaaaaagtccaggaccagacggattcagagccaaattctaccagaggtacaatgaggagctggtaccattccttctgaaaatattccaatcaatagaaaaagagggaatcctccctaactcattttatgaggccagcattatcctgataccaaagcctggcagagacacaaccaaaaaagacaattttagaccaatatccctgatgaacatcgctgtgaaaattctcaataaaatactggcaaaccaaatccagaagcacatcaaaaagtttatccaccatgatcaagttggcttcatcccagggatgcaaggctggttcaacatacgaaaatcaataaacgtaatccagcatataaacagaaccaaagacaaaagccacatgattatctcaatagatgaagaaaaggcctttgacaaaattcatctgcctttcatgctaaaaactctcagtaaattaggtattgatgggatgtatctcaaaataataagagctatttatgacaaacccacagccaatatcatactgaatgggcaaaaactggaagcattccctttgaaaactggcacaagacagagatgccctctctcaccactcctatgcaacatagtgttggaagttctggccagggcaatcaggcaggagaaagaaataaagggtattcaattaggaaaagaggaagtcaaattgtccctgtttgcagatgacatgattgtatatttagaaaaccccactgtctcagcccaaaatctccttaagctgataagcaacttcagcaaagtctcaggatacaaaatcaatgtgcaaaaatcacaagcattcttatacaccaataacagacaaacagagagccaaatcatgagtgaactcccatttacaattgcttcaaagagaataaaatacctaggaatccaacttacaagggatgtgaaggaactcttcaaggagaactacaaaccactgctcaacaaaataaaagaggatacaaacaaatggaagaacattccatcctcatggatgggaagaaaatatcatgaaaatggccatactgcccaagggacatggatgaagctggaaatcatcgttctcagcaaactaccccaagaacaaaaaaccaaacaccgcatgttctcactcacaggtgtatttatagaaggtagggcactacagaacaagtcagaaacatcccagtctagacaccctggagccactcattctctccctgaatatactataccaggttcttcaccaagtaatttctattggtttactttaggattaaaggaagaagtgacttcagggtggaagagagagaagaagaaaaggaagagagaaggagggaaagaaggaaggaaggaaggaaggaaggaaggaaggaaggaaggaaagaaggaaggaaggaagaaaggaaggaaggaagttcctttgataccctga

SEQ ID NO: 122775 - DNA, 1986 bp, Homo sapiens; identical to SEQ ID NO: 118546

SEQ ID NO: 122776 - DNA, 2439 bp, Homo sapiens
atggataaattcctcgacacatacactctcacaagactaaaccaggaagaagttgaatctctgaatagaccaataataggctctgaaattgaggcaataattaatagcttaccaaccaaaaaaagtccaggaccagatggattcacagctgaattctaccagaggtacaaggaggagctgctgataggcaacttcagcaaagtctcaggatacaaaatcaatgtgcaaaaatcacaagcattcctatacaccaataacagacaaacagagagccaaatcgtgagtgaactcccactcacaattgcttcaaagagaataaaatacctaggaatccaacttacaagggatgtgaaggacctctgcaaggagaactacaaaccactgctcaatgaaataaaagaggatacaaacaaacggaagaacattccatgctcatgggtaggaagaatcaatattgtgaagatggccatactgcccaagatcagctgcagcagcagtgcctggagcttgttagaaattctgattctcaggccccttcccccagacctgctggagcagtgtcttcaggttaacaagatctacgagtgtttcataaggaagttaaagatgaggcctggaatttccaccattaatgcttcatttcattggcttgagtggagaaggcccatgggcctccaatatgaaagcagttgtttcaggaatggtgagtacattgatacaggacagtctgaacaccttagtttgaattatctaagagtaagctatgtcacagggaatcgaatgaagctgcggaccctcacggtgagtgttacagctcttaaagatggtgtttctggagtttgctccttcagatgttcagatgtgtctggagtttcttccttccagtgggttcgtggtctcgctgacttcaggagtgaagctgcagacctttgcaattggtttccacatttacgaaaaggaaaaggcaggagaagaggggcatggctggccctctctaagatggagtggcaaatccacatggctttggagcacagtgggccagcaaatctgagaaacagctgtttctccgcacgatacccccagcacaccccagccaccctgtcatccccggaggctattcctcagaagccagctgttgtgagtgagaagatgaaagttgtgttgttgttattgccaaaaccatttatcttcatggagtcatctgagttctccacaagcaaagatggatggagaagtaaaagaaaagccatgggtgccatagctgagaggaagagcaagaatgaacagaatggtgatgggaagaagacactggagcccttcccagcagaatccaatggggaagaagagacaagggtcttgaattactttccatcccatttgtacagagtcagaactggggctattagagagtatggatcaattgctactctacagaaagcaggtaacaccaagccagagggcgctcaattcattatcagccattatcaaacatcaaaatgtaagaagaaagggccttctcctgtggtagtgattccctccacaggtataacttatttctcaactgcaggtgctctgggctctgaacagggcaagggtagacacagggatggcatggttgaggcagaacctggaagggcatgggtttcaggaagtggggtttattacagtccaaatgacaaaaccttctgtgccgagttgcatgccgacagtgctcagactgcagcaaggggatggatgcagccccttctggcattctctgggttttacgaactcactacatcaccatgcatggagatggggcagacctctctctgggccttggttatcctctatgttagacgactaaccctcagttattgttacctcgttttggcctcatcaggaattcagagggccagttaccccaagagaagactacagaaaataacagcagtgaaagccaacatttgtgactgctgtctgtattccagatgcggcaccaaggcctttatatctgctgtttcatttgagctaggcttgctgaggctgaaggtggcacagtcatgtggtggggtatctgagtgtgaggtagtgcagacaagttatttgtttgcctatgagagaaatgagatagatattattcaccatcagaatgctaatgaaaaagtccttgcctgggaagaccacaggtgctttgtttttcagggagttgtaatttcacgtggaaagaaggaagtggattctgggtgggctttgagggagcactgccctttccccactcccctaactcagagctggattcctgtaagtgtggagattggctgggagatgagggtccatcaggggaagaccagtgtttatattgctgaagatgaagatgatggagatggtgatggagatggtgcagaagtagtaggagatggatttgattcctacaagacagaatgtgagaagttttga

SEQ ID NO: 122777 - DNA, 3139 bp, Homo sapiens
atggtaaagggatcaattcaacaagaggagctaactatcctaaacatttatgcacccaatacaggagcacccagattcataaagcaagtcctgagtgacctacaaagagacttagactcccacacattaataatgggagactttaacaccccactgtcaacattagacagatcaacgagacagaaagtcaacaaggatacccaggaattgaactcagctctgcaccaagcagacctaatagacatctacagaactctccaccccaaatcaacagaatatacatttttttcagcaccacaccacacctattccaaaattgaccacatagttggaagtaaagctctcctcagcaaatgtaaaagaacagaaattataacaaactatctctcagaccacagtgcaatcaaactagaactcaggattaagaatctcactcaaagccgctcaactacatggaaactgaacaacctgctcctgaatgactactgggtacataacgaaatgaaggcagaaataaagatgttctttgaaaccaacgagaacaaagacaccacataccagaatctctgggacgcattcaaagcagtgtgtagagggaaatttatagcactaaatgcctacaagagaaagcaggaaagatccaaaattgacaccctaacatcacaattaaaagaactagaaaagcaagagatcaacaaaattgatagaccgctagcaagactaataaagaaaaaaagagagaagaatcaaatagacacaataaaaaatgataaaggggatatcaccaccgatcccacagaaatacaaactaccatcagagaatactacaaacacctctacacaaataaactagaaaatctagaagaaatggatacattcctcgacacatacactctcccaagactaaaccaggaagaagttgaatctctgaatagaccaataacaggatctgaaattgtggcaataatcaatagtttaccaaccaaaaagagtccaggaccagatggattcacagccgaattctaccagaggtacaaggaggaactggtaccattccttctgaaactattccaatcaatagaaaaagagggaatcctccctaactcattttatgaggccagcatcattctgataccaaagccgggcagagacacaaccgaaaaagagaattttagaccaatatccttgatgaacattgatgcaaaaatcctcaataaaatactggcaaaccgaatccagcagcacatcaaaaagcttatccaccatgatcaagtgggcttcatccctgggatgcaaggctggttcaatatacgcaaatcaataaatgtaatccagcatataaacagagccaaagacaaaaaccacatgattatctcaatagatgcagaaaaagcctttgacaaaattcaacaacccttcatgctaaaaactctcaataaattaggtattgatgggatgtatttcaaaataataagagctatctatgacaaacccacagccaatatcatactgaatgggcaaaaactggaagcattccctttgaaaactggcacaacacagggatgccctctctcaccgctcctattcaacatagtgttggaagttctggccagggcaatcaggcaggagaaggaaataaagggtattcaattaggaaaagaggaagtcaaattgtccctgtttgcagacgacatgattgtttatctagaaaaccccatcgtctcagcccaaaatctccttaagctgataagcaacttcagcaaagtctcaggatacaaaatcaatgtacaaaaatcacaagcattcttatacaccaacaacagacaaacagagagccaaatcatgagtgaactcccattcacaattgcttcaaagacaataaaatacctaggaatccaacttacaagggatgtgaaggacctcttcaaggagaactacaaaccactgctcaaggaaataaaagaggacacaaacaaatggaagaacattccatgctcatgggtaggaagaatcaatatcgtgaaaatggccatactgcccaaggtaatttacagattcaatgccatccccatcaagctaccaatgactttcttcacagaattggaaaaaactactttaaagttcatatggaaccaaaaaagagcccgcatcgccaagtcaatcctaagccaaaagaacaaagctggaggcatcacactacctgacttcaaactatactacaaggctacagtaaccaaaacagcatggtactggtaccaaaacagagatatagatcaatggaacagaacagagccctcagaaataatgccgcatatctacaactatctgatctttgacaaacctgagaaaaacaagcaatggggaaaggattccctatttaataaatggtgctgggaaaactggctagccatatgtagaaagctgaaactggatcccttccttacaccttatacaaaaatcaatccaagatggattaaagatttaaacgttagacctaaaaccataaaaaccctagaagaaaacctaggcattacctttcaggacataggcgtgggcaaggacttcatgtccaaaacaccaaaagcaatggcaacaaaagccaaaattgacaaatgggatctaattaaactaaagagcttctgcacagcaaaagaaactaccatgagagtgaacaggcaacctacaacatgggagaaaattttcgcaacctacgcatctgacaaagggctaatatccagaatctacaatgaactcaaacaaatttacaagaaaaaaacaaacaaccccatcaaaaagtgggcgaaggacatgaacagacacttctcaaaagaagacatttatgcagccaaaaaacacatgaagaaatgctcatcatcactggccatcagagaaatgcaaatcaaaaccactatgagatatcatctcacaccagttagaatggcaatcattaaaaagtcaggaaagaacagacgcacagcaactttaagtttgctgccagctatacgtcatgaaagggaagcttttcatcaaagggaagaagaaaaggaagggggaagaatcctacctttacaaaacagagtaattctttgcttctgctccctttgcccacatctctcacctgcgtccaaaccaaaacaca

SEQ ID NO: 122778 - DNA, 3558 bp, Homo sapiens
atgttctttgaaaccaacgagaacaaagacacaacataccagaatctctgggacacattcaaagcagtgtgtagaggaaaatttatagcactaaatgcccacaagagaaagcaggaaagatctaaaattgacaccctaacatcacaattaaaagaactagagaagcaagagcaaacgcattcaaaagctagcagaaggcaagaaataactaagatcagagcagaactgaaggaaatagagaaacaaaaaacccttcaaaaaatcaatgaatccaggagctggttttttgaaaagatcaacaaaattgatagaccgctagcaagactaataaagaagaaaagagagaagaatcaaatagacacaataaaaaatgataaagatatcaccactgatcccacagaaatacaaactaccatcagagaatactataaacacctctatgcaaataaactagaaaatctagaagaaatggataaattcctcgacacatacaccctcccaagactaaaccaggaagaagttgaatctctgaatagaccaataacaggctctgaaattgaggcaataattaatagcttaccaaccaaaaaaagtgcaggaccagatggattcacagccgaattctaccagaggtacaaggaggagctgcatataaacagaaccaaagacaaaaaccatatgattatctcaacagatgcagaaaaggcctttgacaaaattcaacaactcttcatgctaaaaactctcaataaattaggtattgatgggacatatctcaaaataaaaagagctatctatgacaaacccacagccaatatcatactgaatgggcaaaaactggaagcataccctttgaatactggcacaagacagggatgccctctctcaccactcctattcaacatagtgtgggaagttctggccagggcaatcaggcaggagaaggaaataaagggtattcaattaggaaaagaggaagtcaaattgtccctgtttgcagatgacgtgattgtatatctagaaaaccccatcatctcagcccaaaatctccttaagctgataagcaacttcagcaaagtctcaggatacaaaatcaatgtgcaaaaatcacaagcattcttatacaccaataacagacaaacagagagccaaatcatgagtgaactcccattcacaattgcttcaaagagaataaaatacctaggaatccaacttacaagggatgtgaaggacctcttcaaggagaacaacaaatcactgctcaatgaaataaaacaggatacaaacaaatggaagaaccttccatgctcatgggtaggaagaatcaatatcgtgaaaatggccatactgcccaaggtaatttatagattcaatgccatccccatcaagctaccaatgactttcttcacagaattggaaaaacctactttaaagttcatatggaaccaaaaaagagcccgcattgccaagtcaatcctaagccaaaagaacaaagctggaggcatcacgatacctgacttcaaactatactacaaggatacagtaaccaaaacagcatggtactggtaccaaaacagagatctagaccaatggaacagaacagagccctcggaaataatgccgcatatctacaaccatctgatctttgacaaacctgacaaaagcaaggaatggggatatgattccctatttaataaatggtgctgggaaaactggctagccatatgtagaaagctgaaactggatcccttccttacactttatacaaaaattaattcaagatggattaaagacttaaatgttagacataaaaccataaaagccctagaagaaaacctaggcaataccattcaggacatagacatgggcaaggacttcatgtctaaaacaccaaaagcaatggcagcaaaagccaaaattgacaaatgggatctaattaaactaaacagcttctgcacagcaaaagaaactaccatcagagtgaataggcaacctacagaatgggagaaaatttttgcaatctactcatctgacaaagggctaatatccagaatctacaatgaactcaaacaaatttacaagaaaaaaacaaacaaccccatcaaaaagtggacgaaggatatgaacagacacttctcaaaagaagacttttacgcagcccaaagacacatgaaaaaatgttcatcatcactggccatcagagaaatgcaaatcaaaaccacataccatgctggaccagatggatttacagccgaattctaccagaggtacaaggaggaactggtaccattccttctgaaactattccaatcaatagaaaaagagggaatcctccctaactcattttatgaggccagcatcatcctgataccaaagcctggtagagacacaaccaaaaaagagaattttagaccaatatccttgatgaacattgatgcaaaaatcctcaataaaatactggcaaaacgaatccagcagcacatcaaaaagcttatccaccatgatcaagtgggtttcatccctgggatgcaaggctggttcaatatatgcaaatcaataaacgtaatccagcatataaacagaaccaaagacaaaaaccacatgattatctcaatagatgcagaaaaggcctttgacaaaattcaacaactcttcatgctaaaaactctcaataaattaggtattgatgggacgtatctcaaaataataagagctatctatgacaaacccacagccaatatcatactgaatgggcaaaaactggaagcattccctttgaaaactggcacaagacagggatgccctctctcaccactcctattcaacatagtgtgggaagttctggccagggcaatgaggcaggagaaggaaataaagggtattcaattaggaaaagaggaagtcaaattgtccctgtttgcagacgacatgattgtgtatctagaaaaccccattgtctcagcccaaaatctccttaagctgataagcaacttcagcaaagtctcaggatacaaaatcaatgtacaaaaatcacaagcattcttatacaccaataacagacaaacagagagccaaatcatgagtgaactcccattcacaactgcttcaaagagaataaaatacctaggaatccaacttacaagggatgagaaggacctcttcaaggagaactacaaaccactgctcaatgaaataagaggatacaaacaaatggaagaacattccatgctcacgggtaggaagaatcaatatcgtgaaaatgctcatactgcccaagctaaggcgaaccacaggccagccacatccaaaaaggtttacctgattacggcaatgaagccactgtccagtcctattcctgaaggtttggggctagaaaacagaacaggaaaggaaatcaagagtagagaatggaccaccatgttaagattggctgtagctgctgaactaacctttagagattggaaggagcggtctcggaggactttggacacacatgaaacaaaggggattcccttaagtaaaagcagagcaggcattctggtgattgacattagatag

SEQ ID NO: 122779 - DNA, 2133 bp, Homo sapiens; identical to SEQ ID NO: 117579

SEQ ID NO: 122780 - DNA, 3054 bp, Homo sapiens
atgggagactttaacaccgcactgtcaacattagacagatcaatgagacagaaagttaataaggatatccaagaattgaactcagctctgcaccaagcagacctaacagacatctacggaactctccaccccaaatcaacagaatgtacattcttctcagcaccacaccacacctattccaaaattgtccacatagttggaagtaaagcactcctcagcaaatggaaaagaagagaaattataacaaactgtctctcagaccacagtgcaatcaaactagaactcaggattaagaaactcaatcaaaactgctcaactacatggaaactgaacaacctgctcctgaataattactggactaataaagaagaaaagagagaagaatcaaatagatgcaataaaaatgataaaggggatatcaccaccaatcccacagaaatacaaactaccatcagagaatactataaacacctctatgcaaataaactagaaaatctagaagaaatggataaattcctcgacacatacaccctcccaagactaaaccaggaagaagttgaatctctgaatagaccaataacaggctctgaaattgaggcaataattaatagcttaccaaccaaaaaaagtccaggaccagatggattcacagccgaattctaccagaggatgaactacatttctttcaaaagcacctggaaaattataaagaatgcatacagtttagcccatagccgagaactgagagatggaggtcaaagtcagaaaatctgcgaacagttttatattttgttcctgacacacttctccagatatgagcgacatgttaaagaacatacagtggagaaatccaactcatacagtcctgaaaagattagaaaagaagaatctaaacaggatacaaagctcaatgatgaaaatgactctgaaaggaaagcctcagttcatctgctggaaacagacaactgtgcttctgcaatgcatcactgttttgttttgtttgtggcaaagccagtagctcattatgaagtgggtattgactttatgattgccaaacaaatgcacagggatattttatcaagagctgtggattcttatttactgaacagaattcgttccaatgtccagaataatatgctgaagcagccatttacaaaagcaagccacaaccctttaccattgtccttcagcaggcagccagcctcagggggtctgcagatagcaacttgtggcaccaatgtcttcctttatataatgcacgtatcaccatcacgatacgagagcaactcgaagaatcttaacgtataccacggtaaacacctacggcacccaactcagtctacagcaggacacccaaaagttaaattcactttggctgtggctgtgctccaggggtctgggactgtctgcatctctgaaacaactcctgtgttggaagttctggccagcgcaatcaggcaggagaaggaaataaagggtattcaattaggaaaagaggaagtcaaattgtccctgtttgcagacgacatgattgtttatctagaaaaccccatcgtctcagcccaaaatctccttaagctgataagcaacttcagcaaagtctcaggatacaaaatcaatgtacaaaaatcacaagcattcttatacaccaacaacagacaaacagagagccaaagcatgggtgaactcccattcacaattgcttcaaagagaataaaatacctaggaatccaacttacaagggatgtgaaggacctcttcaaggagaactacaaaccactgctcaaggaaataaaagaggacacaaacaaatggaagaacattccatgctcatgggtaggaagaatcaacatcgtgaaaatggccatactgcccaaggtaatttacagattcaatgccatccccatcaagctaccaatgactttcttcacagaattggaaaaaactactttaaagttcatatggaaccaaaaaagagcccgcatcgccaagtcaatcctaagccaaaagaacaaagctggaggcatcacactacctgacttcaaactatactacaaggctacagtaaccaaaacagcatggtactggtaccaaaacagagatatagatcaatggaacagaacagagccctcagaaataatgccgcatacctacaactatctgatctttgacaaacctgagaaaaacaagcaatggggaaaggattccctatttaataaatggtgctgggaaaactggctagccatatgtagaaagctgaaactggatcccttccttacaccttatagaaaaatcaattcaagatggattaaagatttaaatgttagacctaaaaccataaaaaccctagaagaaaacctaggcattaccattcaggacataggcgtgggcaaggacttcatgtccaaaacaccaaaagcaatggcaacaaaagccaaaattgacaaatgggacctaattaaactaaagagcttctgcacagcaaaagaaagtaccatcagagtgaacaggcaacctacaacatgggagaaaattttcacaacctactcatctgacaaagggctaatatccagaatctacaaagaactcaaacaaatttacaagaaaaaaacaaacaaccccatcaaaaagtgggtgaaggacatgaacagacacttctcaaaagaagacatttatgcagccaaaaaacacatgaaaaaatgctcatcatcactggccatcagagaaatgcaaatcaaaaccactatgagatatcatctcacaccaacccagaaagaagagggcagcacacctcagggccagcaggaggaaggggagtcatccaggacatgtactctcaactggcggttgggaagaagacagaaagagatagacatgtgggtcgaagtctttactggggtccgtcgtgttacccaaggtacagttgtcagagaaggctgtggtgaagttgtgctgagatccgggatgccagtcttcaggcttcagtggtggcagcagggagctgactgtgcctgcccttgggcccaaggtggcatacattggtaccagtgttag

SEQ ID NO: 122781 - DNA, 2709 bp, Homo sapiens
atgggagactttaacaccccactgtcaacattagacagatcaatgagacagaaagtcaaaaaggatacccaggaattgaactcagctctgcaccaagcagacctaatagacatctacagaactctccaccccaaatcaacagaatatacatttttttcagcaccacaccacacctattccaaaattgaccacatacttggaagtaaagctctcctcagcaaatgtaaaagaacagaaattataacaaactatctctcagacggcagtgcaatcaaactagaactcaggattaagaatctcactcaaaaccgctcaactacatggaaactgaacaacctgctcctgaatgactactgggtacctaacgaaatgaaggcagaaataaagatgttctttgaaaccaacgagaacaaagacacaacataccagaatctctgggacgcattcaaagcagtgtgtagagggaaatttatagcactaaatgcccacaagagaaagcaggaaagatccaaaattgacaccctaacatcacaattaaaagaactagaaaagcaagagcaaacacattcaaaagctagcagaaggcaagaaataactaaaatcagagcagaactgaaggaaatagagacacaaaaaacccttcaaaaaattaatgaatccaggagctggttttttgaaaggatcaacaaaatagatagaccgctagcaagactaataaagaaaaaaagagagaagaatcaaatagatacaataaaaaatgataaaggggatatcaccaccaatcccacagaaatacaaactaccatcagagaatactacaaacacctctacgccaataaactagaaaatctagaagaaatggataaattccttgacacatacactctcccaagactaaaccaggaagaagttgaatctctgaatagaccaataacaggatctgaaattgtggcaataatcaatagcttaccaaccaaaaagagtccaggaccagatggattcacagccaaattctaccagaggtacaaggaggaactgcatataaacagagccaaagacaaaaaccacatgattatctcaatagatgcagaaaaggcctttgacaaaattcaacaacgcttcatgctaaaaactctcaataaattagtgttggaagttctggccagggcaattaggcaggagaaggaaataaagggtattcaattaggaaaagaggaagtcaaattttccctgtttgcagacgacatgattgtatatctagaaaaccccattgtctcagcccaaaatctccttaagctgataagcaacttcagcaaagtctcaggatacaaaatcaatgtacaaaaatcacaagcattcttatacaccaacaacagacaaacagagagccaaatcatgagtgaactcccattcataattgcttcaaagagaataaaatacctaggaatccaacttacaagggatgtgaaggacctcttcaaggagaactacaaaccactgctcaaggaaataaaagaggatacaaacaaatgcaagaacattccatgctcatgggtaggaagaatcaatatcgtgaaaatggccatactgcccaaggtaatttacagattcaatgccatccccatcaagctaccaatgcctttcttcacagaattggaaaaaactactttaaagttcatatggaaccaaaaaagagcccgcatcgccaagtcaatcctaagccaaaagaacaaagctggaggcatcatgctacctgacttcaaaccatactacaaggctacagtaaccaaaacagcatggtactggtaccaaaagagagatatagatcagtggaacagaacagagccctcagaaataacgccgcatatctacaactatctgatctttgacaaacctgagaaaaacaagcaatggggaaaggattccctatttaataaatggtgctgggaaaactggctggccatatgtagaaagctgaaactggatcccttccttacaccttatacaaaaatcaattcaagatggattaaagacttaaacgttagacctaaaaccataaaaaccctagaagaaaacctaggcaataccattcaggacataggcatgggcaaggacttcatgtctaaaacaccaaaagcaatggcaacaaaagacaaaattgacaaatgggatctaattaaacttaagagcttctgtacagcaaaagaaactaccatcagagtgaacaggcaacctacaaaatgggagaaaattttcacaacatactcatctgacaaagggctaatatccagaatctacaatgaactcaaacaaatttacaagaaaaaaacaaacaaccccatcaaaaagtgggcaaaggatatgaacagacacttctcaaaagaagacatttatacagccaaaagacacatgaaaaaatgctcatcatcactagccatcagagaaattcaaatcaaacccacaatgagatactatctcacaccagttagaatggcgatcattaaaaagtcaggaaacaacagaataaccattgttctgctccccggttcactaatagtgcggtcatttcacgtaactttaaatgcgattcttcttcatccgggtctcaccctctttagtccgtctgctggccgcagagatatcccaagagtagcattctcctacttggctttttcagctcaaccttctcacaacaccccagttaattaa

SEQ ID NO: 122782 - DNA, 2573 bp, Homo sapiens
atgtcaagtgaatgggagtggttgaggtgctcagaagttaaaggtcagagagacgtgaggccagggtgtttggggtgggactttcgtgtgtatattgttgaggacacccaggatgaggacagaacttggagtgtcaaggaagcctgtgagctggtccttagagttcaggaaatgatcatcacaagggtggtagatgctgcaccacaccacacctattccaaaattgaccacatagttggaagtaaagctctcctcagcaaatgtaaaagaacagaaattataacaaactgtctctcagaccacagtgcaatcaaactagaactcaggattaagaatctcactcaaagccgctcaactacatggaaactgaacaacctgctcctgaatgactactgggtacataacgaaatgaaggcagaaataaagatgttctttgaaaccaacgagaacaaagacaccacataccagaatctctgggacgcattcaaagcagtgtgtagagggaaatttatagcactaaatgcctacaagagaaagcaggaaagatccaaaattgacaccctaacatcacaattaaaagaactagaaaagcaagagcaaacacattcaaaagctagcagaaggcaagaaataactaaaatcagagcagaactgaaggaaatagagacacaaaaaacccttcaaaaaatcaatgaatccaggagctggttttttgaaaggatcaacaaaattgatagaccgctagcaagactaataaagaaaaaaagagagaagaatcaaatagacgcaataaaaaatgataaaggggatatcaccaccgatcccacagaaatacaaactaccatcagagaatactacaaacaactctacgcaaataaactagaaaatctagaagaaatggatacattcctcgacacatacactctcccaagactaaaccaggaagaagttgaatctctgaatagaccaataacaggctctgaaattgtggcaataatcaatagtttaccaaccaaaaagagtccaggaccagatggattcacagccgaattctaccagaggtacaaggaggaactggtaccattccttctgaaactattccaatcaatagaaaaagagggaatcctccctaactcattttatgaggccagcatcattctgataccaaagccaggcagagacacaaccaaaaaagagaattttagaccaatatccttgatgaacattgatgcaaaaatcctcaataaaatactggcaaaccgaatccaacagcacatcaaaaagcttatccaccatgatcaagtgggcttcatccctgggatgcaaggctggttcaatatacgcaaatcaataaatgtaatccagcatataaacagagccaaagacaaaaaccacatgattatctcaatagatgcagaaaaggcctttgacaaaattcaacaacccttcatgctaaaaactctcaataaattaggtattgatgggacgtatgtcaaaataataagagctatctatgacaaacccacagccaatatcatactgaatgggcaaaaactggaagcattccctttgaaaactggcacaagacagggatgccctctctcaccgctcctattcaacatagtgttggaagttctggccagggcaatcaggcaggagaaggaaataaagggtattcaattaggaaaagaggaagtcaaattgtccctgtttgcagacgacatgattgtttatctagaaaaccccatcgtctcagcccaaaatctccttaagctgataagcaacttcagcaaagtctcaggatacaaaatcaatgtacaaaaatcacaagcattcttatacaccaacaacagacaaacagagagccaaatcatgggtgaactcccattcacaattgcttcaaagagaataaaatacctaggaatccaacttacaagggatgtgaaggacctcttcaaggagaactacaaaccactgctcaaggaaataaaagaggatacaaacaaatggaagaacattccatgctcatgggtaggaagaatcaatatcgtgaaaatggccatactgcccaaggtaatttatagattcaatgccatccccatcaagctaccaatgactttcttcacagaattggaaaaaactactttaaagttcatatggaaccaaaaaagagcccgcattgccaagtcaatcctaagccaaaagaacaaagctggaggcatcacactacctgacttcaaactatactacaaggctacagtaaccaaaacagcatggtactggtaccaaaacagagatatagatcaatggaacagaacagagccctcagaaataacaccgcatatctacaactatctgatctttgacaaacctgagaaaatgagtataatagatacagggggatggtatgaggcaccagtcagttccttcttcaaggagggactatgccgcacaggtactgagaatcaggttaacagacagcctccagctgccagtcccttcaaggtttacgtcagctgcacggggtcacttcaccctaggccacactacttcttggagcatccatatccaag

SEQ ID NO: 122783 - DNA, 2036 bp, Homo sapiens
ggtattttactggatgaagcctcaggtgtaaacaagaatcaacagcctgtcctccctgccggcttgcaggtccccaaaacggtagtgtccagctggaaccgtaaggcagcagaatatggcaaaaaagcaaaatctgaaactttccggctgcttcatgcaaaaaatatcatccgacctcagctcaagtttcgagagaagattgacaattccaacacaccatttcttcctaaaatcttcatcaaacccaatgctcagaaacctctccctcaagctctctctaaggaaaggcgggaacgcccacaggatcgtcctgaggacttggacgtcccccctgcactggctgatttcatccatcagcagagaacccagcaggttgagcaagacatgtttgcacatccttatcaatatgaactaaatcactttaccccagcagatgcagtgcttcaaaagccacaaccccagcaccactcttacaggagcttcctgggactgacctgcctgatgcaaatttctactcggacggaagacttcatcattgacaccctcgagcttcgaagtgacatgtacattctcaatgagagcctcacagacccagccatcgttaagaagaatcaaatagacgcaataaaaaatgataaaggggatatcaccactgatcccacagaaatacaaactaccatcagagattactacaaacacctctacgcaaataaactagaaaatctagaagaaatggataaattcctcgacacatacactcttccaagactaaaccagaaagaaattgaatctctgaatagaccaataacaggagctgaaattgtggcaataatcaatagcttaccaaccaaaaagagtctaggaccagatggattcacagccgaattctaccagaggtacaaggaggaactggtaccattccttctgaaactattccaatcaatagaaaaagagggaatcctccctaactcattttatgaggccagcatcatcctgataccaaagccgggcagagacacaaccaaaaaagagaattttagaccaatatccttgatgaacattgatgcaaaaatcctcaataaaatactggcaaaccgaatccagcagcacatcaaaaagcttatccaccatgatcaagtgggcttcatccctgggatgcaaggctggttcaacatacgcaaatcaataaatgtaatgcagcgtataaacagaaccaaagacaaaaaccacgtgattatctcaatagatgcagaaaaggcctttgacaaaattcaacaacgcttcatgctaaaaactctcaataaattaggtattgatgggacgtatctcaaaataataagagctatctatgacaaacccacagccaatatcatactgaatgggcaaaaactggaagcattccctttgaaaactggcacaagacagggaggccctctctcaccactcctattcaacatagtgttggaagttctggccagggcaatcaggcaggagaaggaaataaagggtattcaattaggcaaagaggaagtcaaattgtccctgtttgcagatgacatgattgtatatctagaaaaccccattgtctcagcccaaaatctccttaagctgataagcaacttcagcaaagtctcaggatacaaaatcaatattcaaaaatcacaagcattcttatacaccaacaacagacaaacagagagccaaatcatgagtgaactcccattcacaattgcttcaaagagaataaaatacctaggaatccaacttacaagggatgtgaaggacctcttcaaggagaactacaaaccactgctcaatgaaataaaagaggatacaaatggaagaacattccatgctcatggggtaggttcagaaatgccatacaaaagtcaagtgctggaattggggaccccaaaagcctgtttggtgctctaccctcctgttggcatcctggtacctgaaaccaggaagtctcaagaggctcatccaaagcccttaatgtacctgggtgttgtggctgtttattcaggtcccac

SEQ ID NO: 122784 - DNA, 740 bp, Homo sapiens
attcgacgtcctaaaacggatggtcatcgtcttcaccaggaaggaggacctgtccgggggctccctgcacgattacgtgagcaacacagagaaccgggccttgcgcgagctggtggccgagtgcgggggccgggtctgtgcctttgataaccgggccaccggccgagagcaggaagcccaggtggagcagctgctggggatggtcgagggcttggtgctggagcacaagggcgcccattactccaacgaggtgtatgagctggcgcaggtgctgcgctgggcaggccctgaggagcggctccggcgggtggcggagcgcgtggcagccagggtgcagaggaggccatggggcgcctggctgtcggcccggctgtggaagtggctgaagtcccccaggagctggaggctgggcctggccctgctgctggggggcgcgctcctgttctgggtggtgctccacaggcggtggtcggaggccgttgcggaggtcgggcctagctgacagcgcaggtcctaaaactgaaggcaccttggttaagggaggctgaattcttggagctgaagggaaagcttcattccaacggaaggaatcctgtagtttcaggcatagttttaatgccacagaacgccctcttgcatcacctttgcgacttcgccaaaaaaaagggttcactttttaagaaaataacgcgtcgtccgctatggggggtcccagcattacgtacggttgctactacgtc

SEQ ID NO: 122785 - DNA, 527 bp, Homo sapiens
catagaccacgaggatctgagtctgaattggtgattattagaacaatgacttccatggggtgatacattagaagtgctccagggtccagagatttaaatgtaatgaaagatgaacaaaaaaaataaatgaaaaaaaagtatgctgcacaacaaatagaaaaacaaaaatctccataatgcaaaagcatcaagtgttcgcctctgagaagcgcctcgtatgcccagttactctcgttctccctcagctcttgcttgtgcttctccacctgccattccactttggcttggtactgcctgtagtcttcctggcaggccccagctccagttcttgggagcagctgggcatccaagaagaggtcattgctgtggaaggagccctctcgctccctccccagcttttcaatcacagccaggagctaggcctgctgctgcctctgctcctccacagagccccagttgttgaaggcacagtaccttctctcacactcccgcaccaggtctttcaggctgcagtagtccgagtgtgc

SEQ ID NO: 122786 - DNA, 4208 bp, Homo sapiens
agacacacataggctcaaaataaagggatggaggaagatttaccaagcaaatggaaaacagaaaaaggcaggggttgcaatcctagtctcagataaaacagaatttaaaccaacaaagatcaaaagagacaaagaaggccattacataatggtaaagggatcaattcaacaagaagagctaactatcctaaatatatatgcacccaatacaggagcacccagattcacaaagcaagtccttagagacctacaaagagacttagactccaacacaataataacgggagactttaacaccccactgtcaacattagacagatcaatgagacagaaagttaacaaggatatccaggaattgaactcagctctgcaccaagcagacctaatagacatctacagaactctccaccccaaatcaacagaaaatacattcttttcggcaccacaccacacctattccaaaattgaccacatagtgggaagtaaagcactcctcagcaaatgtaaaagaaaagaaattataacaaactgtctctcagaccacagtgcaatcaaactagaactcaggattaagaaactccctcaaaactgctcaactatatggaaactgaacaacctgctcctgaatgactactgggtacataacgaaatgaaggcagaaataaagatgttgtttgaaaccaatgagaacaaagacacaacataccagaatctctgggacacattgaaagcagtgtgtagagggaaatttatagcactaaatgcccacgggagaaaacaggaaagatctaaaattgacaccctaacatcacaattaaaagaactagcaaagcaagagcaaacacattcaaaagctagcagaaggcaagaaataactaagatcagagcagaactgaaggaaatagagacacaaaaaacccttcaaaaaattaatgaatccaggagctggttttttgaaaggatcaacaaaattgatagaccactagcaagactaataaagaaaaaaagagagaagaatcaaatagacacaataaaaaatgataaaggggatatcaccaccgatcccacagaaatacaaactaccatcagagaatactacaaacacctctacgcaaataaactagaaaatctagaagaaatggatacattcctcgacacatacactctcccaagactaaaccaggaagaagttgaatctctgaatagaccaataacaggctctgaaattgtggcaataatcaatagtttaccaaccaaaaagagtccaggaccagatggattcacagccgaattctaccagaggtacaaggaggaactggtaccattccttctgaaactattccaatcaataggaaaagagggaatcctccctaactcattttatgaggccagcatcattctgacaccaaagccgggcagagacacaaccaaaaaagagaattttagaccaatatccttgatgaacattgatgcaaaaatcctcaataaaatactggcaaaccgaatccagcagcacatcaaaaagcttatccaccatgatcaagtgggcttcatccctgggatgcaaggctggttcaatatacgcaaatcaataaatgtaatccagcatataaacagagccaaagacaaaaaccacatgattatctcaatagatgcagaaaaagcctttgacaaaattcaacaacccttcatgctaaaaactctcaataaattaggtattgatgggacgtatttcaaaataataagagctatctatgacaaacccacagccaatatcatactgaatgggcaaaaactggaagcattccctttgaaaactggcacaagacagggatgccctctctcaccgctcctattcaacatagtgttggaagttctggccagggcaatcaggcaggagaaggaaataaagggtattcaattaggaaaagaggaagtcaaattgtccctgtttgcagacgacatgattgtttatctagaaaaccccatcgtctcagcccaaaatctccttaagctgataagcaacttcagcaaagtctcaggatacaaaatcaatgtacaaaaatcacaagcattcttatacaccaacaacagacaaacagagagccaaatcatgggtgaactcccattcacaattgcttcaaagagaataaaatacctaggaatccaacttacaagggatgtgaaggacctccttcaaggagacctacaaaccactgctcaatgaaataaaagaggacacaaacaaatggaagaacattccatgctcatgggtaggaagaatcaatatcgtgaaaatggccatactgcccaaggtaatttatagattcaatgccatccccatcaagctaccaatgactttcttcacagaattggaaaaaactactttaaagttcatatggaaccaaaaaagagcccgcattgccaagtcactcctaagccaaaagaacaaagctggaggcatcacgctacctgacttcaaactatactacaaggctacagtaaccaaaacagcatggtactggtaccaaaacagagatatagatcaatggaacagaacagagccctcagaaataatgccgcctatctacaactatctgatctttgacaaacctgagaaaaacaagcaatggggaaaggattccctatttaataaatggtgctgggaaaactggctagccatatgtagaaagctgaaactggatcccttccttacaccttatacaaaaatcaattcaagatggattaaagatttaaacgttagacctaaaaccataaaaaccctagaagaaaacctaggcattaccattcaggacataggcgtgggcaaggacttcatgtccaaaacaccaaaagcaatggcaacaaaagccaacattgacaaatgggatctaattaaactaaagagcttctgcacagcaaaagaaactaccatcagagtgaacaggcaacctacaacatgggagaaaatttttgcaacctactcatctgacaaagggctaatatccagaatctacaatgaactcaaacaaatttacaagaagaaaacaaacaaccccatcaaaaagtgggcgaaggacatgaacagacacttctcaaaagaagacatttatgcagccaaaaaacacatgaagaaatgctcatcatcactggccatcagagaaatgcaaatcaaaaccactatgagatatcatctcacaccagttagaatggcaatcattaaaaagtcaggaaacaacagctcgagggaagcagccccgaagcctccgcggcggcggcggcggcggtcgcggatcctctccaggctgctcgcaaagtccggccggccggaggcagccgccaactcctctcaacttctgccgatccgctgggcgaagcaacacgcttcctgcgcgtctctcctaggggctgagccggtctccgagggtctcggccgcctccactccctggcgctgcacacaacttacgtggaggccaggcccgcgcggggggcccagagaaagccggcgccgggcgaggctcttgcaggttctcagacccgaacacagacctgggttagagttggggacttgcctgtaataagtgacttacccattgccctcaacctaaggaagccttgccatttaaaacctcccaatggagcctatcaaagcgtgcttcaaagtgtgagggaggctgagagaggaattacagaaccgcctgacattggctgcaacctgatggggagatctgactcaaggaacagtacgatggccattgatgtccccgcccacgcactctgtagaagccttgggaatcttttcaaagcactgcccccacccgagagcatcatgacttctgttgctgggacaaaggtaagaatcattaggaaacacgatcacagtagtgcacctgcttacgcacgatatccagcccagagaaggtcccgcttcctaagccctcctgagactcaccagccacaagcccacatctatactaagttctttcgaaggccctctttactgctggacattcttcctttgtgcaacacgttaataaacccaacttggttcagccacagcgctgcaatgaacattcacggcataaaaaggaatgagagcatgtcttttgcaggagcatggatggagctggaggttatcatccttagcaaactaacacaagaacagaaaaccaaataccgcaagttctcacttataagtgggcactaa

SEQ ID NO: 122787 - DNA, 2770 bp, Homo sapiens
atggggaaaaaacagaacagaaaaactggaaactctaaaacgcagagcgcctctcctcctccaaaggaacgcagttcctcaccagcaacagaacaaagctggatggagaatgattttgacgagctgagagaagaaggcttcagacgatcaaattactctgagctacgggaggacattcaaaccaaaggcaaagaagttcaaaactttgaaaaaaatttagaagaatgtataactagaataaccaatacagagaagtgcttaaaggagctgatggagctgaaaaccaaggctcgagaactacgtgaagaatgcagaagcctcaggagccgatgcgatcaactggaagaaagggtatcagcaatggaagatgaaatgaatgaaatgaagcgagaagggaagtttagagaaaaaagaataaaaagaaatgagcaaagcctccaagaaatatgggactatgtgaaaagaccaaatctacgtctgattggtgtacctgaaagtgatgtggagaatggaaccaagttggaaaacactctgcaggatattatccaggagaacttccccaatctagcaaggcaggccaacgttcagattcaggaaatacagagaacgccacaaagatactcctcgagaagagcaactccaagacacataattgtcagattcaccaaagttgaaatgaaggaaaaaatgttaagggcagccagagagaaagaaatacaaactaccatcagagaatactacaaacacctctacgcaaataaactagaaaatctagaagaaatggatacattcctcgacacatacactctcccaagactaaaccaggaagaagttgaatctctgaatagaccaataacaggctctgaaattgtggcaataatcaatagtttaccaaccaaaaagagtccaggaccagatggattcacagccgaattctaccagaggtacaaggaggaactggtaccattccttctgaaactattccaatcaatagaaaaagagggaatcctccctaactcattttatgaggccagcatcattctgataccaaagccgggcagagacacaaccaaaaaagagaattttagaccaatatccttgatgaacattgatgcaaaaatcctcaataaaatactggcaaaccgaatccagcagcacatcaaaaagcttatccaccatgatcaagtgggcttcatccctgggatgcaaggctggttcaatatacgcaaatcaataaatgtaatccagcatataaacagagccaaagacaaaaaccacatgattatctcaatagatgcagaaaaagcctttgacaaaattcaacaacccttcatgctaaaaactctcaataaattaggtattgatgggacgtatttcaaaataataagagctatctatgacaaacccacagccaatatcatactgaatgggcaaaaactggaagcattccctttgaaaactggcacaagacagggatgccctctctcaccgctcctattcaacatagtattggaagttctggccagggcaatcaggcaggagaaggaaataaagggtattcaattaggaaaagaggaagtcaaattgtccctgtttgcagacgacatgattgtttatctagaaaaccccatcgtctcagcccaaaatctccttaaagctgataagcaacttcagcaaagtctcaggatacaaaatcaatgtgcaaaaatcacaagcattcctatacaccaacaacagacaaacagagagccaaatcatgagtgaactcccattcacaattgcttcaaagagaataaaatacctaggaatccaacttacaagggatgtgaaggacctcttcaaggagaactacaaaccactgctcaaggaaataaaagaggatacaaacaaatggaagaacattccatgctcatgggtaggaagaatcaatatcgtgaaaatggccatactgcccaagaattggaaaaaaactactttaaagttcatatggaaccaaaaaggagcccgcattgccaagtcaatcctaagccaaaagaacaaagctggaggcatcacactacctgacttcaaactatactacaaggctacagtaaccaaaacagcatggtactggtaccaaaacagagatatagatcaatggaacagaacagagccctcagaaataacgccgcatatctacaactatctgatctttgacaaacctgagaaaaacaagcaatggggaaaggattccctatttaataaatggtgctgggaaaactggctagccatatgtagaaagctgaaactggatcccttccttacaccttatacaaaaatcaattcaagatggattaaagacttaaacattagacctaaagccataaaagccctagaagaaaacctaggcaataccattcaggacataggcatgggcaaggacttcatgtctaaaacaccaaaagcaatggcaacaaaagacaaaattgacaaatgggatctaattaaactaaagagcttctgcacagcaaaagaaactaccatcagagtgaacaggcaacctacaaaatgggagacaattttcgtaacctactcatctgacaaagggctaatatccagaagctgcaaagaactcaaacaaatttacaagaaaaaaacaaacaaccccatcaaaaagtgggcgaaggacatgaacagacacttctcaaaagaagacatttatgcagccaacagacacatgaaaaaatgctcatcatcactggccatcagagaaatgcaaatcaaaaccaca

SEQ ID NO: 122788 - DNA, 3068 bp, Homo sapiens
actttaaaccaacaaagatcaaaagagaaaaagaaggccattacataatggtaaagggatcaattcaacaagaagagctaactatcctaaaaatatatgcacccaatacaggagcaccaagattcacaaagcaagtcctgagtgacctacaaagagacttagactcccacacattaataatgggagactttaacaccccactgtcaacattagacacatcaacgagacagaaagtcaagaaggatacccaggaattgaactcagctctgcaccaagcggacctaatagacatctacagagctctccaccccaaatcaacagaatatacatttttttcagcaccacaccacacctattccaaaattgaccacatagttggaagtaaagctctcctcagcaaatgtaaaagaacagaaattataacaaactatctctcagaccacagtgcaatcaaactagaactcaggattaagaatctcactcaaaaccactcaactacatggaaactgaacaacctgctcctgaatgactactgggtacataacgaagtgaaggcagaaataaaggtgttctttgaaacgaaggagaacaaagacacaacataccagaatctctgggacgcattcaaagcagtgtgtagagggaaatttatagcactaaatgcccacaagagaaagcaggaaagatccaaaattgacaccctaacatcacaattaaaagaactagaaaagcaagagcaaacacattcaaaagctagcagaaggcaagaaataactaatatcagagcagaactgaaggaaatagagacacaaaaaacccttcaaaaaattaatgaatccaggagctgaaatacaaactaccatcagggaatactacaaacacctctatgcaaataaactagaaaatctagaagaaatggataaattcctggacacatacactctcccaagactaaaccaggaagaagttgaatccctgaatagaccaataacaggctctgaaattgtggcaataatcaatagcttaccaaccaaaaagattccaggaccagatggattcacagccgaattctaccagaggtacaaggaggaactggtaccattccttctgaaactattccaatcaatagaaaaagagggaatcctccctaactcattttatgaggccagcatcattctgataccaaagccaggcagagacacaacaaaaaaagagaattttagaccaatatccttgatgaacattgatgcaaaaatcctcaataaaatactagcaaaacgaatccagcagcacatcaaaaagcttatcccccatgatcaagtgggcttcatccctgggatgcaaggctggttcaatatacgcaaatcaataaatgtaatccagcatataaacagagcaaaagacaaaaaccacatgattatctcaatagatgcagaaaaagcctttgacaaaattcaacaacccttcatgctaaaaactctcaataaattaggtattgatgggacgtatttcaaaataataagagctatctatgacaaacccacagccaatatcatactgaatgggcaaaaactggaagcattccctttgaaaactggcacaagacagggatgccctctctcaccactcctattcaacatagtgttggaagttctggccagggcaattaggcaggagaaggaaataaagggtattcaattaggaaaagaggaagtcaaattgtccctgtttgcagatgacatgattatatatctagaaaaccccattgtctcagcccaaaatctccttaagctgataagcaacttcagcaaagtctcaggatacaaaatcaatgtacaaaaaatcacaagcattcttatacaccaacaacagacaaacagagaaccaaatcatgagtgaactcccattcccaattgcttcaaagagaataaaatacctaggaatccaacttacaagggatgtgaaggacctcttcaaggagaactacaaaccactgctcaacgaaataaaaagaggacacaaacaaatggaagaacattccatgctcatgggtaggaagaatcaatattgtgaaaatggccatactgcccaagctgataggcaactgcagcaaaatctcaggatacaaaatcaatgtgcaaaaatcacaagcattcttatacaccaataacagacaaacagagagccaaatcatgagtgaactcgcattcacaattgcttcaaagaaaatcaaatacctaggaatccaacttacaagggatgtgaaggacctcttcaaggagaactacaaaccactgctcaatgaaataaaagaggatacaaacaaatggaagaacattccatgctcatgggtaggaagaatcaatatcgtgaaaatggccatactgcccaagagcagagtttgtgatcttcggtatttgcactggatctacggatctgtgtcctatggaaaaggcaatgcgtggatcacaagaaagagaagcaccacccaaaagtggacaggtgcagcactacagcccctttccaggacatccctgaaagacaccggagaaggggaatcttcccagtgggcagaacttcgagcagtgtacctgttggttcactttgcatggaaggagaaatggccacatgtgtggttatatactgattcatgggctgtatccagtggttcggctggatggtcaggaacttggaagaagcatgattggaaaattggtgacaaagaaatttggagaagagccagctacctggtggcagattatattggacctcttccatcatggaaagggcagagatttgtcctcactggaatagacacttactctggatatgggtttgcctatcctgcatgcaatgcttctgccaagactaccatccgtggattcatggaatgccttatccaccatcatggtattccacacagcattgcctctgaccaaggcactcacttcatggctaaagaagtgcagcagtgggctcattctcatggaattcaccggtcttatcatgttctccatcacccagaagcagctggattgatagaacgatggaatggccttttgaagtga

SEQ ID NO: 122789 - DNA, 5169 bp, Homo sapiens
atggggaaaaaacagaacagaaaaactggaaactctaaaacgcagagcgcctctcctcctccaaaggaacgcagttcctcaccagcaacagaacaaagctggatggagaatgattttgacgagctgagagaagaaggcttcagacgatcaaattactctgagctatgggaggacattcaaaccaaaggcaaagaagttgaaaactttgaaaaaaatttagaagaatgtataactagaataaccaatacagagaagtgcttaaaggagctgatggagctgaaaaccaaggctcgagaactacatgaagaatgcagaagcctcaggagccgatgcgatcaactggaagaaagggtatcagcaatggaagatgaaatgaatgaaatgaagcgagaagggaagtttagagaaaaaagaataaaaagaaatgagcaaagcctccaagaaatatgggactatgtgaaaagaccaaatctacgtctgattggtgtacctgaaagtgatgtggagaatggaaccaagttggaaaacactctgcaggatattatccaggagaacttccccaatctagcaaggcaggccaacgttcagattcaggaaatacagagaatgccacaaagatactcctcgagaagagcaactccaagacacataattgtcagattcaccaaagttgaaatgaaggaaaaaatgttaagggcagccagacagaaagcaccacaccacacctattccaaaattgaccacatagttggaagtaaagctctcctcagcaaatgtaaaagaacagaaattataacaaactatctctcagaccacagtgcaatcaaactagaactcaggattaagaatctcactcaaagccgctcaactacatggaaactgaacaacctgctcctgaatgactactgggtacataacgaaatgaaggcagaaataaagatgttctttgaaaccaacgagaacaaagacaccacataccagaatctctgggacacattcaaagcagtgtgtagagggaaatttatagcactaaatgcctacaagagaaagcaggaaaagatccaaaattgacactctaacatcacaattaaaagaactagaaaagcaagagcaaacacattcaaaagctagcagaaggcaagaaataactaaaatcagagcagaactgaaggaaatagagacacaaaaaacccttcaaaatatcaatgaatccaggagctggttttttgaaaggatcaacaaaattgatagaccgctagcaagactaataaagaaaaaaagagagaagaatcaaatagacacaataaaaaatgataaaggggatatcaccactgatcccacagaaatacaaactaccatcaggagaatactacaaacacctctacgcaaataaactagaaaatctagaagaaatggataaattcctcgacacatacactctcccaagactaaaccaggaagaagttgaatctctgaatagaccaataacaggctctgaaattgtggcaataatcaatagtttaccaaccaaaaagagtccaggaccagatggattcacagccgaattctaccagaggtacaaggaggaactggtaccattccttctgaaactattccaatcaatagaaaaagagggaatcctccctaactcattttatgaggccagcatcattctgataccaaagccgggcagagacacaaccaaaaaagagaattttagaccaatatccttgatgaacattgatgcaaaaatcctcaataaaatactggcaaaccgaatccagcagcacatcaaaaagcttatccaccatgatcaagtgggcttcatccctgggatgcagggctggttcaatatacgcaaatcaataaatgtaatccagcatataaacagagccaaagacaaaaaccacatgattatctcaatagatgcagaaaaagcctttgacaaaattcaacaacccttcatgctaaaaactctcaataaattaggtattgctgggacgtatttcaaaataataagagctatctatgacaaacccacagccaatatcatactgaatgggcaaaaactggaagcattccctttgaaaactggcacaagacagggatgccctctctcaccgctcctattcaacatagtgttggaagttctggccagggcaatcaggcaggagaaggaaataaagggtattcaattaggaaaagaggaagtcaaactgtccctgtttgcagacgacatgattgtttatctagaaaaccccatcgtctcagcccaaaatctccttaagctgataagcaacttcagcaaagtctcaggatacaaaatcagtgtacaaaaatcacaagcattcttatacaccaacaacagacaaacagagagccaaatcatgggtgaactcccattcacaattgcttcaaagagaataaaatacctaggaatccaacttacaagggatgtgaaggacctcttcaaggagaactacaaaccactgctcaaggaaataaaagaggacacaaacaaatggaagaacattccatgctcatgggtaggaagaatcaatagcgtgaaaatggccatactgcccaaggtaatttacagattcaatgccatccccatcaagctaccaatgactttcttcacagaattggaaaaaagtactttaaagttcatatggaaccaaaaaagagcccgcattgccaagtcaatcctaagccaaaagaacaaagctggaggcatcacactacctgacttcaaactatactacaaggctacagtaaccaaaacagcatggtactggtaccaaagacagagatatagatcaatgggacagaacagagccctcagaaataatgccgcatatctacaactatctgatctttgacaaacctgagaaaaacaagcaatggggaaaggattccctatttaataaatggtgctgggaaaactggctagccatatgtagaaagctgaaactggatcccttccttacaccttatacaaaaatcaattcaagatggattaaagatttaaacgttaaacctaaaaccataaaaaccctagaagaaaacctaggcattaccattcaggacataggcgtgggcaaggacttcatgtccaaaacaccaaaagcaatggcaacaaaagacaaaattgacaaatgggatctaattaaactaaagagcttctgcacagcaaaagaaactaccatcagagtgaacaggcaacctacaacatgggagaaaattttcgcaacctactcttctgacaaagggctaatatccagaatctacaatgaactcaaacaaatttacaagaaaaaaacaaaaaaccccatcaaaaagtgggcaaaggacatgaacagacacttctcaaaagaagacatttatgcagccaaaaaacacatgaagaaatgctcatcatcactggccatcagagaaatgcaaatcaaaaccactatgagatatcatctcacaccagttagaatggcaatcattaaaaagtcaggaaacaacagaaacatggatggagctggaggccattatcctaagcaaactaatgaaggaacagaaaaccaaataccagatgttctcacttgtaagtgggagctaaatgataagaacatatggacacaaagaggggaacaacacaccctggagcctgttggaggagaaggtgaattaagaaaagataatcactcaaccaaaaatgaccagtacgataataggcattttcaactggctgtaggaaatggccttatggctaagaccttcatggtcagtttcttctataaagccagtgcctacgttgtacccacaggagaattgccagatttagatataattcagttaaaacaatttggaaacgcattgtcacatctaacagtaggaacctcagtcactcaaatacaaaatttaaatacaatgggaataattggatcccaagatagcagggaccaactggccacactcaaatgtcaaggtaaaggggacccaaaatatcaatgtgatcctccagttaaagtaggtgctaatggaggtcagataattaatgaagttttagctcaggtccaacttacagtgggtccaaagacaaatggatattggagaatgacagtggattatcataagcttaaccaagatgtgactccaattgtagctgctgtaccagatgtggtttcattgcttgaggttatatcaactcttcaaaaagacttctattgctttttccttctgcaaaatatcacactggtccattatattgatggcattatgctgactgaatccagtgagcaagaagtagcagacacactggacttattgactagtatacgtggactcatggaatgccttatccaccatcatggtatcccacacagcattgcctctgaccaaggccctcactttatggctaaagaattgtgggagtgggctcatgctcatggaattcactggtcttaccatattccccatcatcctgaagcagctggattgatagaatggcggaatgaccttttgaagtcacaattacaacaccaactaggtgacaatgctttgcagggctggggcaaagttctccagaaggccatgtatgctctgaatcagcatccaatatatgttactgtttttcccattgccaggattcataagtcctggaatcaaggggtggaagtagaagtggcatcactcaccatcacccctagtgatccactagcaaaatttttgctttccgttcccacaacattacattctcctggcctagaggtcttagttccagctggaggaatgctgccaccaggagacacaacaatcccattgaactggaagttaatattgccacctggacactttgggctcctcctacctttaagtcaacaggctaagaaggcagttacagtgttggctagggtgattgacccagactatcaggatgaaatcagtctactactccacaatggaggtaaggaagagtatgcatggaattcaggagatccattaggtgtctcttggtattaccatgccctgtcattaaggtcaatgagaactacaacagtgcaatccaggcaggattacaaatggcccagatacctcaggaatgaagatttgggtcatgttaccagggaaaaaaaacacaacctgctgaggtgcttgctgaaggctaagggaatatag

SEQ ID NO: 122790 - DNA, 4555 bp, Homo sapiens
atgggcaggaagaacaggaagctggacagccggcagcacagctacacttccccacagagcaggtcccatgaggaccctgcagctgtcctgcaagccctgagctcgtcgggggtggtcatctaccagtctctggtggcagtgcagagccccctggctgccccaggttgtgacggcagccggtgtgaggtcaggggcctgactgtgggcagcaggtatggcagctggaggctggctggatgcagggacaatgagatggtaaatgcctgccaatcagggtggtgctaccagaacctcacagttcttagaggatggaaggtgctgcttgagatgacaccacaccacacctattccaaaattgaccacatacttggaagtaaagctctcctcagcaaatgtaaaagaacagaaattataacaaactatctctcagatcacagtgcaatgaaacgagaactcaggattaagaatctcactcaaaaccgctcaactacatggaaactgaacaacctgctcctgaatgactactgggtacataacgaaatgaaggcagaaataaagatgttctttgaaaccaacgagaacaaagacacaacataccagaatctctgggacatattcaaagcagtgtgtagagggaaatttatagcactaaatgcccacaagagaaagcaggaaagatccaaaactgacaccctaacatcacaattaaaagaactagaaaagcaagagcaaacacattcaaaagctagcagaaggcaagaaataactaagatcagagcagaactgaaggaaatagagacacaaaaaacccttcaaaaaaatcaatgaatccaggagctggttttttgaaaagatcaacaaaattgatagactgctagcaagactaataaagaagaaaatagagaagaatcaaatagatgcaataaaaaatgataaagggaatatcaccaccaatcccacagaaatacaaaactaccatcagagaatactataaacacctctacgcaaataaactagaaaatctagaagaaatggacaaattcctcgacacatacaccctcccaagactaaaccaggaagaagttgaatctctgaatagatcaataacaggctctgaaattgaggcaataattaatagcttaccaaccaaaaaaagtccaggaccagacggattcacagccgaattctaccagaggtacaaggaggagctggtaccattccttctgaaactattccaatcaatagaaaaagagggaatcctccctaactcattttatgagtccagcagcatcctgataccaaagcctggcagagacacaaccaaaaaagagaattttagaccaatatccttgatgaacatcgatgcaaaaatcctcaataaaatactggcaaaccgaatccagcagcacatcaaaaagcttatccaccatggacaagaaggcttcatccctgggatgcaaggctggttcaacatacgcaaatcaataaatgtaatccagcatataaacagaaccaaagacaaaaaccacatgattatctcaatagatgcagaaaaggcctttgacaaaattcaacagcccttcatgctaaaaactctcaatagattaggtattgatgggacatatctgacatatctcaaaataataagagctatttatgacaaacccacagccaatatcatactgaatgggcaaaaactggaagcattcccttttaagactggcacaagacagggatgtcctctctcaccactcctattcaacatagtgttggaagctctggccagggcaatcaggcaagagaaagaaataaagggtattcaattaggaaaagaggatgtcaaattgtccctgtttgcagatgacatgattgtatatttagaaaaccccatcgtctcagcccaaaatctccttaagctgataagcaacttcagcgaagtctcaggatacaaaatcaatgtgcaaaaaatcacaagcattcttatacaccaataacagacaaacagagagccaaatcatgagtgaattcccattcacaattgcttcaaagagaataaaatacctaggaatccaacttacaagggaagtgaaggacctcttcaaggagaactacaaaaccactgctcaaggaaataaaagaggatacaaacaaatggaagaacattccatgctcatggataggaagaatcaatatcacgaaaatggccatactgcccaaggtaatttatagattcaatgccattcccatcaagctaccaatgactttcttcacagaattggaaaaaactactctaaagttcatatggaaccaaaaaagagcccacattgccaagtcaatcctaagccaaaagaacaaagctggaggcatcacgctacctgacttcaaactatactacaaggctacagtaaccaaaacagcatggaatccatatggagccactaccaccatccctgctctcctactgcataacccaacaggccaaagtgcagtgctcacacctgtaatccgagtgctttgcaaggccatagaggaagatcacttgagctcttcaaggaataaagacttgaatgtgaaacccaaagctataaaagccctggaaggcaacctaggcgacaccctcctggacaaaggaagggacaaagatttcattacaaggacaccaaaagcaattgcaacaaaagcaaaaattgacaaatgggatctaattaaacttaagagcttctgcacagcaaaagaaactatcaacagagcatacagacagcctacagaatgggaggaaatatttgtaaactatccatctgacaacggtctaatatccagcatctcagaacaatctgtgctcctgttctatcccatcactggacggtacatggccatcatacatcccctccagccccggctgtcagccacagccaccaaagtggtcatctgtgtcatctgggtcctggctctcctgctggccttcccccagggctactactcaaccacagagaccatgcccagcagagtcgtgtgcatgatcgaatggccagagcatccgaacaagatttatgagaaagtttcatattttggtcagccttcaggtaatcagccagagatgctagcattgtatactgctctctttccacagcctccattagaggagggaattcactggaggatgctccaggtggtacagctacaagatgcagagcctccatcacctaagttcctgactaaggagaaagattctcctggcctgggcgggacttacactggtaaggagtatcggcgagttgaccatagtgtccctcccatcacactcagacccaatcttgctcagtgccctgtagcaatgtctcggcaaagctcagctaacatgttttggtcacaaactattagtctgcatgaggcagggctgttctttcaggactccccattggctgacccctcccagaagccagaaagcaagggagtcctttggtgtggtccatatagcacccacctggatgcagaagaggataaagacagagaggctctggagagggcagtggctgccaatgccttgaaaccgagtggccatcccatagccacgaagtctagtcacttgggcaaatatgtcatgggccgataccatgaccctagtgtttgtaccaaggctcctgtagctattccttttcttttatggacatacagccccttgaagagccacaaggaatctgtttggaatcttcataatgaaaacttggtggagtttctggaggtaaggtccattagagttacggctcccctaaagagagttgactccagaagttccttactctcatgctattccagtcagcctctagtaattgcgcaaacttcccatggacatgtttccctaccaattaaggattatgtgtcttctgctccagggatctatgaggaagaattgcctatgtcatcaataggaagcactgaggactccacaaaactcccggttctcaggtatcaacttgaactaacagatgactacatcattagaattaatcgactgaagatgaaaggaagaataaaagtgatgtttggatgcgccctgcaggcagtcagaccttatggttatctcctttgttccctgaacattgctgttatcctgttctttttcaagctgcccagatttcataacgctcaaacacacatgttttacaaacaatttgtgcaggaagccacttatgcagaacactttcttcatctctgctctaacgagcagcagctgcatccaggcttgatatggaagacagacagaaatagtggaagaccttgcagagaagagctaattgatgagatctctgcttatcccggcataggtgaaggcagaacaggaagagtgtgtaatgacgacatacagctcatcgataccgtccgaatccctgtgggagttcactggccctgcctgacggtacaggctggtgctatatctccacccctccctcgggtagccctatcagatctgccacgccctggccggctcatccactcactgagaacttccagctgcaagtttctgccctcctggggtctttgctttggtggttaa

SEQ ID NO: 122791 - DNA, 4331 bp, Homo sapiens
atggtgaagggatcaattcaacaagaggagctaactatcctaaatatttatgcacccaatacaggagcacccagattcataaagcaagtcctgagtgacctacaaagagacttagactcccacacattaataatgggagactttaacaccccactgtcaacattagacagatcaacgagacagaaagtcaacaaggatacccaggaattgaactcagctctgcaccaagcagacctaatagacatcaacagaactctccaccccaaatcaacagagtatacatttttttcagcaccacaccacacctattccaaaattgaccacatagttggaagtaaagctctcctcagcaaatgtaaaagaacagaaattataacaaactatctctcagaccacagtgcaatcaaactagaactcaggattaagaatctcactcaaagccgctcaactccatggaaactgaacaacctgctcctgaatgactactgggtacataacgaaatgaaggcagaaataaagatgttctttgaaaccaacaagaacaaagacaccacataccagaatctctgggacgcattcaaagcagtgtgtagagggaaatttatagcactaaatgcctacaagagaaagcaggaaagatccaaaattgacaccctaacatcacaattaaaagaactagaaaagcaagagcaaacacattcaaaagctagcagaaggcaagaaataacgaaaatcagagcagaactgaaggaaatagagacacaaaaaacccttcaaaaaatcaatgaatccaggagctggttttttgaaaggatcaacaaaattgatagaccgctagcaagactaataaagaaaaaaagagagaagaatcaaatagacacaataaaaaatgataaaggggatatcaccaccgatcccacagaaatacaaactaccatcagagaatactacaaacacctctacgcaaataaactagaaaatctagaagaaatggatacattcctcgacacatacactctcccaagactaaaccaggaagaagttgaatctctgaatagaccaataacaggctctgaaattgtggcaataatcaatagtttaccaaccaaaaagagtccaggaccagatggattcacagccgaattctaccagagagctatctatgacaaacccacagccaatatcatactgaatgggcaaaaactggaagcattccctttgaaaactggcacaagacagggatgccctctctcaccgctcctattcaacatagtgttggaagttctggccagggcaatcaggcaggagaaggaaataaagggtattcaattaggaaaagaggaagtcaaattgtccctgtttgcagatgacatgattgtttatctagaaaaccccatcgtctcagcccaaaatctccttaagctgataagcaacttcagcaaagtctcaggatacaaaatcaatgtacaaaaatcacaagcattcttatacaccaaaaacagacaaacagagagccaactcatgagtgaactcccattcacaattgcttcaaagagaataaaatacctaggaatccaacttacaagggatgtgaaggacctcttcaaggagaactacaaaccactgctcaacgaaataaaagaggacacaaacaaatggaagaacattccatgctcatgggtaggaagaatcaatatcgtgaaaatggccatacttgcccaaggtaatttacagattcaatgccatccccatcaagctaccaatgactttcttcacagaattggaaaaaactactttaaagttcatatggaaccaaaaaagagcccgcatcgccaagtcaatcctaagccaaaagaacaaagctggaggcatcacactacctgacttcaaactatactacaaggctacagtaaccaaaacagcatcggtactggtaccaaaacagagatatagatcaatggaacagaacagagccctcagaaataatgccgcatatctacactattctgatcctttggacaaacctgagaaaaacaagcatgggggaaaggcatccctaatttataaaatggctgctggggaaaactggctagcccatatgtaggaagctgaaactggatcccttccttacacattatacaaaaattaattcaagttggattaaagacttaaacgttagacctaaacccataaaaaccctagaagaaaacctaggcattaccattcaggacataggcatgggcaaggatttcatgtctaaaacaccaaaagcaatggcaacaaaagccaacattgacaaatgggatctaattaaactaaagagcttctgcacagcaaaagaaactaccatcagagtgaaaaggcaacttacaaaatgggagaaaattttcgcaacctactcatctgacaaagggctaatatccagaatctacaatgaactcaaacagatttacaagaaaaaaacaaacaaccccatcaaaaagtgggcaaaggatatgaacagacacttctcaaaagaagacatttatgcagccaaaagacacatgaaaaaatgctcatcatcactggccatcagagaaatgcaaatcaaaaccacaatgagataccatctcacaccagttagaatggcaatcattaaaaagtcaggaaacaacaggagagacagaacagctgaggaaacagcagaacggtggaaaatttttgaaagtgttttgagcccacccaacctgaggagagcattcaaagaaaaacaggaagaagaagtcggcttcagaaggtgggttataacaaactcctccaagctaaaacagcatgttttaacccaatgcaaggaagctaagaaccttgaaaaaaggttagaggaatttctaactagaataaccagtttagagaagaacataaatgacctaatggacctgaaaaacacagcacgagaacttcttgacgcctacacaagtatcaatagccaaattaatcaagcggaagaaaggttatcagagactgaagatcaacttaatcaaataaagcatgaggacaagattagagggaaaaaaatgaaaaggaacaaacaaagcctccaagaaatatgggactatgtgaaaaggccaaatctacgtctgattggtgtagctgaaagtgacagggagaatggagccaagttagaaaacactcttcagtatattatccaggagaacttccccaacctagcaagacaggccaacactcaaattcaggaaacacagagaccaccacaaagatactccttgagaaaagcaaccccaagacacataattgtcagattcaccaaagttgaaatgaaggaaaaaatgttaagactaaaccacgaagaacttgaatccctgaatagaccaataacaggttctgaaattcaggcaattattaatagcctaccaaccaaaaaaagtccagaatcagatggattcacagccaaattctaccagagccaatatcatactgaatgggcaaaaactggaagcattccctttgaaaaccggcacaaaacaggatgccctctctcaccactactattcaacatagtggtggatgttccggctagggcaatcaggcaggagaaagaaataaagggtattcaattaggaaaagaggaagccaaattgtccctgtttgcagatgacatgaatgtatatttaaaaatccccatcgtctcagtccaaaatctccttaagctgataagcaacttcagcaaagtctcaggatacaaaatcaatgtgcaaaaatcacaagcattcctatacactaataacagacaaacagagagccaaatcatgagtgaactcccattcacaattgcttcaaagagaataaaatacctaggaatccaacttacaagggatgtgaaggacctcttcaaggagaactacaaaccactgctcaacgaaataaaagaggacacaaacaaatggaagaacattccatgctcatggataggaagaatcaatatcatgaaaatggccatactgcccaaggtaatttatagattcaatgccatccccatcaagctaccaatgactttcttcacagaattggagaaaactgctttaaagttcatatggaaccaaaaaagagcctgcattgccaagacaatcctaagccaaaagaacaaagctggaggtatcacactacctgacttcaaactgtactacaaggctacagtagccaaaacagcatggtactggtaccaaaacagcatggtactggtaccaaaacagagatatagaccagtggaacagaatagagcccttggaaataataccatacacctacaaccatctgatcttcgaaaaacctga

SEQ ID NO: 122792 - DNA, 2816 bp, Homo sapiens
atggataaattcttcgacacatacaccctcccaagactaaaccaggaagaagttgaatctctgaatagaccaataacaggctctgaaattgaggcaataattaatagtgtaacaaccaaaaaaagtccaggaccagatggattcacagccgaattctaccagaggtacgaggaggagctgaaaaagagggaatcctccctaactcattttatgaggagcatcatcctgataccaaagcccggcagagacataacaaaaaaagagaattttagaccaatatccctgatgaacatcgatgcaaaaatcctcaataaaatactggcaaaccaaatccagcagtacatcaaaaagcttatccaccatgatcaagtgggcttcatccctgggatgcaaggctggttcaacatacgcaaatcaataaaggtaacccagcatataaacagaaccaaagacaaaaaccacatgattatctcaatagatgcagtaaaggcctttgacaaaattcaacagcgcttcatgctaaaaactctcaataaattaggtattgatgggacatatctcaaaataataagagctatctatgacaaacccacagccaatatcatactgaatgggcaaaaactggaagcattccctttgaaaactggcacaagacagggatgccctctctcaccactcctattcaacatagcgttggaagttctgtccagggcaatcaggcaggagaaggaaataaaggatattcaattaggaaaagaggaagtcaaattctccctgtttgcagatgacatgattgtatatctagaaaaccccatcgtctcagcccaaaatctccttaagctgataggcaacttcagcaaagtctcaggatacaaaatcaatgcgcaaaaatcacaagcattcttatacaccaataacagacaaacagagagccaaatcatgagtgaactcccattcacaattgcttcaaagagaataaaatatctaggaatccaacttacaatggacgtgaaggacttcttcaaggagaactacaaaccaatgctcaatgaaataaaagaggatacaaacaaatggaagaacattccatgctcatgggtaggaagaatcaatatcgtgaaaatggccatactgcccaagatccactccagagtgacagttctgctgcgctcagatactgtgctgcatattgtgaagcttgcagtgaaaattcctacaattgtcctgcttctggaggggagccccagggccttgaggaaacacaggcagaagccagggagtggttccagcaggcctcgagtgagacccagtgctgtgctggcatcaggtctgagtcaatgcagtcatagtggtggtggcaacaggggtgcttatgtcactccaccccaagctttagcagaaaaggcctttgacaaaattcaacaacccttcatgctaaaaactctcaataaattaggtattgatgggacatatctcaaaataataagagctatcctatgacaaaaccccacagccaatatcatactgaatcgacaaacacccagaagcattccctttgaaaactggcacaagacagggatgctctctctcaccactcctattcaacatagtgttggaatttctggccagggcaatcaggcaggagaaggaaataaagggcattcaattaggaaaagaggaagtcaaattgtccctgtttgcagatgacatgattgtatatctaggaaaccccatcacctcagcccaaaatatccttaagctgataggtaacttcagcaaagtctcaggatacaaaatcaatgtacaaaaatcacaagcattcttagacaccaataacagacaaacagagagccaaatcatgagtgaattcccattcacaattgcttcaaagagaataaaatacctaggaatccaacttacaagggacctgaaggacctcttcaaggagaactacaaagcactgctcaatgaaataaaagaggatataaacaaatggaaaaacattccatgctcatgggtaggaagaatcaatatcgtgaaaatggccatactgcccaaggtaatttatagattcaatgccatccccatcaagctaccaatgactttcttcacagaattggaaaaaactactttaaagtttatatggaaccaaaaaagtgcccgcatcgccaagtcaatcctaagccaaaagaacaaagctggaggcatcatgctacctgacttcaaactatactacaaggctacagtaaccaaaacagcatggtactggtaccaaaacagagatatagatcaatggaacacaacagagccctcagaaataatgccacacatctataactatctgatctttgacaaacctgagaaaaacaagcaatggggaaaggattccctatttaataaatggtgctgggaaaactggctaaccatatgtagaaagctgaaactggatcccttccttacaccttatacagaaataaattcaaggtggattaaagacttaaatgttagacctaaaaccataaaaactctagaagaaaacctaggaaataccattcaggacataggcatgggcaaggacttcatgtctaaaacaccaaaagcaatggcaacaaaagccaaaattgacgaatgggatctacttaaactaaaagagtttctgcacagcaaaagaaactaccgtcagagtgaacaggcaacctacagaatgggagacaatttttgcaatctactcatctgacaaagggctaatatccagaatctacaatgaactcaaacaaatttacaagaaaaaaacaaccccatcaaaaagtgggtga

SEQ ID NO: 122793 - DNA, 739 bp, Homo sapiens
tgaccgcaccggaacggaatgtcccgacccgacccacgcgtccgagttggtgtttcgctgggccctggtactgatagacgcggtccgggtcgcccctagctgtttcctactcacccaaagccccgcacccgccttttctctctctcctctggcaggatgaggcgtgcaggcctgggtgaaggagtacctcctggcaactatgggaactatggctatgctaatagtgggcatagcgcctgtgaagaagaaaatgagaggctcactgaaagtctgagaagcaaagtaactgctataaaatctctttccattgaaataggccatgaagctaaaacccagaataaattattagctgaaatggattcacaatttgattccacaactggatttctaggtaaaactatgggcaaactgaagattttatccagagggaagccaaacaaagctgctgtgctatatgaatgctgttttctttatttgtcttttttatcatttattggattattaaactgaggtgatgcatgtaattgtgaatttggaatttgttccaacttaatggcttgcagtgcagtaccactttgataaaaatcagcatcaaaacattcccagtgttcaaatactgtggcattttccattgaaaattgctgaattttgcttattttataaatcacattagttaatacaggggtctttgaatactgtttcttaatgactcattttagcccctattttcaggggtagg

SEQ ID NO: 122794 - DNA, 3870 bp, Homo sapiens
atgatcctatgtttagaaaaccccatcatctcaactcaaaagctccttaagctgataagcagcatcggcaaagtctcaggatacaaaatcaatgtgcaaaagacacaatcatttctacacaccaacaatagacaagcagagagccaaatcatgtatgaactcccattcacaattgctacaaagaataaaatacctaggaattcagctaacaaggaacatgaaggacctcttcaagaactacaaaccattgctcaaggaaataagagaggacacaaacaaatggaaaagcaatccatgctcttggataggaagaatcgatatcatgaaaatggccctactgcccaagatgcagaaaaggccattgacaaaattcaacaacgcttcatgctaaaagccctcaataaattaggtattgatgggatgtatctcaaaatactaagagctttttatgacaaacccacagccaatatcatactgaatgggcaaaaactggaagcattccctttgaaaactggcacaagacagggatgccctctctcaccactcctattcaacatagtgttggaagttctggccagggcaatcaggcaggagaaggaaataaagggtattcatttaggaaaagaagaagtcaaattgtccctatttgcagatgacatgattgtatgtctagaaaaccccattgtctcagcccaaaatctccttaagctgataggcaacttcagcaaagcctcaggatacaaaatcaatgtgcaaaaatcacaagcattcttatacagcaataacagacaaacagagagccaaatcatgagtgaattcccattcacaattgcttcaaaaagaataaaatacctaggaatccaacttacaagggacgtgaaggacctcttcaaggagaactacaaaccactgctcaatgaaataaaagaagatacaaacaaatggaagaacattccatgctcatgggtaggaagaatcaatattgtgaaaatggccatactgcccaaggcagaggcgcctcaccccagggccaccaccatgacagtcccatgggaagtaccaccaggctacgaccaatgttcccttaaggcccaagaactcttcagtcagcttgtggtgaatgctgccaagactgggactcacccttcagaaacacagattctcattgccacgcagcttcagccacaggatgggaaaggagtggtgtcagcaattcaagactgcctttcctaccctcttcagtgtctctttcagcaacacaaagttaaaaccagtgcaatcaaattggaactcaagattaagaaattcactcaaaaccacaaaactacagggaaattgaacaagctgctcctgagtgactccttggtaaatgatgaaattcaggcagaaatcaagaagttctttgaaactactgagaacaaagagacaatataccagagtctctgtgacacagctaaaacagtgttaagagggaaatttatagcactaaatggccacatcaagaagcttgaaagatctcaaatcaacaccctaacatcacaactaaaagaactagagaaccaggagcaaacaaaccccaaagctagcagaagacaagaaataaccaagatcagagtggaactgaaggagatagagaaacacaaaacccttcaaaaaatcaatgaatccaggagctggttttttgaaacgatcaacaaaattgatagatagatcactagcaagagtaataaagaagaaaggagagaagaatcaaatagacacaataaaaaatgataaaggggatatcaccaccgatcccacagaaatacaaactaccatcagagaatcctataaacacctctatgcaaataaactagaaaatctagaagaaatggataaattcctcgacacatacaccctcccaagactaaaccaggaagaagttgaatctctgaatagaccaataacaggctctgaaattgtggcaatagtcaatagcttaccaaccaaaaagagtccaggaccagatggattcacagccgaattctaccagaggtacaaggaggaactagtacccttccttctgaaactcttgcaatcaatagaaaaagagggaatcctccctcactcattttatgaggccagcatcatcctgataccaaagcctggcagagacacaacaaaaaaagagaattttagaccaatatccttgatgaacattgatgcaaaaatcctcaataaaatactggcaaaccaaatccagcagcacatcaaaaagtttatccaccatgatcaagtgggcttcatccctgggatgcaaggctggttcaatacatgcaaatcaataaatgtaatccagcatataaacagaaccaaagacaaaaaccacatgattatctcaatagatgcagaaaaggcctttgacaaaattcaacaacccttcatgctaaaaactctcaataaattagatattgatgggttggaagttctggccagggcaatcaggcaggagaaggaaataaagggcattcaatcaggaaaagaggaagtcaaattgtccctgtttgcagatgacatgattgcatatctagaaaaccccatcgtctcagcccaaaatctccttaagctgataagcaacttcaacaaagtctcaggatacaaaatcaatgtgcaaaaatcacaagcattcttatgcaccaataacagacaaacagaaagccaaatcatgagtgaactcccatttcacaattgcttccaagagaattaaatacctaggaatccaccttacaagggacgtgaaggacctcttcaaggagaactacaaaccactgctcaatgaaataaaagaggacacaaacaaatggaagaacattccatgctcatgggtaggaagaatcaatatcgtgaaaatggccatactgcccaaggtaatttacagattcaatgccatccccatcaagctaccaatgactttcttcacagaattggaaaaaactactttaaagttcatatggaaccaaaaaagagcccgcattgccaagtcaatcctaagccaaaagaacaaagctggaggcatcacactacctgacttcaaactatactacaaggctacagtaaccaaaacagcctggtactggtaccaaaacagagataatagatcaatggaacagaacagagccctcagaaataacgccgcatatctacaactatctgatatttgacaaacctgacaaaaacaagaaatggggaaaggattccctatttaataaatggtgctgggaaaactggctagtcatatgtataaagctgaaactggatcccttccttacaccttatacaaaaattaattcaagatggattaaagacttaaatgttagacctaaaaccataaaaaccatagaagaaaacctaggcaataccattcaggacataggcatgggcaaggacttcatgtctgaaacactaaaagcaagggcaacaaaagccaaaattgacaaatgggatctaattaaactaaagagcttctgcacagcaaaagaaactaccatcagagtgaacaggcaacctacaaaatgggagaaaatttttgcaatctactcatctgacaaagggttaatacccagaatctacaaagaactcaaacaaatttacaagaaaaaaacaaacagccccatcaaaaagtgggtgaaggatatgaacagacacttctcaaaagaagacatttatgcagccaaaaaacacatgaaaaaatgctcatcatcactggccatcacagaaatgcaaatcaaaaccacaatgagataccatctcacaccagttagaatggcaatcattaaaaagtcaggaaacaacagggacatggatgaaattggaaatcatcattctcagtaa

SEQ ID NO: 122795 - DNA, 6080 bp, Homo sapiens
ccccactgtcaacattagacagatcaacgagacagaaagttaacaaggatatccaggaattgaactcagctctgcaccaagtggacctaatagatatctacagaactctccaccccaaatcaacagaatatacattcttttcagtaccacaccacaactattccaaaattgaccacatagttggaagtaaagcactcctcagcaaatgtaaaagaacagaaattataacaaactgtctctcagactacaatgcaatcaaactagaactcaggactgagaaactcactcaaaaccgctcaactacatggaaactgaacaacccgctcctgaatgactactgggtacataaggaaatgaaggcagaaataaagatgttctttgaaaccaacgagaacaaagacacaacataccagaatctctgggacgcattcaaagcagtgtgtagagggaaatttatagcactaaatgcccacaagagaaagcaggaaagatctaaaattgacaccctaacatcacaattaaaagaactagagaagcaagagcaaacacattcaaaagctactagaaggcaagaaataactaagaccagagcagaactgaagaagatagagacacaaaaaacccttcaaaaaatcaatgaatccaggagctggttttttgaaaagaccaacaaaattgatagactactggcaacactaataaagaagaaaagagagaagaatcaaataggtgcaagaaaaaatgatgaaggggctatcaccaccaatcccacagaaatacaaactactatcagagaatactataaacacctctacacaaataaactagaaaatctagaagaaatggataaattccttgacacatacaccctcccaagaccaaaccaggaagaagttgaattgctgactagtccaataagaggctctgaaattgaggcaataattaatagcttaccaaccaaaaaaaagtccaggaccagatggttacacagccgaattctaccagaggtacaaggaggaactggtaccattccttctgacagggcaatcaggcaggagaaggaaataaaaggcattcaattaggaaaagaggaagtcaaattgtccccgtttgcagatgacatgattgtatatctagaaaaccccatcgtctcagcccaaaatctccttaagctgataagcaacttcagcaaagtctcaggatacaaaatcaatgtgcaaaaatcacaagcattcttatacagcaataaaagacaaacagagaaccaaatcatgagtgaactcccattcacaattgcttcaaagagaataaaatacctaggaatccaacttacaagggatgtgaaggacctcttcaaggagaactacaaaccactgctcaatgaaataaaagaggataaaaacaaatggaagaacattccatgctcacgggtaggaagaatcaatatcgtgaaaatggccatactgcccaaggtaatttatagattcaagtttccattgacaacagatcaagaaaatgtggtcagattaacgagacagaaagttaacaagggtatccaggaattgaactcagctctgccccgagtggacctaatagacatctacagaactctccagcccaaatcaacagaatatacattcttttcagtaccacaccacaactattccaaaattgaccacatagttggaagtaaagcactcctcagcaaatgtaaaagaacagaaattataacaaactgtctctcagaccacagtgcaatcaaactagaactcaggattaagaagcacactcaaaaccgctcaactacatggaaactgaacaacctgctcctgaatgactactgggtacataacaaaatgaaggcagaaataaagatgttctttgaaaccaatgagaacaaagacacaacataccaaaatctctgggacacattcaaagcagtatgtagagggaaatttatagcactaaatgcccacaagagaaagcaggaaagatctaaaattgacaccctaacatcacaattaaaagaactagaaaagcaagagcaaacacattcaaaagctagcagaaggcaacaaataactaagatcagagcagaactgaaggaaatagagacacaaaaaaacccttcaaaaaatcaatgaatccaggagctggttttttgaaaagaacaacaaaattgatagaccactagcaagactaataaagaagaaaagagagaagaatcaaatagatgcaacaaaaaatgataaaggggatatcaccaccgatcctacagaaatacaaactatcatcagagaatactataaacacctctacacaaataaactagaaaatctggaaaaaatgcataaattcctcgacacatacaccctcccaagactaaaccaggaagaagttgaatctctgaatagaccaataataggctctgaaattgaggcaataatcagtatagcataccaaccaaaaaaagtccaggaaccaggtggattcacagccgaattctaccagaggtacaaggaaggagctgtgttggaagttctggccagggcaatcaggcaggagaaggaaataaagggtattcaattaggaaaagaggaagtcaaattgtcccctctttgcagatgacatgattgtatatgtagaaaacccccttccgtctcagcccccatatctccctcaagctgataagcaacttcagcaaactcctcaggatacaaaatcaatgtacaaaaatcacaagcattcttatacaccaataacagacaaacagagagccaaatcatgagtgaactcccattctgttattgcttcaaagagaataaaatacctaggaatccaacttacaagggatgtgaaggacctcctcaaggagaactacaaaccactgctcaatgaaataaaagaggatacaaacaaacggaagaacattccatgctcgtaggtaggaagaatcaatatcgtgaaaatggccatactgcccaaggtaatttacagattcaatgccatccccatcaagctaccaatgactttcttcacagatttggaaaaaaactacttaaaagttcatatggaaccaaaaaaggagcctgcattgccaagtcaatcctaagccaaaagaacagagctggaggcatcacgctatctgacttcaaactgtactacaaggctacagtaaccaaaacagcatggtactggtaccaaaacagcatggtactggtaccaaaacagagatatagatcaatggaacagaacagagccctcagaaataacgccgcatgtctacaactatctgatctttgacaaacctgacaaaaacaagaaatggggaaaggattccctgtttaataaatggtgccgggaaaactggctagccatatgtagaaagctgaaactggatcccttccttacaccttatacaaaaattaattcaagatggattaaagacttaaatgttagacctaaaaccataacaaccctagaagaaaaactaagcaataccattcaggacataggcatgggcaaggattccatgtctaaaacaccaaaagcaatggcaacaaacgtcaaaattcaaaaatgggatctaataaaactaaagagcttctgcacagcaaaagaaactaccatcagagtgaacaggcaacctacaacatgggagaaaattttcgcaacctactcatctgacaaagggctaatatccagaatctacaatgaactcaaacaaatttacaagaaaaaaacaaacaaccccatcaaaaagtgggtgaaggacatgaacagacacttctcaaaagaagacatttatgcagccaaaaaacacatgaaaaaatgctcaccatcactggccatcagagaaatgcaaatcaaaaccacaatgagataccatctcacaccagttagaatggcaatcattaaaaagtcaggaaacaacaggtgctggagaagatgtggagaaataggaacacttttacactgttggcgggactggaaactagttctaccattgtggaagagcctaactccatggctaccaccatcacaggtccacagagagtactgccaaactactgcttatgttctcttaaggctcttcagtcagcttatgactgtgctgagacacacctttcagggcagtgggctccactctggcccaaggcagctttgaagacagtagaggttctcccagaatgcagctggagatctgagaatggacagactgcctccgcaagtgggtccatgacccccaagtatcctaactgggaggcaccccacagtaggggcacactgacacctcacatggccaggtactcctctgagaaaaaacttccagaggaacgttcaggcagcaacatttgctgctcaccagtattaactgttctgcagcctctgctgctgatacccaggcaaacagggtctggagtggaccaaaagcaaactccaacagacctgcagctgagggtcctgactgttagaaggaaaactaacaaacagaagggacatccacaccaaaaccccatctgtatgtcaccatcatcaaagaccaaagaaatacaaactaccatcagagagtactataaacacctctatgcaaataaactagaaaatctagaagaaatggataaattcctcaacacatacaccctcccaagactaaaccaggaagaagttgaatctctgaatggaccaataacaggctctgaaattgaagcaatagttaatagcttaccaaccaaaaaaagtcgaggaccagatggattcacagccgaattctaccagaggtacaaggaggagctagtaccattccttctgaaactattccaatcaatagaaaaagagggaatcctccctaactcattttatgaggccagcatcatcctgatacaaaagcctggcagagacacaacaaaaaaagagaattttaggccaatatccctgatgaacatcgatgctaaaatcctcaataaaacaatggcaaacctaattcagcagcacatcaaaaagtttgtccactatgatcaggtgggcttcatccctgggatgcaagactggttcaaaatacgcaaatcaataaacataatccagcatataaacagaaacaatgacaaaaatcatatgattgtctcaatagatgcagaaaagtcctttgacaaaattcaacaacgcttcatgctaaaaattctcaataaattaggtattgatggcacatatctccaaataataagagctatctatgacaaacccacatccaatatcatactgaatgggcaaaaacaggaagcattccctttgaaaactggcacaagacagggatgccctctctcaccactcctattcaacatagtgttggaagttctggccagggcaatcaggcaggagaaggaaataaatggtattcaattaggaaaagaggaagtcaaattgtccctgtttgcagttgacatgattgtatatctagaaaaccccattgtctcagcccaaaatctccttaagctgataggcaacttcagcaaagtctcaggatacaaaatcaatgtgcaaaaatcacaagcatttttatacaccaataacagacaaacagaaagtcaaatcatgagtgaactcccattcacaattgcttcaaagagaataaaatacctaggaatccaacttacaagggatgtcaaggacctcttcaaggagaactacaaaacactgctcaatgaaataaaagaggatacaaacaaatggaagaacattccatgctcatgggtaggaagaatcaatatcgtgaaaatggccatactgcccaagccatatgtggatggcaaagctgaaagagcactgattgtaacactctttctggggcttcaggggtcatggccccacccccgccagatgctgctgcagatccacatgaagttttgctcctgccagcacccaaaagcactcgccctggttcctgcacctgctcacctgcactccccgtcctgtgatgggtggaaggcagtgggaccaagcaagtggagtccatccctgccagcactgaagcagccagctagttctagcacccctgcactcgagttcctgcctgcaaaggg

SEQ ID NO: 122796 - DNA, 4447 bp, Homo sapiens
atgaaggtggaaataaagacattctttgaaaccaatgagaacaaagacacaacataccagaatctctgggacacattcaaagcagtgtgtagagggaaatttatagccctaaatgcccacaagagaaagcaggaaagatctaaaattgacaccctaacatcacaattaaaagaactagaaaagcaagagcaaacacattcaaaagctagcagaagacaaatacaaactaccatcggagaatactataaacacctctacacaaataaactagaaaatctagaagaaatggataaattcctggacacatacacccttccaagactaaaccaggaagaaggtgaatccctgaagagaccaatggcaggttctgaaattgaggcaataattaatagcctaccaaccaaaaacagtccaggaccagacagattcacagctgaattctaccagaggtacaaagaggagctgctgataagcaacttcagcaaagtctcaggatacaaaatcaatgggaaaaaatcacaagcattcctatacatcaataacagacaaacagagagccaaatcatgagtgaactcccattcacaattgcttcaaagagaataaaatacctaggaatccaacttacaagggatgtgaaggacctcttcaaggagaactacaaaccactgctcagcgaaataaaagaggacacaaacaaatggaagaacattccatgctcatggataggaagaaccaatattgtgaaaatggccatactgcccaagaggaaacagccttctgcactcacagccgaagggaaagcagcaggttggggcttcttgtggccaacttcagagcctgtcaccaggaaaggtttagaagagaacgctcagtcccggcaggagtccacgcggaggctcatccttgttgggagaacaggggccgggaagagcgccactgggaacagcatcctgggccagagacggttcttctccaggctgggggccacgtctgtgaccagggcctgcaccacgggcagccgcaggtgggacaagtgccacgtggaagtcgtggacactccggacattttcagctcccaagtgtccaagacagatcctggctgtgaggagagaggtcactgctacctgctctcggcccccggaccccacgcgctgctcctggtgacccagttgggtcggttcaccgcccaggaccagcaggcggtgaggcaggtgagggacatgttcggggaggacgtcctaaaatggatggtcatcgtcttcaccaggaaggaggacctggccgggggctccctgcacgattacgtgagcaacacagagaaccgggccttgcgcgagctggtggccgagtgcgggggccgggtctgtgcctttgataaccgggccaccggccgggagcaggaagcccaggtggagcagctgctggggatggtcgagggcttggtgctggagcacaagggcgcccattactccaacgaggtgtatgagctggcgcaggtgctgcgctgggcaggccctgaggagcggctccggcgggtggcggagcgcgtggcagccaggggagaatggacagaagaaatatttgaaaaggaaatggttaagacttttctaaaagtattgaaggacaccaaactacagatccaagaaacagagagctccaagcagggctcccctttgtcttccacaatgattggaagcctcctgaggccctcaccagaagaagatgccagcactgtgaggccctcaccagaagaagatgccagcactgtgcttcctgcacagcctgcaaactggtgggctccatcacgtgccagacagcttaccagggtcagtcacgagcccagagtcaaaccctgcaagggcttgttctggtcctctttggaccagagtgcctttctgatcctggttagcagaaactttccagaagcagagcctctgagtcatggagctttcagccccagcacatggctcctccttaactgcgtctgctcaacctccctcagccctgtgaacaagcatccccgcacacagacgcagagcaggactctctctgctgccacttcaccttcctgagagaggaccagcggccagagcctcagtgactgccaccctggaggacagggcacaacaaccgtttctggagagaatgggaggattccagaaggggcaaatatggaactatggctgaaggtagatcagaagataactttgtctgcaacaccaccggcattgaggattatcctagtgggcaaaacaggctgcgggaaaagtgccacaagggaacagcatccttggccagcccgtgtttgagtccaagctgagggcccagtcagtgaccaggacgtgccaggtgaaaacaggaacatggaacgggaggaaagtcctggtggttgacacgccctccatctttgagtcacaggctgatacccaagagctgtacaagaacatcggggactgctacctgctctctgccccggggccccacgtcctgcttctggtgatccagctggggcgtttcactgctcaggacacagtggccatcaggaaggtgaaagaggtctttgggacaggggccatgagacatgtggtcatcctcttcacccacaaagaggacttagggggccaggccctggatgactatgtagcaaacacggacaactgcagcctgaaagacctggtgcgggagtgtgagagaaggtactgtgccttcaacaactggggctctgtggaggagcagaggcagcagcaggcagagctcctggctgtgattgagaaggctggggagggagcgagagggctccttccacagcaatgacctcttcttggatgcccagctgctccaaagaactggagctggggcctgccaggaagactacaggcagtaccaggccaaagtggaatggcaggtactgcctgtagtcttcttggcaggccccagccctgcctctctggagcagctgggcatccaggaagaggttattgctgtagaaggagccctctcgctccctccccagcctctcgatcgcagccaggagctctgcctgctgctgcctctgctcctccccggcagcccggttgttgaaggcacagtaccttctctcacattcctgcaccagtgctcgggtagaaaatccacccaggccccacagaagaataacttctcaggcttcgctactatgaaaaacccatacaacccattccagagcaacatgaggaccttgctgtgtgcaaagtttcacacaatgaagcatgcaggcctgggtgaaggaatacctcctgacaactccgggaatgatggctatgctaataatgggtatagtgcccgtgaagaagaaaatgagacactcactgaaaatctgagaagcaaagtaactgctataaaatctttttccattgaaataggccatgaagttaaaacccaaaataaattattagctgtaatggattcacaatttgattctacaactggatttctagtgttggaagttctggccagggcaatcaggcaggagaaagaaataaagggtattcaattaggaaaagaggaagtcaaattgtccctgtttgcagatgacatgattgtacatttagaaaaccccatcgtctcagcccaaaatctctttaagctgataagcaacttcagcaaagtctcaggatacaaaatcaatgtgcaaaaatcacaagcattcttatacaccaataacagacaaacaaaggctgaatacaagaaaaacatagctcccaccttcctccagcccatggagaagctcaggattatgagccgagaaactgtgacatcttccctcgcctccagtctggaccaggtcaacaagtcagtctgccacagtttcatggatgctggtagaagccacaaaaccccgagttatgacaaaaaacaatttattacacacggcaatagcagtggccacggtagcagcatttttgcgtgggttctaggaccccagttcccacagacaatgcaaagaggcattgcaggtgacaccagcacagccggcttctttacaagcctctatgtaaagcacaggctggtgagggccccccaggaaaagcagcaaccgccctcggcacaggccccctactcccaagtcctgtgcaggagcaggtcttgcccagcgcagcagctctgcacctctgtgggcaccgctctgccaagagggaaggtgcaggccctgcagcccatcgccttgggatctgaagaccagccctgtggggctgcttaaggtcatgaaactgggcctcatgggagatttcataaaggcccctaccagctttcctgcccttcagaaatgcttacatctatatatttatgttatatcttcatatataaagaaaatggaaaaagtcaaaatcagtttgctatcatttacaatgaaaggaaggaagactaaggatgtgtttatgtgtgtgtggagacaggaaaagagac

SEQ ID NO: 122797 - DNA, 5656 bp, Homo sapiens
atgaggaaaaaacagagcagaaaaactggaaactctaaaaagcagagcacctctcctcctccaaaggaacgcagttcctcaccagcaatggaacaaagctggacggagaatgactttgacgagttgagagaagaaggtttcagacgatcaaactactccaagctacaggaggaaattgaaaccaaaggccaagaagttgaaaacttggaaaaaaatttagacaaatgtataactagaataaccaatatagagaagtgcttaaaggagctgatggagctgaaagccaaggctcgagaactacatgaagaatgcagaagcctcaggagccgatgcgatcaactggaagaaagggtatcagtaatggaagatgaaatgaatgaaatgaagcaagaagggaagtttagagaaaaaagaataaaaagaaatgaacaaagcctccaagaaatatgggactatgtgaaaagaccaaatctacctccgattgatgtacctgaaagtgacagggagaatggaaccaagttggaaaacactctgcaggatgttatccaggagaacttccccaacctagcaaggcaggccaacattcagattcaggaaatacagagaatgccacaaagatactcctcgagaagagcaactccaagacacataattgtcagattcaccaaagttgaaatgaaggaaaaaatgttgagggcagccagagagaaagcattcaagcaggcctcccggagagaagatgacattgccaaggtaaccagtggcatgagagttttattcaagccaggaaccacagaggtacaggagctggccctttgctatggtggaatggccaacagaaccatctcagccctcaagaccactcagaggcagctttccaagctctggaaggaggagctgctgcaggacgtgtgtgcaggactggcagaggagctgcatctgcctcccgatgcccctggtggcatggtggacttccggtgcaccctcaccctcagcttcttcttcaagttctacctgacagtccttcagaagctgggccaagagaacctggaagacaagtgtggtaaactggaccccactttcgccagtgcaactttactgtttcagaaagaccccccagccgatgtccagctcttccaagaggtgcccaagggtcagtctgaggaggacatggtgggccggcccctgccccacctggcagcggacatgcagcctctggtgaggccgtgtactgtgacgacattcctcgctacgagaatgagctgtctctccggctggtcaccagcacccgggcccacgccaagatcaagcatcgagatgaagttcaagaatatgctgtttcctatgattgtctgcccagcctggatccctgagctgaattcggtagaacatggacccgacggtatctcctttggagctgcttgccccctgagcattgtggaaaaaaccctggtggatgctgttgctaagcttcctgcccaaaagacagaggtgttcagaggggtcctggagcagctgcgctggtttgctgggaagcaagtcaagtctgtggcgtccgttggagggaacatcatcactgccagccccatctccgacctcaaccccgtgttcatggccagtggggccaagctgacacttgtgtccagaggtgagctgcctgaagcagaggtccaggaagaaggacttgggggagaaaagtctcaccagataggtcattttctggagaaacagagctcaaagttcagtgacccagctttccctgtgatttggatccagggaagcatggagaatgtacctggtttggtggacgggaaagctggatattttctctgtagagaattcacagcaggaactgctacctgcatgccttacctagtggggcaccaggagaactgtccagatggaccacaccttcttccctggctacagaaagaccctgctgagcccggaggagatactgctctccatagagatcccctacagcagggagaaatacaaactacccatccagagattactacaaacacctctacgccaaataaacttgaaaatcctagaagaaatggataaattccttgacacatacaccctccccaagactaaacccaggaagaagttgaatctctgaatagaccaataacagggctctgaaattgtggcagtaatcaatagcttaccaaccaaaaagagtccaggaccagatggattcacagccaaattctaccagaggtacaaggaggaactgcatataaacagaaccaaagacaaaaaccacatgattatctcaatagatgcagaaaaggcctttgacaaaattcaaccacagccctttcatgctaaaaactctcaaatgaattaggtattgatgggacatattcttcaaaataataagagctatctatgacaaacccaccagccaatatcagacttgaatggggccaaaaactggaagcattcccctttgaaaaactggcacaagaacaggggatgcccctcctcctcaacccactcccccagtccaacatagtggttgggaagttcctggcccagggcaatccaggcaggagaaagaaataaagggtattcaagtagaaaaacaggaagtcaaattgtccctgtttgcagatgacatgattatatgtttagaaaaccccatcggtctcagctcaaaatctcccttaagctgataagcaacgtcagccaaagtctgaggatacaaaatcaatgtgcaaaaatcacaagcattcttatacaccactaacagacagacagagagccaaatcatgagtgaactcccattgacaattgcttcaaagagaataaaatacctaggaatccaacttacaagggatgtgaaggacctcttcaaggagaactacaaaccactgctcaaccgaaataaaagaggacacaaacaaatggaagaacattccatgctcatggataggaagaatcaatattgtgaaaattggccataatgcccaaggtaatttatagattcaatgccatccccatcaagctaccaatgactttcttcacagaattggaaaaaaaaactgctttaaagttcatatggaaccaaaaaaagagcccgcatcgccaaggcaatcctaagccaaaagaacgaagctggaggcatcacactacctgacttcaaactatactacaaggctacagtaaccaaaacaacatgatactggtaccaaaacagagatatagaccaatggaacagaacagaggcctcagaaataatgccacacatctacaacaatctgatctttgacaaacctgagaaaaacaagcaatggggaaaaggattccctatttaataaatggtgctgggaaaactggctagccatatgtagaaagctgaaactggatcccttccttacaccttatacaaaaatgaattcaagatggattaaagacttaaacgttagacctaaaaccataaaaaccctagaagaaaacctaggcattaccattcaggacataggcatgggcaaggacttcatgtctaaaacaccaaaagcaatggcaacaaaagccaaaattgacaaatgggatctaattaaactaaagagcttctgcacagcaaaagaaactaccatcagagtgaacaggcaacctacaaaatgggagaaaatgttcacaacctactcatctgacaaagggctaatattcagaatctacaatgaactcaagcaaatttacaagaaaaaaacaaaaaaaccccatcaaaaagtgggcaaaggatgtgaacagacacttctcaaaagaagacatttatgcagccaaaaaacacatgaaaaaatgctcatcatcactggccatcagagaaatgcaaatcaaaaccacaatgagacaccatctcacaccagttagaatggcaatcattaaaaagtcaggaaacaacagctggaggtcatgcctgcaaccatgggcagcacattcaacaacttaccggcacccaggaaccatggagaaaaaaaccagcagcggggacacccccactgtcttcccatccaccctgggtcgcaagaaaagcacaagtgctcaactaactgaactgacagctcttacacttgagttaagcaagggaaaggtaagaaacgccccttcaaagttagatctaagcccttttgagatgctgtatggatggccttttctcaccaatgatttcttattagaccaagagacctctgaattgggcaagcatgtaaactctctggctcgttttcaacaggaattaactcaagtagcagaagcccaaccccaagaagtaggaccacctttatttaacccaggatatttggtattgcccaagcagggagggccttacaccattctcctttcaatgccctcagcagtaaaagttacaggtattgattcctggatacatcatgctcaagttaaagcctggaaaactgagagagcaatccccggcagcccagcggaatgtcttggataccaatgtgaggaaataagagacctgaagctgaaaatcaaaagagataagaaaatgagcaagggctactcatcctactcagttccagtcatccattcagtcatccagtcatccagtctttgtacaactggtacacagaagtcaagaattgaggtttgggaacctctgcctagatttccgaagatgtatggatatgcctggattcctagacaaaagtttgctgcaggggcagggccctcatggagaacctctgttaaggcagtgcagaagggaaatgtggggtcgaagccccaccacagagaccctactggggcactgcctagtggagctgtgagaagaggaccaccatcctccagacctcagaatggtagatccactggcagcttgcaccgtgtgcctggaaaagccagacctcaacaccagcctgtgaaagcagccaggagggaggccgtgccctacaaagccacaggggtagagctgcccaagaccatgggaacccacctattgcatcagtgtgacctggatctacctgccaccttctctctcagccttcacatcaagtacctcaaacatcgacattcttattccccacatctccacctcctattcaccgtcatgggcccccatgccaggcaaatgattcgcatctctggcatagatgttgacaccaggaacctgtataagctgaatttgaaagtaaagtggctggaggttttggatcaagaggaacctgaatacagtagaacaacctccaggaagaagcagggattccctaacagcgatgaagaagatgtattgtggatggagaagcagctgtcctgcttctgtgacaagtaccaaaaatggataccaaccagacagctgaagggacagctcagttacgttaaggaagcagatctgattccagatgtaatgcccccacaagctttgttccatgatgatgatgagatggaaggcaatggagccatagacgcagggatggagtatgtctacaacattgacacgttgcttagatggtctgatggtgaggaggaaggagaaggaggagaagaaggaagaggaggaggaagaggaggagaaggaggaggaaagagggaggagggagaaggaaaaaaagaagaagaacaaggaggatggggaggaggacaggaagtggaagaagaaggaggaggaggagggggaaattaa

SEQ ID NO: 122798 - DNA, 8551 bp, Homo sapiens
atgacaggatcaaattcacacataacaatattaactttaaatataaatggactaaattctgcaattaaaagacacagacgggcaagttggataaagagtcaagacccatcagtgtgctgtattcaggaaacccatctcacgtgcagagacacacataggctcaaaataaaaggatggaggaagatctaccaagcaaatggaaaacaaaaaaaggcaggggttgcaatcctagtctctgataaaacagactttaaaccaacaaagatcaaaagagacaaagaaggccattacataatggtaaagggatcaattcaacaagaggagctaactatcctaaatatttatgcacccaatacaggagcacccagattcataaagcaagtcctgagtgacctacaaagagacttagactcccacacattaataatgggagactttaacaccccactgtcaacattagacagatcaacgagacagaaagtcaacaaggatacccaggaattgaactcagctctgcaccaagcggacctaatagacatctacagaactctccaccccaaatcaacagaatatacattttttttagcaccacaccacacctattccaaaattgaccacatagttggaagtaaagctctcctcagcaaatgtaaaagaacagaaattataacaaactatctctcagaccacagtgcaatcaaactagaactcaggattaagaatctcactcaaagccgctcaactacatggaaactgaacaacctgctcctgaatgactactgggtacataatgaaatgaaggcagaaataaagatgttctttgaaaccaacgagaacaaagatacaacacacataccagaatctctgggacacattcaaagcagacaacataccagaatctctgggacacattcaaagcagtgtgtagagggaaatttatagcactaaatgcccaaaagagaaagcaggaaagatctaaaattgaaaccctaacatcacaattaaaagaactagaaaagcaagagcaaacaacattcaaaagctagcagaaggcaagaaataactaaaatcagagcagaactgaaggaaattggggacacaaaaaaaccccttcaaaaaattaatgaatcccaggagctgggttttttgaaaggatcaacaaaattgatagaccgcttagcaaggacttaataaagaaaaaaagagagaagaatcaaatagacgcaataaaaaatgataaaggggatatcaccaaccgatcccacagaaatacacactaccatcagagaatactatagaatacacttctacgccaataaactagaaaatgaagaagaaatggataaattcctcgacacgtatgtgtctctcccaagactaaaccaggaagaagttgaatctttgaatagaccaataacaggatctgaaattgtggcaataatcaatagtttaccaaccaaaaagggtccaggaccagatggattcacagccgaattctgccagaggtacaaggaggaactggtaccattccttctgaaactattccaatcaatagaaaaagaaggaatcctccctaactcattttatgagggccagcatcattctgataccaaagccaggcagagacacaacaacaaaaaaagaattttagaccaatatccctgatgaacatcgatgtgaaaatcctcaataaaatactggcaaaccaaatccagcagcacatcaaaaagcttatccactgtgatcaagtaggcttcatccctgggatgcaaggctggttcaacatatacaaatcaataaacgtaatccagcatataaacagaaccaaagacaaaaaccacatgattatctcaatagatgcagaaaaggccttcgacaaaattcaacagctcttcatgctaaaaactctgaatcaactaggtattgatgggacatatatttcaaaataataagaagagctatctataacaaacccacaggccaatatcattactgaatggacaaaaaactggaggcattcccctttggaaaactggcacaaggacagggatgccctctctcaccactcttattcaacatagtgttggaagttctggccagggcaatccgtcaggagaaagaaagaaagggtattcgattaggaaaagaggaagtcaaatttgtccctgttggcagatgacatgatggtatatcttagaaaatcccaatgtctcagccccaaaatcttctttaaggctggttaagcaacttcagcaaaagtcttcaggttacaaaatcaatgtgcaaaaatcaccaagcattcttatatacaccaataatagacagacaaacagagaagccaaatcatgactgatgagtgaactcatgagtgaactcccagttcacaattgcttcaaagagaataaaatacctaggaatccaacttacaagggatgtgaaggacctcttcaaggagaactacaaaccactgctcaaggaaataaaagaggatacaaacaaatggaagaacattccatgctcatgggtaggaggaagaatcaatctcgtgaaaaatggccatactgcccaaggtaatttatagattcaatgccacccccatcaagctaaccaatgactttcttcacagaattggaaaaaaactactttaaaggttcatatggaaccaaacaagagcctggtttcgccaaatcaatcttaagccaaaagaacaaagccagaggcattacgctacctgacttcaaactatactacaaggctacagtaaccaaaacagcatggcactggtaccaaaacagcatggtactggtaccaaaacagagatatagaccaagggaacggaacagaacagagccctcagaaataatgccgcatatctacaactatctgatctttgacaaacctgagaaaaaacaagcaatggggaaaaggattccctatttaataaatggtgctgggaaaactggctagccatatgtagaaagctgaaactggatccctttcttacaccttatacaaaaatcaattcaagatggattaaagacttaaatattagacctaaaaccataaaaaccctagaagaaaacctaggcatttaccattcaggacataggcatgggcaaggacttcatgtccaaaacaccaaaagcaatggcaacaaaggacaaaattgacaaatgggatctaattaaactcaagagcttctgcacatctgcacagcaaaagaaactaccatcagagtgaacaggcaacctacagaatgggagaaaatttttgcaatctactcatctgacaaagggctaatacccagaatctacaatgaactcaaacaaatttacaagaaaaaaatcaaacaaccccatcaaaaagtggacgaaggcacatgaacagacacttctcaaaagaagacatttatgcagccaaaaaacacatgaaaaaatgctcaccatcactggccatcagagaaatgccaatcaaagcctcaatgagataccgtctcacaccagttagaatggcaatcattaaaaagtcaggaaacaacaggagctggtattttgaaaagatcaacaaaattgatagactgctagcaagactaataaagaaaaaaagagagaagaatcaaatagacgcaataaaaaatgataaaggggatatcaccactgatcccacagaaatacaaactaccaccagagaatactataaacacctctatgcaaataaactagaaaatctagaagaaatggataaattcctcgacacatacaacctcccaagactaaagcaggaagaagttgaatctctgaatagaccaataagaggctctgaaattgtggcaataatcaatagcttaccaaccaaaaaaagtccaggaccagatggattcacagccgaattctaccacaggtacaaagaggagctggtaccattgcttctgaaactattccaatcaatagaaaaagaggtaatcctccctaactcattttatgaggccagcatcatcctgataccaaagcctgacagagacacagcaaaaaaagagaattttagaccaatatccttgatgaacatcgatgcaaaaatcctcaataaaatactggcaaaccgaatccagcagcacatcaaaaagcttatccaccatgatcaagtgggcttcatccctgggatgcaaggctggttcaacatacgcaaatcagtaaatgtaatccagcatataaacagaaccaaagacaaaaaccacatgatcatctcaatagatgcagaaaagtcctttgataaaattcaacaacacttcatgctaaaaactctcaataaattaggtattgatgggtcatatctcaaaataataagagctacctatgacaaacccacagccaatatcatactgaatgggcaaaaactggaagcattccctttgaaaactggcacaagacacggatgccccctctcaccactcctattcaacatagtgttggaagttctggccagagcaatcaggcaggagaaggaaataaagggtattcaattaggaaaagaggaagtcaaattgtccctgttcatagatgacatgattgtatatctagaaaaccctaaagcctcatccaaaaagcttccagaactaaacaaagacacaatataccagaatctctgggatgcattcaaagcagtatgtagagggaaatttacagcactaaatgcccacaagagaaagcaggaaagatccaaaattgacaccctaacatcacaattaaaagaactagaaaagcaagagcaaacacattcaaaagctatcagaagacaagaaataactaaaatcagagcagaactgaaggaaatagagacacaaaaaacccttcaaaaaattaatgaatccaggagctggttttttgaaaaagatcaacaaaattgatagaccgctagcaagaataataaagaagaaaagagagaagaatcaaataaacacaatcggaaatgataaaggggatatcaccaatgaccccgcagaaatacaaactaccatcagaaaatactacaaacaactctatgaaaacaaactagaaaatctagaagaaatggataaattcctcaacacatacaccctccaaagaatgaaccaggaagaagttgattccctgaatagaccaacaatgagctctgaaattgaggcaataatcaatagcttaccaaccaaaaagagtctaggagctgatggattcacagctgaattctaccagggcccaaaatctccttaagctgataagcaacttcagcaaagtctcaggatacaaaatcaatgtgcaaaaatcacgggcattcttacacaccaataatagacaaacagagagccaaatcatgagtgaactcccattcacaattgctttaaagagaataaaatacctaggaatccaacttacaagggacgtgaaggacttcttcaaggagaactacaaaccactgctcaatgaaataaaagaggatacaaacaaatggaagaacattccacgctcatgggtaggaagaatcaatattgtgaaaatggccatactgcccaaggtaatttatagattcaatgccatccccatcaagctactaattactttcttcacagaattggaaaaaaactactttaaagttcatatggaaccaaaaaagagcccgcatagccaagtcaatcctaagccaaaagaacaaagctggaggcatcacactacctgacctcaaactataccacaaggttacagtaaccaaaacagcatggtactagtatcaaaacagagatataagatcaatggaacagaacagagccctcagaaataacaccacatatctacaactatctgatctttgacaaacctgagaaaaccaagcaatggggaaaggattccctatttaataaatggtgctgggaaaactggctagccatatgtagaaagctgaaactggatcccttccttacaccttatacaaaaatcaattcaagatggattaaagacttaaacgttagacctaaaaccataaaaaccctagaagaaaacctaggcattaccattcaggacataggcatgggcaaggacttcatgtctttgcccaaacaccagaagcaatggcaacaaaagccaaaattgacaaatgggatctaattaaactaaagagcttctgcacagccaaagaaactaccatcagagtgaacaggcaacctacagaatgggagaaaatttttgcaatctacccatctgacaaaggactaatatccagaatctacaatgaactcaaacaaatttacaagaaaaaaacaaacaaccccatcaaaaagtgggcgaaggacatgaacagacacttctcaaaagaagacatttatgcagccaaaaaacacatgaaaaaatgctcatcatcactggccatcagagaaatgcaaatcaaaaccacagtgagataccatctcacaccagttagaatggcgatcattaaaaagtcaggaaacaacagaccaaaagtagataaaaccacaaagatggggaaaaaacagagcagagaaactggaaactctaaaaagcagagtgcctctcctcctccaaaggaacgctgttcctcaccagcaacggaacaaagctggatggagaatgactttgatgagctgagagaagaatggttcagacgatcaaattactctgagctacaggacgatattcaaaccaaagtcaaagaagttgaaaactttgaaaaaaatttagaagaatgtatagctagaataaccaatacagagaagtgcttaaaggagctgatggagctgaaaaccaggctcaagaactacgtgaagaatgcagaagcctcaggaaccaatgcaatcaactggaagaaaggaactagaaaagcaagagcaaacacattcagagctagcagaaggcaagaaataactaagatcagagcagaactgaaggaaatggagacacaaaaaacccttcaaaaaattaatgaatccaggagctggttttttgaaaagatcgacaaaattgatagaccgctagcaagactaataaagaaaaaaagagagaagaatcaaatagacacaataaaaaatgataaaggggatatcaccaccgatccaaaagaaatacaaactaccatcagagaattctacaaacacctctatgcaaataaactagaaaatctagaagaaatggataaattccttgacacatacactctcccaagactaaaccaggaagaagttgaatctctgaatagagcaataacaggagctgaaattgtggcagtaatcaatagcttaccaaccaaaaagagtccaggaccagatggattcacagccgaattctaccagaggtacaaggaggaactgctgataagcaacttcagcaaagtctcaggatacaaaatcaatgtgcaaaaatcacaagcattcttatacaccaacaacagacaaacagagagccaaatcatgagtgaactcccattcacaattgcttcaaagaaaataaaatacctaggtatccaacttacaagggatgtgaaggatctcttcaaagagaactacaagccactgctcaatgaaataaaagaggatacaaacaaagggaagaacattccatgcctatgtgtagaaggaatcaatatcgtgaaaatggccacactgcccaaggtattttacagattcaatgccattcccatcaagctaccaatgactttcttcacagaattggaaaaaactactttaaagttcatatggaaccaaaaaagagcccacatcaccaagtcaatcctaagccaaaagaacaaagctggaggcatcacattacctgacttcaaactatactacaaggctacagtaaccaaaacagcatggtactgggaccaaaacagagatatagatcaatggaacagaacagagccctcagaaataataccgcatatctacaactatctgatctttgacaaacctgagaaaaacaagcaatggggaaaggattccctatttaataaatggttctgggaaaactggctagccatacgtagaaagctgaaactggatcccttccttacaccttatacaaaaatcaattcaaggtggattaaagacttaagcattagacctaaaactataaaaaccctagaagaaaatctaggcattaccattcaggacataggcatgggcaaggacttcatgtctataacaccaaaagcaatgacaacaaaagccaaaattgacaaatgggatcaaattaaactaaagagcttctgcacagcaaaaaaaaaaaaaactactaacagactgaacaggcaacctgcaaaatgggagaaaattttcacaacctactcatctgacaaagggctaatatccagaatctacaatgaactcaaacaaatttacaagaaaaaaacaaacaaccccatcaaaaagtgggcaaaggacatgaacagacacttctcaaaagaagacatttatgcagccaaaaaaacacatgaaaaaatggtcaccatcactggccatcagagaaatgcaaatcaaaaccacaatgagatatcatctcacaccaattag

SEQ ID NO: 122799 - DNA, 3408 bp, Homo sapiens
cagcgcatctgtggtccccgcatctggcctgcgtccatcgtccaccagtctgctcacctccaggcagccccgttttctagggctgctccggtcccacccagcgctcctggtggctgtgcctggtgactgggacgacttggcagtgtgctgcattgtggctccctctcacgtttgccgcatggtcttcgtcatggacagaactttggggatctctcttccagggcttctcaaaagggaggaagatgcctgctgggtagaggcaaacataaatggccgtgtgttagctcagtgtaacattgatgagctgaagaaagagatgaatatgaattttggagactggcaccttttcagaagcacagtactagaaatgagaaacgcagaaagccacgtggtccctgaagacccacgtttcctcagtgagagcagcagtggcccagccccgcacggtgagcctgctcgccgcgcttcccacaacgagctgcctcacaccgagctctccagccagacgccctacacactcaacttcagcttcgaagagctgaacacgcttggcctggatgaaggtgcccctcgtcacagtaatctaagttggcagtcacaaactcgcagaaccccaagtctttcgagtctcaattcccaggattccagtattgaaatttcaaagcttactgataaggtgcaggccgagtatagagatgcctatagagaatacattgctcagatgtcccagttagaagggggccccgggtctacaaccattagtggcagatcttctccacatagcacatattacatgggtcagagttcatcagggggctctattcattcaaacctagagcaagaaaaggggaaggatagtgaaccaaagcccgatgatgggaggaagtcctttctaatgaagaggggagatgttatcgattattcatcatcaggggtttccaccaacgatgcttcccccctggatcctatcactgaagaagatgaaaaatcagatcagtcaggcagtaagcttctcccaggcaagaaatcttccgaaaggtccagccctgttccaggcgagtttgaagacttaagggaagagggttgcggctgtcaaaacttcccaagtgaggaggatgaatgtggcgcagaagagtcagataacactccacgtgctcaaaggatgacaaagacagaaaacccgaagggaaagtagagagagtgccgaagtctccagaacacagtgttgagccgatcagaaccttcattaaagccaaagagtatttatcgggatgcgctccttgacaataaagggaattcatcggattcatggagtgtagatccacgtgaaagcttctcccaatcacgtctctgcacaatgtaagtgtgcggatgatctcccagacctgaaaaggcataatctcatagagactggaagatgacagtcacagcggaaagcgggggaatcccacatagcctgagtggcctgcaagatccaattatagctcggatgtccatttgttcagaagacaagaaaagcccttcccgaattgcaagcttggattagcccagcagcccttgaagaaaactgggccttgcatgccagaaagcctacaacctggaaccgaactcccagcaccgtgactctgaacaacaatagtgctccagccaacagagccaatcaaaatttcgatgagatggagggaattagggagacttctcaagtcattttgaggcctagttccagtcccaacccaaccactattcagaatgagaatctaaaaagcatgacacataagcgaagccaacgttcaagttacacaaggctctccaaagaatctccggagctccatgcagcaacgctcttctgagagcacaggctttggagaagaaagagaaagcattctttgagaaaaacaagcaaaggagaagagtgttactgtacccttatgacagaattgtcctggattttgactccatccacgcccatcacctttctacattttgctgacagataactaaccgatgatgaggccgaggtaaaagagacatctgcagtgtgacagaagggagcatgagaagcatggctcaccagccaggcctctgtggtctttgtaattagaagcttcagaaactcactaatactactgtacctttcattggcgcattaccccatcaaaactttttgagacgaggtgagatctgagtataaagataggtttttatgtattttaaagggctgaatgtgccaaaaagaaaaaaagctagagaccctttttgcaaacatttggtgaccacacatttgagggaagacgtggcgttaggtgaagcaagaaaccaaaccctgctcttaggggctcacctaggtgagtggcacagcctgtgacgctacagggagaggctgagtaaaccgagatccagcgttctgtatggcaggggtattgcttattcacagaggttctgaaggagtagggaagtacataatgaagagggcttttaaaatttgccaacaaagtgagttcaccggggctgggcagttagtgtgacggggcttgtcctgagctgttaggagagtaaatgcggggagggctggggacctccgtgggtttatatgttcggaaacttttctctccaaatcccagggcctgggctttcccagcaccatccagctgttgccccaaggaagccaccctggtctgttactccaactcttttaaatggtgcccaacttttctaagtgagcttagcaatgagaacgaaaaaaaaacatgaattctttttctggaaaatcagggagacatgggtaataataggtactaataaatatttataagatgagtgaatgaggaaataattacatcaaaaaaggtcagtgacaattgataaatgacaaggaaatatttaattagggtaaaactaaatcattgctctctatactagggatagacttttatctactttcatctggttcctaaggtcaggcatggttagttctgggggaagggatcataaggaaagggaaatacttttttaaaaaaaaatttggaaacatgtaacaaagcaagggtaaaatatatatatatatctatataagtgctgtgactgtaaaagtgtactttccattaattattagcccgagttaagagaatggtcacattgaagtactgtgtggactagaaatgtaccctgtcatcatgcaatgaaatattgttatcgttttaacatagctccatttatgtaggaatgaattctggtggtttaccccaagtcacagttagggacggtagatgggtgaggtccgcaggtgcgcttatttatcctaggattccagtgttacattttccgatgtttatcacttcagtgggtttttattaatatgctgattaagttatttactgggccagtcattgtgctaaatagttgctcctt

SEQ ID NO: 122800 - DNA, 507 bp, Homo sapiens
gaaggtaatgaggctcagacgtgcagcttctggaatacgaggcgtcagctgctggcctcatccgatccttctctgagcgtttcccagaggatggacccgagttggaggagatcctcacacagctggccacagccgatgcccgattctggaagggccccagtgaggccccatctggccaagcttgaggaagatgtgtggccttgcccccaattccatcagaccaaggctgcaagtggccctccattcgtcactttccagcctgccaattgcttcccctctgtgatctcatttcatctgcactgccatacgtggagtgagcaagacagggcttaccatcctgtctaccagatgaggaaatggcagttctgagaagtcactggtctagatcccgcaggtggcacatgacagctagggttcaaaacgttctcaccaaatccaatgctcctcacatattaattttataaccagacaaataaatttttggggcaacccccctcaaaaaaaaaa

SEQ ID NO: 122801 - DNA, 2129 bp, Homo sapiens
ccaggactttctggactcacagaacctcagtgcctacaacacccggctcttcaaagaggtcgatggagaagggaagccctactacgaggtgcggctggcttctgtgcttggctcagagccttccctggactctgaggtgacttccaagctgaagagctatgaattccggggaagcccctttccaggtgacccggggggactacgcgcccatcctccagaaggtggtggagcagctggagaaagccaaggcctattgcagccaacaagccaccaggggcagatgcttggcccagtatatagagagcttcacccagggctccatcgaggcccacaagaggggctcccgcttctggatccaggacaaaggccccatcgtggagagttacatcgggttcatcgagagctaccgcgacccctttggttcccgaggagaatttgaaggtttcgtagctgtggtgaacaaggccatgagtgccaagtttgagcggctggtggcgagcgcagagcagctgctgaaggagctgccctggcccccaacctttgagaaggacaagttcctcacccctgacttcacctccctggatgttctcaccttcgctggctccggcatccctgccggcatcaacatccccaactacgatgatctgaaggcagacggaaggctttaaagaacgtgttcgctgggggaattgtgctgggctgtggcctaacgccacgcaagcgggagaaagcttacctttctggaggaggatgacaaggacctgtacatcctctggaaggggccctccttcgatgtgcaggtgggcctgcacgaagcttgctgggccatggcagtggcaagctctttcgtacaggacgaaaaaggagcattcaactttgaaccaggaaacaagggatccaccccaaaaacggggcgagcagattcaaagctggaatcggaccggggaaacctgggaatagcaagttcagcaccatcgcctccagctacgaagcagtgccgggctgagagcgtgggtctctacctctgtctccacccgcaagtgctggagatctttggctttgagggggctgatgcggaggacgtgatctacgtgaactggctcaacatggttcgggccgggctgctcgctctggagttctacacacctgaggccttcaactggcgacaggcccatatgcaggcccggtttgtgatcctgagagtcttgctggaggctggcgagggactcgttaccatcactcccaccacaggctccgatgggcgcccagatgcccgggtccgcctcgaccgcagcaagatccggtctgtgggcaagcctgctctagagcgcttcctgcggagacttcaggtgctgaagtccacaggggaatgtgacggaaggacgggccttgtacgaggggtatatcaacggtcactgatgcgccccccgagatgcttcctcaccctcaggggacacggtgctgctgcgtaaggaatctcggaagctcagtgtacagcccaacactcaccttgaaggtaatgaggctcagacgtgcagcttctggaatacgaggcgtcacgtgctggcctcatccgatccttctctgagcgtttcccagaggatggacccgagttggaggagatcttcacacaggctggccacagccgatgcccgattctggaaaggcccccagtgaggcccccattctggcccaagcttgaggaagattgttgttgccttgccccccaaattccatcagaccaaggctgcaaagtggcccctcccattcggtgtgtgtatttaggggctggggagggggaggggcaggagcttggaccttggtacttacctcagcttgaggggtggtgacacaacccccttccaatttgtcagcacgtttccagcctgccaaattgcttcccctctgtgatcctcatttcatctgcactgcccatacgtggagtgagcaagacagggcttaccatcctgtctaccaagatgaggaaatggcagttctgagaagtcactggtctagatcccgcaggtggcacgtgacagctagggttcaaaacgttctcaccaaatccaatgctcctcacatattaattttataacccagacaaataaatattagagacaaccaccatc

SEQ ID NO: 122802 - DNA, 522 bp, Homo sapiens; identical to SEQ ID NO: 114701

SEQ ID NO: 122803 - DNA, 864 bp, Homo sapiens; identical to SEQ ID NO: 115468

SEQ ID NO: 122804 - DNA, 471 bp, Homo sapiens; identical to SEQ ID NO: 115469

SEQ ID NO: 122805 - DNA, 687 bp, Homo sapiens
gttgttgtggctccattgggccttcaggggtcaaatctgctatagagtctgaccattgtgcttttcccagccattccttagctttagcttctgagaccaacatgtggactagctgataaaagtctgaatgacctggggcacggtcccccttttccacatcttccagatgagatgttgccattggagctgtcagggaatcatgagggggtggggtctttgcagtcagactctgaactgccttctgttgagcaagtgttagacatgcagtagaggcggcggacagatctggtccaggaagttcagattggtcagggtagagtaggggtgtagggaacttcaaaacacctgaactgcagcagccaggcgttcctccaggactgccacccccaggatcttgcttcaagtgccggaaatctggccactgggccaaggaatgcccgcagcccgggattcctcctaagccatgtcccatctgtgcgggaccccactggaaattggactgtccaactcgcctggcagccactcccagatcccctggaactctggcccaaggctctctgactgactccttcccagatattcgtggcttagcagttgaagactgacactgcctaatcgcctcggaaacctcctggaccatcacagacactttgggtaactcttacagtggagggtaagtccgtcccc

SEQ ID NO: 122806 - DNA, 615 bp, Homo sapiens; identical to SEQ ID NO: 122394

SEQ ID NO: 122807 - DNA, 1767 bp, Homo sapiens; identical to SEQ ID NO: 114662

SEQ ID NO: 122808 - DNA, 438 bp, Homo sapiens
atgtgcatgaaatttggtgccgtgactcggatcgggggacctcccttgggagatcaatcccctgtcctcctgttctttgctccatgagaaagatccacctacaacctcaggtcctcagactgaccggcccaaggaacatctcatcaattttaaatcaggagcttgctacacgtgccggaaatctggccactaggccaaggaatgcctgcagcctgggattcctattaagccgcatctcatctgtgtgggaccccactgaaaatcggactgttcaactcacctggcagccactcccagagcccctggaactctggcccaaggctctctgactgactccttcccagatcttctcggctcagcagctgaagactgacactgcttgattgcctgggaagcctataggaccatcacagacactttggataactcttacagtgg

SEQ ID NO: 122809 - DNA, 1500 bp, Homo sapiens; identical to SEQ ID NO: 122052

SEQ ID NO: 122810 - DNA, 693 bp, Homo sapiens
gccgtggaattccacaaaaaagtcatggtttaggaagtaattcatgcagcaataggagaaaagaaaggaagctacaagcttagtgaccttgggtggaggaacagctcacaaggcagcctctgatccatcaccaaccagcatctcttcactccgtgtaccctgcaggtatcacagcctgtacctgaaggtgaaggggaatgtgttcaaaaacaagcggattctcatggaacacatccacaagctgaaggcagacaaggcccgcaagaagctcctggcgtaagtttcttttcagagtcttaggggaacattcttagacctttgagagttgttcttagatacttaaaatgtgccaatgcctaagtcttgacttgcacgtagtctgtcttaggaatacagctgttcccttagaggcacccactcctctgtcctgtacacacccactcttcctgtctcgtagggactagaggttagttgaagcaggagcctttggtgggcccagcaactcattccagaagctgactaggctcaaagggagaggtctggggatgtgcttctgtctccctagcatctcatctcttcccaaactgacccgtcttttctcttccctgaccagagaccaggctgaggcccgcaggtctaagaccaaggaagcacgcaagcgccgtgaagagcgcctccaggccaagaaggagg

SEQ ID NO: 122811 - DNA, 879 bp, Homo sapiens
  misc_feature (1)...(879): n = a,t,c or g
gctttcctgctacaagaattatgtttaaaaagctccacaggggagctctttcctttcgctgctgtggctgcagccttgagtatgctcaggcttcagaagaggcttgcctctagtgtcctctgctgtggcaagaagaatatctggttagaccccaatgagaccaatgaaatcaccaatgccaactcccgtcagcagatccggaagctgatcaaagatgggctgatcatccgcaagccttgtgacggtccattcccggcttcgttgccggaaaaacacctttggcccggcgnaaagggcaggcacatgggcataggtaagcggaaggtaccagccaatgccccgaatgcccagagaaggtcacattggatgagggagaatgagggattttgccgccggcttgcttcagaagatacccgtgaatcctaagaagatcgatcgcccacatgtagtcacagccttgtacctggtaggtgaaggggaatgtgttcaaaaacaagcggattcttcatggaacacatccacaagctgaaggcagaacaaggcccgcaagaagctccctggctgacctaggctgaggcccgcaggtctaagaccaaggaagctaccaagcgccgtgaagagcgcctccctccaggccaagaaagagggagatcatctagactttatccaaggaggaagagaccaagaaataaaaccttcccattttgtctgtacattactgccctctgttgattacataggttcagccctaaaataaaacaagccttaatctgcaaaaaaaaaaaaaaaagtcggcgcggccgcaaatttgtaggggtagttgcgcccgggatttggtgcgggggttgcggggtgggagaaggttgtccccagggggga

SEQ ID NO: 122812 - DNA, 266 bp, Homo sapiens
gcagatcggcaggtcaagaaataatagacacacacaagataatgaaagctgggtccaggggggtcatcgccttctggtactgtgatgccgccaatgcactggatataccagcatttattattaagtttataacagttgcagcaaaagctggttacaaacaatccatagaaacaggacgtgaagctagacaacctgttagaccagaaattctcagaaaggagtatgccttaaccctaaagaggcctagaagagccgtggcaagatga

SEQ ID NO: 122813 - DNA, 447 bp, Homo sapiens
gtagcctgcgacggaactcccgggtctaccgacgcgtccggggatgctttgtatctggagaggcgctcctgattggcctgaggggccccccagctccggggagttgtcctccattcagcccactcaagggttgcacaactgcttccagccggacggagctcggccggctgcgccggggcctgtcccaggtcagctcggtgcccttccttggagctgccggccaccagcagagcctaccctcttcatggaaagcctcgtgcagtggccccctggtgatggcatccgacagtgatgtgaagatgctgctgaacttcgtgaacctggcgtccagcgacatcaaggcagccctggataagtccgcaccctgccgccgctccgtggaccatcgcaagtacctgcagaagcagctcaagcgcttctcccagaagtattcccggctcccgcggg

SEQ ID NO: 122814 - DNA, 1245 bp, Homo sapiens
atgccgaacatatacaccatggaatactatgcagccgtaaaaaaggatgagttcatgtcctttgtagggacatggatgaagctggaaaccatcattctcagcaaactatcacaaggacagaaaaccaaacaccgcatgttctcactcatagggacacggatgaagctggaaaccatcattctcagcaaactattgcaaggacaaaaaaaccaaacaccgtatattctcactcatagaatcagttttgaggatgtgaggaattacatgccactggcagtaattcactcagatgagagtccaattcttcctctccatgaacagcaagatgccagtgagaatggatggattaaggatacagagagggatgcggatttggagatatatattgtgtctggaattggttcctttcggtgggttcttggtctcgctgacttcaagagtgaagccgcagacccttgcggaatgaagctgcagaccttcgcagtgagtgttacagctcttaaaggtggcgcatccagagttgttcattcctcctggtgggtttgtgttctcactgacttcaggagtgaagctgcatacctgagcgttacagctcttgaaggtggcgcatccagagttgctcattcctcccggttcgtggtctcactgacttcaggagtgaagctgcagaccttcaccgtgaatgctacagctcataaaggtagtgcggacccaaagagtgagcagcatcaagatttattgcaaagagcgaaaaaacacaccttccacagcatgaaaggggaaccaaggcgtgttgttgctgctggctgggggggtgcaatcaaggctgattccaataaccttattctcttatttcagactattgaaaaatattgtccttggttccctgacaaaggttctgtggacctgttagactgggatagagttggcaccactctctgccaactcatgagagatggtgttttacttcctatttctgtttggactgactgggctcttattcgtgttgctttacttccttttcagtctggtgatactcttcaactgccacaagttaacgcggatgttgaaccactccctttacctcggtgcattggcggcatcacgggaccagaaggcggtgacccccctggacccagctttcactatcttgtgggtgtctattatttcttgacctgccgatccacctgggaacaaagaaagagccccgttgcattgcgggctgctggccagatcccgcaataa

SEQ ID NO: 122815 - DNA, 570 bp, Homo sapiens
tttttttttttttttttgctcttgccaggatttccagcactatgttgaataaaggtggtaaaggtgagcatttctatcttgtttcagatcttagagaacataccttattgcgggatctggccagtagcctgcaatgcaacggggctctctctttgttcccaggcggatcggcaggttgagaaataatagacacacacaagatagtgaaagctgggtccggggcgggtcactgccttctggtcctggggtgccaacaatgcactgaatataccagcatttattattaagtttagtgagggcaggggtaggttagtgagggatttatggtcatttgattatgaggtgagatggtcacgtggggatgaagtaatgctttaacataacatttgtatgcagaagtacagtatacagggataagaatttacaatatagtgtgtgcatcagtaatttctaacagagccttaaaacagaaacacattctttccataacctatgattagcaagatattaatcagcagtaacagttgcagcaaaagctggttgcaaacaatccatagaaacaggacgtga

SEQ ID NO: 122816 - DNA, 3673 bp, Homo sapiens
ctagaggtagccaaagacattgaagatgggtgggggcacggctggcttggtggggatgggtttcagcaccacgggcctgcacaccttctgccccaggccgtccacatccttgcagaggtgcgccagctccccgggaaaggctgggctcttcctccaaaggcccaggctggggacaggactctgaggcagtgcccccagggggcccggatagatgggctgtccatggtactggaaggggcagcaactccaggcattgacgcggcccaccaaggagaccccaggcatcttgagcggctccttttcagccagggcccttggagacatggacaccagggtagtctcaggtcccaggggctccaagcccttgcaatttttcttaccctcatagggaggtccctccctggggcccagtcccccctccagccccacatggtagctgtgggtgggccttggctcttcccagaaggaagcgggcagctgtcttttcctcatgggcacctggccaggctgggcagcttctggatgctgcctctgtgggagctgctccttagcaagacattcctccctgtaggggttcctcagcaccttctccttgcagcccccaccccccgccggggctggaatcagggcccaaatccaggagcagcctcctgggccggtcctcagacccccttttcaggtagggctcagcagctctgccaggaaggccccgcgggagccgggaatacttctgggagaagcgcttgagctgcttctgcaggtacttgcgatggtccacggagcggcggcagggtgcggacttatccagggctgccttgatgtcgctggacgccaggttcacgaagttcagcagcatcttcacatcactgtcggatgccatcaccagggggccactgcacgaggctttccatgaagagggtaggctctgctggtggccggcagctccaaggaagggcaccgagctgaccagctcggggaacataacaaaggccacgcggaggacagagtggcctggcagcgcctcttgagtcaaggcactgagacggagagtgttaggcattttggagagcggagacagtgagaagctcagtgcagcggcgaagagagttcgcgacagggctatcgggtccttcttcgtaaccccgctggagtacctgctcagtgccgggtcatctcctggaggtggggatgtggcaggaccccaggaaggccccagatcattccactgcctcccctcctgcctgtgagtgcgtccatcacatcctgaaggtgatgccgcctccttgaggggctcttcacaagtgaaggatgcacgaagaaggtcgtccagggccatgtggagggtggggtttggttgaagctgggaaccagtgcagggttgccgcaggaatctggcgagatggggcagagcatggaactgcctgcagttcccagagtagccaccaggtggcccaggccttgccgactctggcttcataatccaaacagcccggctcaacttccagggctgggcctctgtctctttctccataaagcggccaggacgagccattctgaggccttgtccaacttctgagttcttattgccagaatcatttgtctctggaaattgcagcagcaccgagagggccatgtggcctttctgggctcctcccagatcagccccaggagctgagaattttccttgtgcttctgtgccttgtaagctgtaaacacgctgcaccacgaggtcccgctgtccatcatcgggtgtgtgagttgatatctgccttcttgagtccaggaggttgaggctgccatgagccatgttcacgatgccactgcactccagcttgggtgacacagcaagaccctggcatgggcttaggtctggtttataatttgttatcttattgccacaacgagtccattctgtcagtcttttggtctctgtgttaacattcatgctggtcagttgttgtgtcaccaccagcagcagcaaaaactcagcacttcgacatgtgctgacagcaagattcagagggaaacagataccaggggtactcatgaggccattatctcccatgttcccggtaaacacgggacattccttcggcaccggcatgacattctgcttggccaactctgaccataactcacagctgagctgtgctctgctctgcatgtcaccccatgagccactcacactcagcatcctacccagcggacgcttggcataaccatctgcagccctgggtccatggacaacttcatggagcagaaccacctgcccatcctggattgtcactttacagaaggctggaggtttattctccaaagaggatgaaatagaaggttgtaggactggggacaccagggagaacacgaggacaaattcggtaaaatttgcatagtgaaggtagagatccctggattttatgcctgcctggctccgagcatcctggccactagcattaaccttttccaggtaagggatagggaatctgagaagagtggaaacatcatctttagatgccagcacacctcgactctgcaccagctctgccacgtagcagctgtgtgtccttgaataacgcagaagctctctgagcctcagtctttccttctgtaaaatggtcagagaacactggaatctgggtggacttgccatggctttaatcccatccagtagggcagaagtgacatcatgtaattttggaggctggctcagagaaggccatgcatctttcactgtttgctctgggacccctgagccatcattatttgccaaaataccctgaagcccgaagtcacagtgctggtgaggccatgtggtgataccacatggaggccctgagaccattttcactctctgcgccccctctcttatccgcatcccgtctgccttgtagggaacgtgcagaaggctgtggcgtgtgcttagtgcgttcttcacctcagtggcataggaatggtattcaagaaggaaatcgcatataaggaggattcgattgtagagggcaggaggcccaggcgggaggttgcggccgtggtccaggcgaaggatgaggaccagagtgatgctggcggagaggggacagcagtcatcccaggcacacactgcatgctggaggggaggtccatggctcctcctatccctgccctcactaaacttaataataaatgctggcatatacagtgcattggcggcattgcaggaccagaaggcggtgacccccctggacccagctttcactatcttgtgtgtgtctattatttctcgacctgccaatccgcctggagggtcttcggatgttgtaattgcttgttcacggctatctctgagcagagaatctcccacaaatcccagacgaccagatgtatttgtcagctcaggctgagttctggaggctgagcgttctagatcaaggttcagcagggccagtttctggtaaggattctcctgctggcttgtggacagccgctttgtcctcacatggcttttcctctgggtacccagagagagggagagagctctggtctctcttcctcttcttagagggacaacaatcctttcagaggattcaaggagattggggtccagattttcaggtttgtttacccgaaagtttccattccaggtcaccagctccaatcctttctttattagagctctgacttggacataagacat

SEQ ID NO: 122817 - DNA, 448 bp, Homo sapiens
cttacccatctcacggctcagaacgtgccgaatctgtttgcccgtaacgaacgcgtgatttgccttttcgataccgaatttggcccaatggcgcagattctggtcggagcgacgattgttggcagcattgagacggtctgggcgggcaccattacgccgccgcgcgaaggtatcatcaagcgctggacctggcctgccggggaaaacgacggttctgtggcactgctgaaaggccaggaaatgggtcgctttaaactcggttccaccgttatcaacctgtttgcaccgggtaaagtgaatctggttgagcaactggaaagcctgtctgtcacgaaaattggccagccgctggcagtatctatgtaatccaaggcgacacagttgggtaaccccagggtttttccagtctaaacgatgtacgggtacggacatggaatccgtaatgatg

SEQ ID NO: 122818 - DNA, 1569 bp, Homo sapiens
atgacgtttgttaacgcccaggccgaagacagccaaatctttttatataagcgccgctatgttccggtagaaggctatgcaccgtggctggtttctggcaatgccagcgaactggaacgcattcattatgaaggcatggacgatgttattctgctggattttctgcccaaagagttaggctttgatatgaacatgcatatcctctcttttgcaccaggtgccaaccacggttatatcgaacacacgttcaaggaacacggaggagcgactcaagccttcgcgaaagaaaataaccataaagcatacaaagatacgtacggcgtctctcatattacacgccatgatatgctgcagatccctaaacagcagcaatacgaaaaataccaagatacccacgatacgccatattgtgaaccgctgccgggcgaaacgcgcctgtggggcgacaccgatgtgattggtctgttcgacgctgaaaccgatatgaacgacgtggtggcgattctggaaaaccatccgctgctcggcgcaggcttcgcgcataaaatcgaacaactagaagataaagactgggagcgcgaatggatggataatttccacccgatgcgctttggtgaacgactgtggatctgccctagctggcgtgatgtgccggacgaaaacgccgtcaacgtgatgttagatccagggctggcgtttggtacgggtaccatccaaacactctctgtgcctgcaatgctcgacagctcgacgcatacccgacgaatgcgttctacgctgaatctctacgaaatcacgagaatgagcactgtgtccacatctgagcatagtatgacgtatactctcgttcaggtcgacatgaaagaggcgcaaaagccggacaccgccagctaccgcacctttaacgaattctttgtccgtccgctgcgtgacgaagtacgcccaatcgataccgatccgaatgtactggtcatgcctgccgatggcgttatcagccagttgggtaaaatcgaagaagataaaatcctgcaagccaaaggccacaactacagcctcgaagccctgctggcaggcaactatctgatggcggacctgttccgcaacggtacgtttgtgaccacttacctctccccgcgtgactaccaccgcgtacacatgccgtgcaacggtattctgcgtgagatgatctacgtgccgggcgatctcttctccgttaaccatctcacggctcagaacgtgccgaatctgtttgcccgtaacgaacgcgtgatttgcctttctgataccgaatttggcccaatggcgcagattctggtcggagcgacgaatggtggcagcattgagacgccagaaagtgagggagccacggttgatgagagctttgttgtaggtggaccagttggtgattttgaacttttgctttgccacggaacggtctgcgttgtcgggaagatgcgtgatctgatccttcaactcagcaaaagttcgatttattcaacaaagccgccgtcccgtcaagtcagcgtaatgctctgccagtgttacaaccaattaaccaattctgattag

SEQ ID NO: 122819 - DNA, 822 bp, Homo sapiens
tcaaaactttaaagaaatctttgtccgtccgctgcgtgacgaatacgcccaatcgataacgatccgaatgtactggtcatgcctgccgatggggttatcagccagttgggtaaaatcgaagaagataaaatcgtgtcgaatctgtttgcccgtgacgaacgcgtgatttgccttttcgataccgaattttggcccaatgcgcagatctggtcggagcgacgattgtttgcagcattgagacggtctgggcgggcaccatacgccgccgcgcgaaggtatcatcaagcgctgggacctggcgaggccattgaggaagacagttggcagaatttgggcagggtcgcagggtgaaataagcttccaactgaactgtgtaataattttgactgggcgcaaactctgtcgagcagaaatcgggggtgaaagtgaactgtagtgctcgcgtgtgatgtattgacgtgtcatgactgctagtggcatctgatatgacggagctatgatgtcgtcgatgagtagtggtcgtagtgctacgtatgcgttgcgttctctggcgatgtagttggtcatagattgttccacgcactcgatcagcacagtcactgcggctgagtgaacatcgaggtctatgtcgcagttgacctccagggaacgtctcagttcttgtggctcggtgcaagtttcagatgtccggactccaagtgcctgttccttcccggtgttcagccactgcgttgatcctccaccggggcctgccacgcgctgctctggcaaggcgttccactggggcaaatgcctacccgggagcactctcaggatccgcat

SEQ ID NO: 122820 - DNA, 1347 bp, Homo sapiens
atgcattttgctaaaaaagaagacgtcagtgagattgagacaggaagtgatggagagaaaccaaaggctcgagcaggttgtttaattggaaacagcgagaggctgttttcggtcacattttgtgtacagttccaggccacgctccctctctcatatacgatcatgaaacataaagacacgggaacaagttcagtgcctgagagcatcgacgcctcccttgaggccagccagcagaaccctgcttttctgaagaccctgaccaggagctgcagcccctcctggccctgtagccgcaactggccccatctcttgattccgcttacctgtccggcccaggctggagctaccccacagctgccagggctgggtcctccaggccacctgcccatgaaccagccagccagctccttcccacctagtgccaaacgcagcctctcagattctgacctccactttccacaagccgccccctggctcctccttggcgtgctgctgctgcccgggaccctgcgactggcaggaggacagtcagtgacccacaccggcctgcccatcatggcctccctggccaacacagctatctccttcagctgcaggatcacctatccatacactccccaattcaaggttttcacagtcagctactttcatgaagatctccagggacagaggagccctaagaagccaacaaactgccaccctggactgggcacagagaaccagagccacaccctggactgccaggtcacccttgtgctgccgggagcatcggccactggcacctactactgctctgtccactggccacactccacggtgagaggcagcggcaccttcatcctggtcagagacgcagggtaccgagagcccccgcagagtccacagaagctcctgctctttggcttcaccggcctcctgagtgtcctgagtgtagtgggcacggccctgctgctctggaacaaggtgcaggaatggcttgatgcaggtcttgtaggcatttgccatgtttccctggagaggaagcggatgcggggtccagggaaggaccccaccaggaagtgcccagatccaagatctgccagcagccccaagcagcatccttcagaatctgtctacacagcattttctgaaacaattttcctggagatgtgggtgcatctccaggaagtggaagagcctcctggcacccagcacacagctctgcagcgccgcgagaccgaggtctatgcctgcatcgagaatgaggatggcagctcacccaccgccaagcagagccccctctcccaggagagaccgcatagattcgaagatgatggcgaacttaacctggtctatgaaaatctctag

SEQ ID NO: 122821 - DNA, 1272 bp, Homo sapiens
atgaacaataagctggagacagggcaggggcggcgaggcggggaggcgtttatggcatacgccaccgcaggtgaagcatctggaacctgggcatccaggcaacaggctcgcaaggcccagattcaggggcagccacctgcgccaggctgggacctgacacagggtgagcaggctgggaaattcaccagcactgcggacagagcaggggataacagcagcatcagaaagacccataaggccataggtttgcagagggaatgcagtccctcagcaaggagcttcagtcggactaaaccagcagaaaaggcggtttccgagtaccatgctcgcacaacagggagccgccgaccaggcctggagatccctgtgacagtcacggcaggactggggctgcaggagtgcagagccaggtacaggcctgggaagccctcatctcaccgcgaggacagtcgcgtgcgacaggcctgtaaggtggcatccgagtccctcccgcaattaaggacgccgggctccaggccagcgccagggacagacccagcaccagggcggcccccggagccggcctctggcggcctcgggtcttttgccaaattccccaccggcgccaggataccgaggggccacccccaccacgcggctccaacagacacgtttcccacactggctgcggaggcccgccggacggggggccccgtgctgaccgcagccgcggagcccgcagcgcacatcccggagcacaggacaaaacctgtgcctgcaccggagcccccatccggctcccgcaacactgacccccctgggcagcctcgggcacggggcacctggaaagccagccccggacaccgcgcggattctgcctcccggagagcttccttcctgttccgatgtttggcgaacctgcagcgctccctgaagcagatgagagggaagctgcactcccagaaagcgcagttttggttcatattgaatggatttattgggggtgtcatcggcaggcggatgacagattgtcaggcctgtgaacctaggctaagaagcatccagtgtcaactacctgaatcttacaccagcctttgccacccagcagcactgacccaaagtggacccaagaatgtccttgaaagagaccaaccatctgcctgcagcctcaagacacctgctcagacctgcctgcctcagtgctccctacactggacattaagagacgatcagacgcagccactcacagccccgagcagtacaatgaatggagcctatcgcatgaaatgctga

SEQ ID NO: 122822 - DNA, 1911 bp, Homo sapiens
atgcctgtttcaactgccgttgcgacagtcattaaaactaaacaggttgaatttcaacttcaggttggtgttccactctattttcggcttcgggcaaatccgatcaaaactattctcgacaatcaaaagcgcctggacagtaaagggaatattaaacgctgtcgggttccgttaataaaagaagcagaacaaatcgcgtggttgcaacgtaaattgggcaatgcggcgcgcgttgaagatgtgcatcccatatcggaacggccacagtatttttctggtgatggtaaaagtggaaagatccaaacggtttgctttgaagttatcggttgccgagaagaaccagatgccgaggaatgccacggtgatagagaacagcgccgggtattcatacgggaagatggctttttcgtgaccaaggatctgtacccaaatcgtcgggccgaggatcatcagtactactgcggtaatcagccccagccagccacccatcatcgcgccacgcgtggcgcaatcatcagaaccgcgttctgcggcccatgctttggcgcgggcgatacgccaatcaacaacggtttgagtattcgccacaccacgcgtaacttcccgaaccgcgaaggctctaagccagctaatgggcagatgtcagcggtggcgttgatggacgctcgttctatcgctgcgactgcggcaaacggtggctatttaacctctgccagcgaacttgattgctgggacaacgtgccggagtacgccttcgatgtaacgccgtataaaaaccgtgtttatcagggctttgtgaaaggggcaactcagcaaccgctgatttacgggccgaacattaaagactggccggaattgggtgcgctgactgacaatatcgtcctgaaagtgtgctcgaagatcctcgacgaagtgaccaccaccgacgaactgattccttccggtgaaacctcttcttatcgttcaaatccgattggtctggcggagtttaccctgtctcgccgcgatcccggttatgttagcagaagtaaagcgactgctgagctggaaaatcagcgtctggcggggaatgtcagcgagctgacagaggtgtttgcgcgcattaagcagattgctggtcaggagcatattgatccgctgcatcgagtctacagacactgttcacgttctggcaattgtcccagtgatgtctttgatagcaaaaaggatccagtccaggatcaccgcccccaaaagcgagtgacattaatttggggttacgatattcacccacaaatcgaaattatccagacaggcgataatttcttccagtttcgcgccattgccaataattttggctttcttcgcttttaccagatccgccattttggcttgtccggtcagcacggcgtgcagatcttcacggctgatgtagaaagaggcgtcggcttgcggttgcagcgttttccggtagttaagcacgctatcgttcagcgtcaggttgaggttatcgccgttgctcatattgaagttcaggctgatatttttacccgcagctttcgcgctatcgaggcgaacggccataaagtcgaacagcatttcgaccgacatcccgcgaatggtgtccggggaaccggtggtgccgtggctgaacttatgcaccccttcgcgcagctctttcgcgccggtcaggtagaaaccgcgccatgtggcggactcggcctgatagcccagctgttcaaagttattcgcttgcagattcttcgcggagaatcgaagaaattcagcgccaatctgacggcactgaaattgccattacctatggtctacgaaggtgacaaggtgcttaagcatcttctgagaccgaaattcaatttgcctccattggtgcaaccaccgaagaagatgctgccaagacacttgagccgttaa

SEQ ID NO: 122823 - DNA, 1881 bp, Homo sapiens
atggtcttttggtcagacctgccggctatcgcgcttcagcaatggtggtcgtctttgtcacttcgctcctgtctggctgctcgcctggcgctacggcatcgacaccgggcggttgattattatcggtatcggcgttcgcgccatgctgcgtcttttagaaacggcgctaacagcaggtttgtggaatgccggatcgctcaacggcctgacgtgggcagaaacctcgccttccgcacccatcattatattgatgctcattgccgccgccttactgtcgcaccgcacattgcccgacgcattagcggcaccgctcgctgggggctaacccaggcggcgctatgcggggcgctgttactgctggcggccgatctctgcgcccaacaactgtttatgccgtatcaacttccggttggcgtcgttaccgtcagcctcggcggagtctcgcaaaaaatgaccgaatcagtagcccgtttgcgcggcgaacagttaaccctgggatatggcaaatataccgttgcggaaaatctgactgtagaaatacctgatggtcacttcacggcaattatcgggccaaatggctgcggtaaatccacgttactgcgtaccttaagccgcctgatgacgcctgctcatgggcatgtctggctggatggcgagcacattcaacattacgccagtaaagaggttgcacgccggattggtctgttggcgcaaaatgctaccacgccgggcgatatcaccgtgcaggagctgtgccggggtcaagccaacggcaaacgggtggcgacggacacaagttacccgcacacgggacaggccgcaaaagcagcgatgaccgttgctgcgctgtgtgaaaaacataacgtggaactggtagcgatcggtaacggtacagcttcccgcgaaactgagcgtttctatctcgatgtgcagaagcagttcccgaaagtgaccgcgcagaaagtaatcgtcagcgaagcaggcgcgtcggtttactcggcttccgagctggctgcacaggagttcccggatctcgacgtttcgctgcgtggcgcggtgtctatcgcccgccgtttgcaggatccgctggcggagctggtgaaaatcgatccgaaatctatcggcgtaggtcagtatcagcatgacgtcagccagacgcaactggcccgcaaactggacgcagtagtagaagactgcgtaaacgccgttggcgtcgatctcaacactgcttctgttccgctgttaacccgcgtggcgggcctgacgcgcatgatggcgcaaaacatcgttgcctggcgcgatgagaacggtcagttccagaaccgtcagcaactgttaaaagtgagccgtctggggccgaaagccttcgagcagtgcgcgggcttcttgcgcattaaccacggtgataacccgctggacgcgtctaccgttcacccggaagcctatccggtggtggaacgcattctggcagcaacacagcaggcactgaaagatctgatgggtaacagcagcgaactgcgtaacctgaaagcgtctgactttactgatgagaaattcggtgtgccgacggtaaccgacatcatcaaagagctggaaaaaccgggtcgcgatccgcgtccggaatttaaaaccgctcagtttgccgatggcgtcgagacaatgaacgacctgcaaccgggtatgatcctcgaaggcgcagtgaccaacgtcaccaactttggcgcgtttgtcgatattggcgtgcatcaggacggcctggttcacatctcttcattgtcgaacaagtttgtggaagatccgcataccgtggtgaaagcgggcgacattgtgaacgttgacagtgctggaagtggattcttccgcgtaaacgtattgccttga

SEQ ID NO: 122824 - DNA, 2853 bp, Homo sapiens
ctacgctgtgtgttgcttgctgatctcacgccacaaaatccggcgaatcaacatcattgtattggtgccagttatcatcgcggcagcgaagatacggcgtacagtgaggacgatcagcagcagaatcgccagcggttgattgattgtttcccgcaggcacagtgggcaaaagaggttgatgtcagtgataaagaggcgcgctgcggtgtgcgttgtgccacccgcgatcatagcatggaagatatcaataacaccatcgatgctgcacgtcgggtgtttgcgaagttgtgatccagcatggtttgtcggatgcggcgtgaacgccttatccgacctacgattcggggccgtttgtaggcccgataagacgcgccagcgtcgcatcgggcatccgttgtcgcgtaaacgctttatccgtccaggcgtacagtggccgttatatggaaaaattaacggctctgctttctcaacaaatagataaaatatggcgcgccgataaaggttgacagcagccccgccgggatcagtcagcgaacaccagcagtaaaccacccgacgtgcagcatcgatggtgttattgatatcttccatgctgtgcgccacggacataaagcccgcttcaaacgctgacggtgccaggtaaacaccttcgtccagcatcatatggaagaaacgcttaaagcgttccacgtcacaggccatcacatcctgatagcacgtcacggactcggcgtcggtaaagaaaataccgaacatgccgccaacgtggttaacgaccagcggaattccggcttcttctgccgcttccagcagaccttctgccagacgtgttgtcagctcatccagcgtttcgtgaacgcccggctgcgcgacttcattcagacaggcgaaacccgctgccatcgcaatcgggttaccggaaagcgtacccgcctgatagaccggacccgtcggggccagcgcatccattacatcacgacgaccaccgaatgcgcctaccggcattccaccgccgatgattttgccgaggcaggttaaatctggcactacgccgtaataatcctgtgcgccagctagcgctacgcggaaaccggtcatcacttcatcgatgatcagcaacgcgccaaattcgtcgacagcgcgcgcggtcacggttaaatccataggttcatccatccctttccttctcagctgtgtggcataggggaggttgcttaattcctctgaaagatgactcaagttgagcgtcgtcgcgtaccgctgggggttattggcgtgatttatgaagcgcgcccgaacgtgacggttgatgccgccagttccgaggcctgaaacgctgtcaccggcaatcgcgcgcagtgcgtcatcaatgccgtaaacatctttaatcagttctgccaggccgtcctgatgcacgccaatatcgacaaacgcgccaaagttggtgacgttggtcactgcgccttcgaggatcatacccggttgcaggtcgttcattgtctcgacgccatcggcaaactgagcggttttaaattccggacgcggatcgcgacccggtttttccagctctttgatgatgtcggttaccgtcggcacaccgaatttctcatcagtaaagtcagacgctttcaggttacgcagttcgctgctgttacccatcagatctttcagtgcctgctgtgttgctgccagaatgcgttccaccaccggataggcttccgggtgaacggtagacgcgtccagcgggttatcaccgtggttaatgcgcaagaagcccgcgcactgctcgaaggataactgcgagtgaagtcggaaatccggatgcacagattgcagatgcaacggatacttttgcgagccaggcccaccgtgggagcgttcgattttctcaaaccacatcggatgcccctgacaatcgtcgtagttcatatcggcgatagttttcgagtagatctcaatcaggccactcggcgtgcccagcggttcgagatccggatcttcgcggaatgcctggtggcgaacaaacatctgcggatggtcaaactcgacgtactctttgttattccagaagtcatcaaacgctggcagatgaacgccgcgtcctttgccttgctgtacaccttcctgccagatgcgtttcagccagcccatttcgtccagcccttcggtaaaggcttcttcgcgattaaagcgacggcacagctcgcggaaaatatcgaagtcgttgcgcgcctcgaactgcggcggcaccacctgtttcatggcgataatgccacggttggagtgattgccgtactggtcgagatcgttacgctcaaactgcgtggtcgcaggcagtacgatatcggcaaagcggcaggttgaggtccactggttatctatggcgataaccgtttccagcttgcgcaagccttcaataatgcggttgatcggtaaaactgccgccgcgttgtccactcgtctctggctgttctggggctggattttgtgctgaccgcattgatgtttgggaattgagttcatgcaaacgaaaaaaaatgaaatttgggtgggtatctttttattagcagcactgctggcggtccaacgtgagatgatgaactgagtcagccccgataccttcttgtcggtcgcgcacgaatttggtttatcgtcgagtatcgacatgtgggtcattgagcatacgcgtttgctattaatctgtctccaacctcggtatgtcaggctcgttttcctgttgaagtcagtcagttgctggctaaatatcagattgaagcgtggcaacttatttttgaagtcaccgaaagtaatgctctgaccaatgttaagcaggcgcaaatcaccttgcagcat

SEQ ID NO: 122825 - DNA, 1360 bp, Homo sapiens
atgaaaatcaatctcaagctcacgaacgatagcaaagttgctgatggtcagtttgccaacatagtcgttttccttataaactggttttatatacacgcgactacctgtgaaattgataacggcggcgtcattgttgcggatggtttccaggccagcaaagcgtacagcgcggacagcatcgtagattataacgatgcacattataaaacttctgtcgatcaagacgcatggggctttgtcccgggcggcgataacccgtggaagaaatacgaaccggcgaaagcatggtccgcatccactgtgtacgtgaaaggtgatcgcgttgttgttgatgggcaggcttatgaagcgctgttctggacgcaaagtgacaaccctgctctggtggcgaaccaaaacgccaccggtagcaatagccgcccgtggaagccgttaggtaaggctcagagctatagcaacgaagagctgaataatgcgccgcagtttaatccagaaacgctttatgccagcgatacgctgattcgctttaacggtgtgaactacatttctcagagtaaagtgcagaaagtttctccttctgacagcaacccgtggcgtgtttttgttgactggaccggaaccaaagagcgcgtaggtacgccgaagaaagcgtggccgaaacacgtttatgcaccgtatgtcgactttacgctgaataaccaccaccgacgaactgattccttccgaagtaaagcgactgctgagctggaaaatcagcgtctggcggggaatgtcagcgagctgacagaggtgtttgcgcgcattaagcagattgctggtcaggagcatattgatccgctgcaaactgaaattggcagcatggtctatgcggtgaaaccaggcgatggttctgcgcgtgaacaggcggcgagctgccagcgtgtgattggcggtctggcgaatattgccgaggagtacgcgactaaacgctatcgttctaacgtcatcaactgggggatgttaccgctgcaaatggcggaagtaccaacctttgaagtgggggattacatttacatccctgtgcattaaagcggcgctggataatccgggtacgacgtttaaaggttatgtgatccatgaagatgcgccggtaacggaaattacgctctatatggaaagtctgactgctgaagagcgcgagattatcaaggcgggtcgcattcggcacttattgtcggatgcgatgcttgcgcatcttatccgacctacgaatcgcatcgaatctgtaggccagataaggcattttcgcagcatccggcacttattgtcggatgcgatgcttgcgcatcttatccgacctacaaatcgcatcgaaccgtag

SEQ ID NO: 122826 - DNA, 1757 bp, Homo sapiens
tcccaggctttgcccgcctgatggcggcgcatcgtcatgaaatcgcggcggtgatcattgagccgattgtccagggcgcaggcgggatgcgcatgtaccatccggaatggttaaaacgaatccgcaaaatatgcgatcgcgaaggtatcttgctgattgccgacgagatcgccactggatttggtcgtaccgggaaactgtttgcctgtgaacatgcagaaatcgcgccggacattttgtgcctcggtaaagccttaaccggcggcacaatgaccctttccgccacactcaccacgcgcgaggttgcagaaaccatcagtaacggtgaagccggttgctttatgcatgggccaacttttatgggcaatccgctggcctgcgcggcagcaaacgccagcctggcgattctcgaatctggcgactggcagcaacaggtggcggatattgaagtacagctgcgcgagcaacttgcccccgcccgtgatgccgaaatggttgccgatgtgcgcgtactgggggccattggcgtggtcgaaaccactcatccgatgaatatggcggcgctgcaaaaattctttgtcgaacagggtgtctggatccggcctttgacaactgatttacctgatgccgccctatattattctcccgcaacagtccataactggctggcgctgcacggtcgcggccaggattactgccagcttaaccctcaaccgatggcgtactacgatggctgcatcagcgttgatttaagcgccatcaaaccaatgattgcgctgccgttccacccgagcaacgtgtatgaaatcgacacactgaaccagaacctgaccgacattctgcgtgagattgaaattgagtccgaacgcgtggcgcacggtaaagccaaactctcgctgctggataaagtggaaaatggtcgcctgaaagtgcagcaggggattatcgcgggctgttctggcggtaactacgaaaacgtcatcgcggcggcgaatgcactgcgcggtcaatcctgtggcaatgacaccttctcgctggcagtttacccgtcatcacagccggtgtttatggatctcgccaaaaaaggtgtggtagcagatttgattggcgcaggcgcaatcatcagaaccgcgttctgcggcccatgctttggcgccgggcgatacgccaatcaacaacggtttgagtattcgccacaccacgcgtaacttcccgaaccgcgaaggcttcttaagccagctaatggggcagatgttcagcggtggcgtttgatgggacgctcgttctatcgctgcgactgcggcaaacggtggctatttaacctctgccagcgaacttgattgctgggacaacgtgccggagtacgccttcgatgtaacgccgtataaaaaccgtgtttatcagggctttgtgaaaggggcaactcagcaaccgctgatttacgggccgaacattaaagactggccggaattgggtgcgctgactgacaatatcgtcctgaaagtgtgctcgaagatcctcgacgaagtgaccaccaccgacgaactgattccttccgagaaacctcttttatcgttcaatcgattgtctgccgagtttccctgtctcgcgcgatcctgcagagtaagcgactctaagaaccgggcgaatttccgccacctgatccatcgtctccagagcagagatggccggtttgttatccaccgaaataatcagatcgttgacctgaatacccgcattcgccgccgggccgtcag

SEQ ID NO: 122827 - DNA, 1944 bp, Homo sapiens
agtgatttacccggctgggctaatgtttaattaaggtttcagtggttaatgaaatgataaatattgccggaatatattatgagtttggctgtgaaataaaaatgccggagatattctccggcatttttatgtcaggcaaggcgttcgttgccagatgcggcgtgaaccccttatctgccctacgatttcgtgcaaattcgacccgtaggccagtacgggcgtttaacgttttttgcccatggcccccgccagagcatccatcatcgcgctattaccggcaggctgcgcttcacgaccgcgtggtttggctgccgggcggttgttctgcgggcgttcattaccgcccccgcgacgagcgttggtttcgccaggctgctcatccaggcgcatagtcagggcgatacgtttacgctgaagatccacgtccagcactttcaccttcacaatgtcgcccgctttcaccacggtatgcggatcttccacaaacttgttcgacaatgaagagatgtgaaccaggccgtcctgatgcacgccaatatcgacaaacgcgccaaagttggtgacgttggtcactgcgccttcgaggatcatacccgcttgcaggtcgttcattgtctcgacgccatcggcaaagctgagcggttttaaattccggacgcggatcgcgacccgtttttccagctttggttcaatgttctcgccacgacaatcatgtttagcgagaaagcttctcagaataagacgaggcacggtagattcaatctctggaagtgtcatagagtacgttgtccagaagtactcaagccgcatgcgccagtgagccgccttgataatctcgcgctcttcagcagtcagactttccatatagagcgtaatttccgttaccggcgcatcttcatggatcacataacctttaaacgtcgtaccctggattatccagtgcctctttaatgccagggatgtaaatgtaatcccccacttcaaaggttggtacttccgccatttgcagcgagaacatcccccagttgatgacgttagaacgatagcgtttagtcgsgstactcctcggcaatattcgccagaccgccaatcacacgctggcagctcgccgcctgttcacgcgcaggaaccatcgcctgggtttcaccgcataggaccatgcttgccaatttcagtttgcagcgggatcaatatgctcctggaccaggcaatctgcttaatgcgcgcaaacacctctgckcagctcgctgacattccccgccagacgctgattttccagctcagcagtcgctttacttctgctaacataaccgggatcgcggcgagacagggtaaactccgccagaccaatcggatttgaacgataagaagaggtttcaccggaaggaattcagttcgtcgggkgggkggtcacttcgtcgaggatcttcgagcacactttcaggacgatattcaaggtcagcgcacccaattccggccagtctttaatgttcggcccgtaaatcagcggttgctgagttgcccctttcacaaagccctgataaacacggtttttatacggcgttacatcgaaggcgtactccggcacgttgtcccagcaatcaagttcgctggcagaggttaaatagccaccgtttgccgcagtcgcagcgatagaacgagcgtccatcaacgccaccgctgacatctgcccattagctggcttagagccttcgcgggttcgggaagttacgcgtggtgtggcgaatactcaaaccgttgttgattggcgtatcgcccgcgccaaagcatgggccgcagaacgcggttctgatgattgcgcctgcgcaaatcaaatctgctaccacacctttttttggcgagatccataaacaccggctgtgatgacgggtaaactgccagcgagaaggtgtcattgccacaggattgaccgctgcagtgcat

SEQ ID NO: 122828 - DNA, 1195 bp, Homo sapiens
atgagcgaggtggaggcggcagcgggggctacagcggtccccgcggcgacggtgcccgcgacggcggcaggggtggtagcggtggtggtaccggtgcccgcaggggagccgcagaaaggcggcggggcgggcggcgggggcggagccgcctcgggccccgctgctgggaccccctcggcgccgggctcccgcacccctggcaatccggcgacggcggtctcgggaacccccgcccccccggcccggagtcaggcggacaagccggtgctggctacccgagtcctgcctgggcactgccaaacggttcaacgtccggagtggttacggattcaccaacaggaatgacgccaaggaagatgtcttcgttcactggacagctgttaaaagaaacaaccccaggaagtttctgcgcagcgttagagatggggagactgtggaatttgatgtcgtggaaggagagaagggcgcacaagccactaatgtaactgggcccagggcggcgggggtgcccatgaagggcagccgttatgcccccaaccgacgtaggttccgctgattcatcccccggcctccctcagttgccccaccacccatggtggcagagatcccctcggcggggacaggacctggcagtaaaggggagcgggctgaagactctgggcaacggccccgacgatggtgccccccacccttcttctaccgacggcggtttgtgcgaggcccccggcctcccaaccagcagcagcctatagagctcaccggggcctttgcatgttcccagggcactgacagggtagaacccaaagagacagccccattggaggggcaccaacagcagggagatgagcgagtccccccgcccagattccggcccaggtaccgaaggcctttccgccccaggccacgccagcagcctaccacagaaggtggggatggtgagaccaagcccagccaaggtcccgctgatggttcccggcctgagccccagcgcccacgaaaccgcccctacttccagcggagacggcagcaggcccctggcccccagcaggcccctggcccccggcagcccgcagcccctgaggaagcccccacagaggcaatcaagcccatgattgcccatgatggccatgccccccccaacccatcccccacttgctgcctggagccatcctaccagcttgtagatgtgaactga

SEQ ID NO: 122829 - DNA, 933 bp, Homo sapiens
tcagacatcaggagtccctgtgtgcgcccttagaaatcctacaaaagaagggatgcccttgtctggaagaacctttgcaaagacaaccttgtccttgtcaatcttctgaggtgacagcatagtgaaacatctctttccgatttgcatctccaggaggtaacgtccatgggcctcacactgagctccttccgtgcgcggggcagccccggcaggcccagtcgggctggaagccgccgctggctcagagccgcatcccggcccgcggacgcagggggcgcgcggccggtccccggaggcgctgggtccaggccgaggatggttttgctccccgctccgctccgcatttaggaggtgggaggagcgcgcggcgatgcgcacaggaaatccctgcacacacacacaagttgtgacaacgtctccaaacttgccaaatatcccatagggagcaaagtcacacccaattgggaacggccgctctcgtagaaaggaacgggacccagtgctccacaaatagctacagaaaacatttatccatgacagctccacggaaaagggccgcttatcagagattagaagattgtgccccatgatggagctgccggtcaaagtcccctgctgccagtccgttcctgtcagagaggctatcttcctagtgctaaatgattttttgatgcactgaaaattaaattcacactcaaatttctgcatttgaggagattttcctgtacgctgagcttgcgggggctccttgtgtctcccctcctcctgcctgttagacttctccttgctggctgggcccacgcgtggatgcacgggtgcggaggatgggaacccaggatcactcagcaacgtgcttcttgtcagcttcctgaccgcactaaatccaaaatgagggtaaaaatccctgctgcaaattcctcctggctttgccat

SEQ ID NO: 122830 - DNA, 1745 bp, Homo sapiens
tcaggggatctgagcaaattccaccgtcgtcaattcctggtgctccgtgaaagatgctctttccctcggggcttcggagccggagcatttgtagacagttcctgcctcttcactcggctgccggcctgggggtcccgtcgcctcccggagccgcccgccgcgtcccccagcccgcgccgccctgcgcggcccgccggcctcctcacctatcagatttcctgtgcgcatcgccgcgcgctcctcccacctcctaaatgcggagcggagcggggagcaaaaccatcctcggcctggacccagcgcctccggggaccggccgcgcgccccctgcgtccgcgggccgggatgcggctctgagccagcggcggcttccagcccgactgggcctgccggggctgccccgcgcacggtaaggcccggggcatggccaaacttctccacacggatggtaaccttcatccatgcagcagaggacacgaaggtgtagccctccctcctctgtccctggacagtttcctctgctgccccttcctgctcccaggtaagtccttggacttggtgagggctcccgtattccttgttaattccagtttcttctcttttgccttggcctgaggatagggttccatcaagctttgtggctgacctcttccgagttttgacaacacttctttgcccgtggaaggagggagttaactgaccctgtgtgtttgctctatgtctatcaggaaaacagctcaaagcacattccctattcatgtcggggcagtagaatcttcccattttcccagagacaacgcgtaatggcaggccagaggaagctctgtgatcaccctggagggctcattagcaagcctctggcgtggacaaggatacctgaagctcctgtagttgctgccatggtagagggtgggggtgggctttaaaacggtgttattcccatttgatagatgaggaaagcggaggtcttcccgcagctcctcgaggctggtgtgcagggggagtatgagttttgcctgctcccctctgtggcttattttgtagtaaaatcttgcgttcttgtggaagtgattgacactgatagttctcacggagcttcctgtggccacagcagcagcagcatctgtgagcttgaaaggggatgatgagtgagacttttgtccacagttcttggttgagctgccacaagcagatgggaaaggctgcgtgcagatgccagcgcctggctcgttggtgaccagcaagggtcccagctgagccggggtgctctcctgtggctctggtggaacgtccacaggataccgactgtgttgaaaggacccatgatgtaaggatgtttgttgtggggggtgcttgtggctccttaactggctctggaaagagcctacttcccatagtgaaccctgtgaggtccaattctgttcctccccctggagctccaagagaaggtcattgtccttgtagcagcaggtgcccccccaagctgggttctcacccatcccagtttccagtggagaagcatcgttctcgtccacccccgtcatgctcttttccaccttctccaggggaagggatattttcagtctgtacaacgaatccacagcttcctctccaccgagggccacagcccctggagaccccttgagctgagtgctttgtccttgcatactctttctggcctcatagtggggcttggccattgtcccttcactccagatctctcctttcaggtccaggaagtgcat

SEQ ID NO: 122831 - DNA, 503 bp, Homo sapiens
  misc_feature (1)...(503): n = a,t,c or g
gatggggggnnnnnnnttttggaccctagtcattgaggtgcaattcgacacgtgtgagagtaccgtacaggtgagcaagttgcaagacctcatccaccgcatcaagatggcccggtgcagaggacggtttgtctgcccagtaatcctgttcaagggcaagaagtggtgacacgcatctttttgataaggtcagaggctatgacatcaagctgcttcgatacctgtcagtcaaatacatctgtgacctgatggtggagaacaagaaggtgaagtttggcatgaatgtaacctcctctgagaaggtggacaaagcccagcgctatgccgacttcactctcctctccatcccgtatccaggctgtgaatttttcaaggaatataaagatcgggattacatggcagaagggctcatatttaactggaagcaggactacgttgatgccccattgagcatccccgacttcctgactcactctctgaacattgactggagccagtatcag

SEQ ID NO: 122832 - DNA, 428 bp, Homo sapiens; identical to SEQ ID NO: 119281
  misc_feature (1)...(428): n = a,t,c or g

SEQ ID NO: 122833 - DNA, 1178 bp, Homo sapiens
atggggaagaaggttgggggtgcagatgatgcctgggcagatgtggaggacgtcacggaggaggactgtgctcttcgaagtggtgacacgcatctttttgataaggtcagaggctatgacatcaagctgcttcgatacctgtcagtcaaatacatctgtgacctgatggtggagaacaagaaggtgaagtttggcatgaatgtaacctcctctgagaaggtggacaaagcccagcgctatgccgacttcactctcctctccatcccgtatccagatgatgatgatggtggtgatgatgttgatgatggtgatgatgatgatgatgataatgatgctggagactacgttgatgccccattgagcatccccgacttcctgactcactctctgaacattgactggagccagtatcagtgttgggatctggtgcaacaaacacaaaactacctgaagctgctgctttccttagttaacagtgatgggcagacggactctaaatccctggtagcaatcaggacttctgtaggaggtgcacttgctcaaacaagtggaaatgcattggcttatggaaccaagaaggcccaagaacagagccaggatgggctcatccacacgtccctgaagcccactgagatcctctacctcactgtggcctatgactggttcctcttcgggaggaagagtttgccagcccgggatggaggcttcaccctggaagacatctgcatgctgagacgaaaggaccgtggcagcaccaccagccttggcagcgacttctccctggtcatggagagttccccaggagccactgggagcttcacctatgaggccgtggagctggtcccagcaggagcgccaactcaggcagcttggaggaagagccactcatcctctccacagagtgtcctctggaaccggccacaaccctcagaggaccgcttgccttcccagcaggggctggcggaagccaggtcttccagctcctcttcctcaaaccattctgataactttttcaggatgggtagcagtcccctggaggtccccaaacccaggtgaggagctccaaagcccttgctgttggaagtgcctagctttcccccttaataagactggagggtcgggggccagcacctgagctagggtctcaagatggggttcctaagcttgcaggcccagta

SEQ ID NO: 122834 - DNA, 2630 bp, Homo sapiens
ggtgcaggcaggtgcgatgggccagcttgaggcacactgaggggacgcggggctgggcagtggcgtgcgctcgggccgccgccgccgctgcctcggcggggtcctcggcctcttcaggcaaccagccgcctcaggagctggggcttggggagctgctggaggagttctcccggactcagtaccgggccaaggatggcagcgggaccggcggctctaaggttgagcgcattgagaagagatgtctggagctgtttggccgagactactgtttcagcgtgattccaaacacgaatggggatatctgtggccactatccccggcacatcgtgttcctggagtatgagagcctctgagaaggagaaagacacgtttgagagtaccgtacaggtgagcaagttgcaagacctcatccaccgcagcaagatggcccggtgcagaggacggtttgtctgcccagtaatcctgttcaagggcaagcacatttgcaggtcggccacactggctggatggggagagctgtatggacgctcaggctacaacctattttttctcagggggtgcagatgatgcctgggcagatgtggaggacgtcacggaggaggactgtgctcttcgaagtggtgacacgcatctttttgataaggtcagaggctatgacatcaagctgcttcgatacctgtcagtcaaatacatctgtgacctgatggtggagaacaagaaggtgaagtttggcatgaatgtaacctcctctgagaaggtggacaaagcccagcgctatgccgacttcactctcctctccatcccgtatccaggctgtgaatttttcaaggaatataaagatcgggattacatggcagaggggctcatatttaactggaagcaggactacgttgatgccccattgagcatccccgacttcctgactcactctctgaacattgactggagccagtatcagtgttgggatctggtgcaacaaacacaaaactacctgaagctgctgctttccttagttaacagtgatgggcagacggactctaaatccctggtagcaatcaggacttctgtaggagttgcacttgctcaaacaagtggaaatgcattggcttatggaaccaagaaggcccaagaacagagccaggatgggctcatccacacgtccctgaagcccactgagatcctctacctcactgtggcctatgactggttcctcttcgggcacatgttggtagatcggctcagcaaaggggaggagattttcttcttctgcttcaattttttgaagcatattacctccgaggagttctctgctctgaagacccagaggaggaagagtttgccagcccgggatggaggcttcaccctggaagacatctgcatgctgagacgaaaggaccgtggcagtaccaccagacttggtatgcgactgtctccctggtcatggagagttccccaggagccactgggagcttcacctatgaggccgtggagctggtcccagcaggagcgccaactcaggcagcttggaggaagagccactcatcctctccacagagtgtcctctggaaccggccacaaccctcagaggaccgcttgccttcccagcaggggcctggccggaagccaggtcttccagctcctcttcctcaaaccattctgataactttttcaggatgggtagcagtcccctggaggtccccaaacccaggctttgtggggcctcacagccccttagctcaggctggaagaagggagtcccctacatcgggggccctactgtggagcagctcccagacgcccccagctctgccccaggccccgccctcgcgggttccttgactcagggccgcttctcgcgtgcgtccccagctcccgcccggcagcccggcgctccgtcccgggccggcggcccccgccagccgccgccgccgccggccccgcctccgggcaccatgctgccctcgcaggaggcctccaagctctaccacgagcactacatgcggaactcgcgggccatcggcgtgctgtgggccatcttcaccatctgcttcgccatcatcaacgtggtggtcttcatccagccctactgggtgggcgacagcgtgagcacccccaagcctggctacttcggcctcttccactactgcgtgggcagcgggctggcgggccgcgagctcacctgccggggctccttcaccgacttcagcaccatcccgtccagcgccttcaaggcggccgccttcttcgtgctgctctccatggtgctgatcctcggctgcatcacctgcttttcgcttttcttcttctgcaacacggctacggtctacaagatctgcgcctggatgcagctcttggcagggcttctgttggggccggggggcgggggcgctggggcgctgggcggtggaatgaaggtcacgtgcccgacgggcgccagctggctagatgcctggcaaggaggcggcggcgtgctccactgcccgcccgacctgcctgcccttcgccgcccgagagtgcgcggcgcgctcaacgtcaccttcgactcggtggcgccacggcgggcccggggcaaagcgccgggctgcggcagaagggcggcagcggcggcggccgcgatggatctaggctag

SEQ ID NO: 122835 - DNA, 1602 bp, Homo sapiens
tcactcctttttctttccaaacagggaaaagtgttccacgaagcggtagcgcctttccgcctcgcgttttcctccctgaccctggtcccggctcccgtccgggcgccagctggtggggcgagcgccgggagcccatctgcccccaggggcacggggcgcggggccggctcccgcccggcacatggctgcagccacctcgcgcgcaccccgaggcgccgtgcccagcttgcccgaggtccgtcggaggcgcccggccgccccggagccaagcagcaacttgagcggggaagcgcccgcgtccggggatcgggatgtccctcctccttctcctcttgctaggtgagtgcctctgggagggcgggagtttggatggccgtgggcaaacgcagccctgcgtccgggaaagacgccggttctgaccgggtgtccctgcagcccctggagtcagccggcttttcagtccctgcctcctggccacggaggagcacatctggcaaccgagggccgcccagtcggccatcgagattgtctcgcacatctgggcccttgaacaggcttggggaaccgtttgatgtgcagggtcctctttagggcggtgtttagtttctggtgtatcctctgccacacctggctggctcttcgatctcaccatcctcttcatggaatgtaagatgtcagcgtgacctgttgaaacttctgccagcacggggaaggagcctggtttcgcagaaagtgagtttgaagaaggcatgaatgcatagtccattggtagggcaactcccttgcctggtactgtgagtggagatagtgccgtacaagacccgagagcctggtcggggagcagattgacaaaggagagaaattgtttactgcctgtctctgcaatagccaagacttcgtctatatcatttacttcatttacttctgggtccttggtgcttaggacagtgcctgacacagagatgctcatgtactcactgaaggtgacacagcatttatagtcaatctctctgaagagggtgtagccctggggcttggcgaaagagataaggctggagaagaggcacctggatgtagggatgcccacagtaactactagaaacctcgctacatccaacactaccagtgccccagaacttgggctcgactgctcccccttcaggccagcagattcgagggctgcaatcagaactgtgctataggcaaattcatctgacagacttgtgaagaatgctctccctccattcatttcttcaacaactgtttcctgagtgcctactctgtacccagcactgcacaagatgctgaagatgcagtcaaggacatggtcctgaccctgcaggcactgacatttcatggagcacacgctgacaaagtctgtgacgtgcaagtaaaaggagtgtcctcttacttcagtttctggtgacccagaactagaccttgggcagtagttctcaaccggccgtgtgccctggcatgggactgaatcagcctgcaggaagttaggaatcatatccttctgcaatttgctgccatactctttgaagataattccttttttcctgctaagatcaggatggtacagcttttgtaaaaattgcc

SEQ ID NO: 122836 - DNA, 198 bp, Homo sapiens
atggcgggcgcccctcccccagcctcgctgccgccttgcagtttgatctcagactgctgtgccagcagtcagcgagactccgtgggctcgtcggaaaagcgcggtattcgggtgggagtgacccgattttccaggtgccctccgtcacccctttctttgactcggaaagggaactccctgaccccttgcgcttcccca

SEQ ID NO: 122837 - DNA, 275 bp, Homo sapiens
atggcgggcgcccctgccccagcctcgctgccgccttgcagtttgatctcagactgctgtgctagcaatcagcgagactccatgggcgtaggaccctctgagccaggtgcgggttataatctcgtgcccgtcggaaaagcgcagtattcgggtgggagtgaccggattttccaggtgctgtccgtcacccctttctttgactcggaaagggaactccctgaccccttgggcttctcaagtgaggcaatgcctcgccctgcttcagctcgcgcacg

SEQ ID NO: 122838 - DNA, 508 bp, Homo sapiens
cggattgtcaaattctgctgccactgcagtggggttagcggggttggacacatcactgtcatgcctcagtaactctttatccagctgcatggtgaccatctcagacattgtcttttctatttcagcagagagaccaggtccttcggacacatccttcatcatcactggcctgttctccgctaagtccagcagcaatttgcaaactaggtggataatttttggcacgtgtttcagaagtcgtgcctcataaccatgaagcagatgacgctggcgaattagatattgaggtaaggtgacagcatgtgctttgggatcacagcaagagaatatattgcggagaggagttagaaactgagtaaattcccttacacagaggagctgtcctctggtttgtatggaattgggtcgctttgcccgcacaaatataattgcttggtcagcagtcattctcgttgcaaaaactaagtaacaggctattaaaacacccggacgcgtgggtcgacccggg

SEQ ID NO: 122839 - DNA, 326 bp, Homo sapiens
ttttcagaggggaactcctacttggtggggatcatgcatcccctgaaggctatgctaccaggtctccagtaccagacagagacatttccaccaccgggatatttgatgcatgccggcttcaacagcagagccatttgttaaccttgagagactgctgtgctagcaatcagcgagactctgtgggcgtaggaccctccgagccaggtgcgggatataatcttgtggtgcgccgttttttaagcctgttggaaaagcgcagtatttgggtgagagtgacccgattttccagtgcattaaaccatgaacttaaagtgaatgaccactga

SEQ ID NO: 122840 - DNA, 627 bp, Homo sapiens
atgagtttcatagagagaaactggggcttacagaattcagtgtcttagtccagtgtccaccctggaagtggagaggctgggaggggtcccagttctgcactctggagcctgagtctttcactcttgtgggcagcgcaagaatcatgcagtgtcaaaaggtgcacctcccctctccctctcccctgtctctgtcccctgtcctgtcctgtcccctttcctccttccctttttagaaagagccttaattccccgagatggagccttgggaaagaatatgtggcgagagggaccctttcatccctatgcagcttgatgtggtcttgggtggagcaactgaaggagcctgtaatcacccaaagaggatgtggacatgttggttgacaggcgagcagatgccgcagaagcactttttttattagagaagggacagcaccagactattctctgcgtgttgcactgcatagtgaacctgcagacaattcccgtggatgtggaggaagctttccttgcccatgccattaaggcattcactaaggttaattttgattctgaaaatggaccaacactctccaacgccctgaagaaaatatttaagcacacgctggaagaaaaaaaaaaaaaaaaaat

SEQ ID NO: 122841 - DNA, 1993 bp, Homo sapiens
tttgatctcagattgctgtgctagcaatcagcgagactccatgggcgtaggaccctccgagccaggtgcgggatataatctcgtgatgcgccattttttaagccggtccgaaaagcgcaatattcgggtgggagtgacccgattttccagggattttgccgatttcggaaccaccatcaaacaggattttcgcctgctggggcaaaccagcgtggaccgcttgctgcaactctctcagggccaggcggtgaagggcaatcagctgttgcccgtctcactggtgaaaagaaaaaccaccctggcgcccaatacgcaaaccgcctctccccgcgcgttggccgattcattaatgcagctggcacgacaggtttcccgactggaaagcgggcaggattttgccgatttcggaaccaccatcaaacaggattttcgcctgctggggcaaaccagcgtggaccgcttgctgcaactctctcagggccaggcggtgaagggcaatcagctgttgcccgtctcactggtgaaaagaaaaaccaccctggcgcccaatacgcaaaccgcctctccccgcgcgttggccgattcattaatgcagctggcacgacaggtttcccgactggaaagcgggcaatatgcattaactgcacatgctgccaacactggcaaaagcaaatgcgtcagcaaaagcgaagactgcgagtatgtgggagcccaaaatgtgttggaagttctggccagggcaattaggcaggagaaggaaataaagggtattcagttaggaaaagaggaagtcaaattgtccctgtttgcagacgacatgattgtatatctagaaaaccccattgtctcagcccaaaatctccttaagctgataagcaacttcagcaaagtctcaggatacaaaatcaatgcacaaaaatcacaagcattcttatacaccaacaacagacaaacagagaaccacatcatgagtgaactcccattcacaattgcttcaaagagaataaaatacctaggaatccaacttacaagagatgtgaaggacctcttcaaggagaactacaaaccactgctcaaggaaatgaaagaggatacaaacaaatggaagaacattccatgctcatgggtaggaagaatcaatatcgtgaaaatggccatactgcccaaggtaatttacagattcaatgccatccccatcaagctaccaatactttcttcacagaattggaaaaaactagttgtggatctctcaccgaaaagccgcatgcaggattttgccgatttcggaaccaccatcaaacaggattttcgcctgctggggcaaaccagcgtggaccgcttgctgcaactctctcagggccaggcggtgaagggcaatcagctgttgcccgtctcactggtgaaaagaaaaaccaccctggcgcccaatacgcaaaccgcctctccccgcgcgttggccgattcattaatgcagctggcacgacaggtttcccgactggaaagcgggcaggattttgccgatttcggaaccaccatcaaacaggattttcgcctgctggggcaaaccagcgtggaccgcttgctgcaactctctcagggccaggcggtgaagggcaatcagctgttgcccgtctcactggtgaaaagaaaaaccaccctggcgcccaatacgcaaaccgcctctccccgcgcgttggccgattcattaatgcagctggcacgacaggtttcccgactggaaagcgggcaggattttgccgatttcggaaccaccatcaaacaggactttcgcctgctggggcaaaccagcgtggaccgcttgctgcaactctctcagggccaggcggtgaagggcaatcagctgttgcccgtctcactggtgaaaagaaaaaccaccctggcgcccaatacgcaaaccgcctctccccgcgcgttggccgattcattaatgcagctggcacgacaggtttcccgactggaaagcgggcagtga

SEQ ID NO: 122842 - DNA, 1180 bp, Homo sapiens
atgccccacaagtgttaccatggcaaaactggaagagtctacaatgttacccagcatgctgttggcattgttgtaaacaaacaagttaagggcaagattcctgccaagagaattaatgtgcgtattgagcacattaagcactctaagagccgacacagcttcctgaaacgtgtgaaggaaaatgatcagaaaaagaaagaagccaaagagaaagaagttcccatggagcccaccgtgtacatgtctgaaaaggggaggacactttttcctggggagcctgccaatcacataaagaacaaaaggcttctgtgctggaccctgcctgcttatctgtgcagtttgatctcagactgctgtgctagcaatcagcgagactccgtgggcgtaggaccctccgagccatgtgcgggatataatctcctgatcaatcccccgattaaaaataaagagtccgcaaaagaaccgcaagtgtggcacagccgcacgctgcaaaacgcagacggaacagtagctgaatacaacggcaatcacgatgtgttcgctcgagcaaggaagcccgaaagacgctgatgacacatcaatctacatgttttatcaaaaggtcggcgacaactcaatcgacagctggaaaaacgcgggccgtgtctttaaagacagcgataagttcgacgccaacgatccgataaaaaaagatcagacgcaagaatggtccggttctgcaacctttacatctgacggaaaaatccgtttattctacactgactattccggtaaacattacggcaaacaaagcctgacaacagcgcaggattttcgcctgctggggcaaaccagcgtggaccgcttgctgcaactctctcagggccaggcggtgaagggcaatcagctgttgcccgtctcactggtgaaaagaaaaaccaccctggcgcccaatacgcaaaccgcctctccccgcgcgttggccgattcattaatgcagctggcacgccaggtttcccgactggaaagcgggcacccgtcggaaaagcgcagtattcgggtgggagtgacccgattttccaggtgccgtccatcacccctttctttgattaggaaagggaactccctgaccccttgcgcttcccgagtgaggcaatgcctcgccctgcttcggctcatgcacggtgcacgcacccactga

SEQ ID NO: 122843 - DNA, 1564 bp, Homo sapiens
aacaaggcactcacattcccacacatgggtgccagaggagacctagtgaagattcaggactttcaccattacctagcaagaatgaagccacaccactatggtgttagtggaaaccacatggggagcagtattaagacaccctggtgcctaccagccagggtgatattagcagaggcctagaggggaacctgaactcctgtcccacctagcagtaatgaagagcccctttcctctggtgtcaacaaaggctgagtggggaacctggattttcaatcctgaagcagaagaatcacttgaacctaggagtttgatctcagactgctgtgctaacaatcagcgagactccgtgggcgtaggaccctccgagccaggtgcgggatataatcttgtggtgcgcagttttttaagcccgtccgaaaagcgcagtgttcgggtgggagtgacccgactttccaggtgccgtccatcacccctttctttgactcagaaagggaaccccctgaccccttgcgcttcccaagtgaggcagtgcctcgccctgcttcggctgaggcacgtttacttctacaatttcggatggaaggattatggtgtagcgtctcttactactatcctagatatggtgaaggtgatgacatttgccttacaggaaggaaaagtagctatccattgtcatgcagggcttggtcgaacaggtgttttaatagcctgttacttagtttttgcaacgagaatgactgctgaccaagcaattatatttgtgcgggcaaagcgacccaattccatacaaaccagaggacagctcctctgtgaagcacagcagagtggagctttctctgcagatgtttcaggctcacacagccctggggagccagtttcacccagctttgcaaatgtccataaggatccaaaccctgctcaccagcaagtgtctcactgtcagtgtaaaactcatggtgttgggagccctggctctgtcaggcagaacagcaggacaccccgaagccctctggactgtggctccagtcccaaagcacagttcttggttgaacatgaaacccaggacagtaaagatctgtctgaagcagcttcacactctgcattacagtctgaattgagtgctgaggcaagaagaatactggcggccaaagccctagcaaatttaaatgaatctgtagaaaaggaggaactaaaaaggaaggtagaaatgtggcagaaagagcttaattcccgagatggagcttgggaaagaatatgtggcgagagggaccctttcatcctatgcagcttgatgtggtcttgggtggagcaactgaaggagcctgtaatcaccaaagaggatgtggacatgttggttgacaggcgagcagatgccgcagaagcactttttttattagagaagggacagcaccagactattctctgcgtgttgcactgcatagtgaacctgcagacaattcccgtggatgtggaggaagctttccttgcccatgccattaaggcattcactaagatcagcatcatctttgtaaatcagaatccagaggtcaccgtcctcctctaa

SEQ ID NO: 122844 - DNA, 2017 bp, Homo sapiens
agtgtctgagccacaactcaagaaggtaatgagaataaggagccaagatggcccgaaataggaaacagctccggtctgcaagctccccaccgtgaacgacgcagaaagacgggtgatttctgcatttcccatctgaggtaccgggttcatctctctagggagtgccagacagtgggcgcaggtcagtgggtgcgcgcaccgtgcgcgaagccgaaagcagggccgaggcattgccctcacttgggaagcgcaaggggtcagggagtttcccttccgagtcaaagaaaggggtgacggacagcacctggaaaatcgggtcactcccacccgaatactgcgcttttccaacgggcttaaaaatacggcccaccacgagattatatcccgcacgtggctcggagggtcctacgcccacggagtcatcgcatgattgctagcactgcagtctgagatcaaactgcaaggcggcaaaggaaaactaacaaacagaaaggacatccacaccaaaaacccatctgtacatcaccatcatcaaagaccaaaagtacataaaaccacaaagatggggaaaaaacagaacagaaaaactggaaactctaaaacgcagagcgcctctcctcctccaaaggaacgcagttcctcaccaacaacggaacaaagctggatggagaatgactttgacgagctgagagaagaaggcttcagacgatcaaattactctcagctacaggaggacattcaaaccaaaggcaaagaagttgaaaactttgaaaaaaatttagaagaatgtataactagaataaccaatacagagaagtgcttaaaggagctgatggagctgaaaaccaaggctcgagaactacgtgaagaatgcagaagcctcaggagccgatgcgatcaactggaagagagggtatcagcgatggaagatgaaatgaatgaaatgaagcgagaagggaagtttagagaaaaaagaataaaaagaaatgagcaaagcctccaagaaatatgggactatgtgaaaagaccaaatctacgtctgactggtgtacctgaaagtgatgcggagaatggaaccaagttggaaaacactctgcaggatattatccaggagaacttccccaatctagcaaggcaggccaacgttcagattcaggaaatacagagaacgccacaaagatactcctcgagaagagcaactccaagacacataattgtcagattcaccaaagttgaaatgaaggaaaaaatgttaagggcagccagagagaaagaggtctttgttccagagggaggaaccctgccacgaggaaacacaacaatgattccattaaactggaagttaagattgccacctggactctttgggctcctcctagctttaaggcaacaggctaagaatggagttacagtattggctggggtggttgacccggactatcaagatgaaatcagtctactactacacaacagagaaatcctcaatgttagtacattacagcaaagctatagttctggggaaaagcaggtatcttttttgatctcagactgctgtgctagcaatcagcgagattccgtgggcgtaggaccctccgagccaggtgtgggatatagtctcatggtgcaccgttttttaagtctgtctgaaaagcgcagtattcgggtgggagtgacccgattttccaggtgcgtccgtcacccctttcttcgactcagaaagggaactcctgaccccttgcgcttcccaaaaattcagaagctgctcaaactccagtgcagtcatggagcctccattacctgggaggcagcctccaagcagcatgcagccttgtcagaaactgcaccgccaagggtgagaatggcattagaagcaaagaggaaagattcaaacaggaacgagaatttggacaagcgaacactctgtgctgctcaagggaagagcacagtggaagtccaagggcgagtgtgtgcccagggcagggcaactgggctatgggctgattcccgggatgcatga

SEQ ID NO: 122845 - DNA, 597 bp, Homo sapiens
atgtcttctatggtggcaggcaaggaagaaagtaagcatgtgaaggaggaactgtcaaacacttataaacccatcagatctcttgagaacttaactcattatcatgagaacagcatgggggaagctgctgccatgatccaatcacctcccaccaggttccttcctttacatgtggggattacaattcgagatgagattcaggagacagagggagcagaaggcaatgggacaatagaaacggagaagtttgaagatgctgtgatgctggctttgaaaatagaggaaggcccacaggatggaagaggccatgaatggattatcttttggagtcttcatggagaatttagcccttctaccatcttgactttaggtctgaagtctcagtgggctcaaccagctcccctgttcaacatccggcaaggtccaaacgaaggtgacaatcaacagggatcttattgggaagctctggacaggaccctagcagtcctgtccacaggccgcttaaatccaattcgaatttggtttgcagccaagcaggtgcttcacgtcatgaaaggagcactcctccaacatcttgggatttcattccagaactag

SEQ ID NO: 122846 - DNA, 620 bp, Homo sapiens
atcccccatgcattggttttgatgtctccagtgagctgttgggcaagtcttgatattactgatccacccgcagcaggcagcttcctgtatggagctacctccaccccttggacagttcaggacgtgaaagattgtcaaaaatgtgaactccttgatgtccagtaaaggcaactgagggaactgtctaacattggtgtaaaaagtgcactttcctaaggagcatgaacttagagttatcaaagcctgtggcaatagtggaatccagcagggcatccagtcgctgctttgtaccttaaataggaattctttgaggagctcagtgtatctctcaactgaagcagctgcctgcagcctacaggggcagtggaagctctgctggacaccttcttcacaagcccagcactgtgttttctgatgaaatgttgctttggtgaccatcagtagtgtctggaactctgcaagggataaggagtgtccctgtgagatctgtactgtgtccttagttaaaataaaggcatctgttaccttgattggtattctgagtatccatgagacaagaagtgtatttaattcaatggggagggaaggtggacgattcttggaattccacgcacactgca

SEQ ID NO: 122847 - DNA, 1688 bp, Homo sapiens
atggaagagtcaagatactggggcactggaagaaatagaagagaaggtctgaagttgcagtgggctcaaccagctcccctgttcaacatccggcaaggtccaaacgaaggtgacaatcaacagggatcttattgggaagctctggcttcaataatgcaaattatacaccttgtcccttcaggtctggggatggtaacagcatttcactgttcctggtatctgagtactacagcaacctttcctggggttttaaatcctgctctaactgagataaaatcaggaaattactatgtacacggctccttcattcttcaggtggccgattataaagagttccagacactactgatgatcaccaaagcaacatttcatcagaaaacacagtgctgggcttgtgaagaaggtgtccagcagagcttccactgcccctgtaggatgcaggcagctgcttcagttgagagatacactgagctcctcaaagaattcctatttaaggagcacacctgtgacaaccaggaacctacctcgacccttcattatcactcaaagcttacagtgcacattcacgtttactcttcacgctgtacattgccgtgccagcccagccaggctgcacaggcagaaggaatctcccaacctgccccggcatgcgaggattttgtgttcgctgccctggctcctccagaagtggggttgtcccacactcagactcctcggtggcctctgcaccccaacaaatgccaggaggaccaggacccacagcacgacggcctgctgggcgcgtgctcagtgggacagcttgggccccctcaagctgagtcacagggccaagagtctgcggtgggactagagccccaggtcgccagggctgcatgggaaaccaaagactgggcacctccaactccgaagctcgtgaccccggaggcctccgtgtcaagcacagatggaagccattcaggagcctcccaaccgctccaggaggcaaggcgctcctctgcactcacccccagcctattagatgagctcctgtcgaccctagagtttcagcaaaaggcacaacctttcctagatccggcgccactgggggagctgaaggacgtggaagagcccactctgctggaaccactcttcagccaggaagaacaccgggctctgctggaggagcaggttggggcggctttggggcagggtggcggcctctctttcgcggtgaacctcaggcttggtgtggagaggcgtgtcttcccttccagctgacctgccctaggatccctgagttcccaggtccagcgagagactccacacagaggagggctgtcaacaatgacaagaaagcattcctgagcatcccggggatcccagggctggtcccaggtacagggaggtaggctgtcctaactgcatgcgcgggtttcccagcagcagcctaggatttctaactatcccaggcggagctctcatccctttttcccccgcgttcttcagtcgggttggcggagacctcagtccgcgaaacactgggccagggcagaagccaggccagttctcctttctgcggctcgactcctccgcctcttcgctcaccatcatgttgccaacccgtgtcccgccagcctcctcgccagcaccatagagcgccttgcaactaaataaagaccccagacctcgcgcaaaccagggtgctgccc

SEQ ID NO: 122848 - DNA, 331 bp, Homo sapiens
tttcagctcaggctccaaactctgccatcacagctcagactggtgttggggtagcgtctaccgtccacctaaaccccatgcagttgatgacagtggatgcatcgcatgctcgacatattcaagggatccagccagcacccatcagtacccaggcagtggtgttggcagatggagccacaattgtggccaaccctattagcaatccattcagtgctgctccagcagcaacaaccgtggtgcagacccacagccagagtgctagcaccaacgctcccgcccagggctcatcgccacggccaagcatactccggaagaaacctgccacagatgg

SEQ ID NO: 122849 - DNA, 1737 bp, Homo sapiens
aatcaccagttccgtgtccactatccgacagtatccagtttcagctcaggctccaaactctgccatcacagctcagactggtgttggggtagcgtctaccgtccacctaaaccccatgcagttgatgacagtggatgcatcgcatgctcgacatattcaagggatccagccagcacccatcagtacccagggtatccagccggcccccattgggaccccagggatacagcctgcaccactttggcacacagggaattcactcagcaaccccaatcaacacacaagggcttcagcctgcacctatgggtactcagcagcctcagcctgaaggaaagacttcagcagtggtgttggcagatggagccacaattgtggccaaccctattagcaatccattcagtgctgctccagcagcaacaaccgtggtgcagacccacagccagagtgctagcaccaacgctcccgcccagggctcatcgccacggccaagcatactccggaagaaacctgccacagatggaatggcagttcggaaaaccctcattcctcctcagcctcatgatgttgctagtcctcgagtggaaagctctatgcggagtacgtctgggtcacctaggcctgcaggtgccaaacccaagtctgaaatccacgtgtctatggccactccggtcactgtgtccatggagactgtatccaatcaaaataatgatcagcctaccattgccgtccctaaaactacccagcagcccccaccgaccattccaactatgattgcagcagccagtcccccgtcacaaccagccgttgccctttcaaccattcctggagcggtccccatcactccacccatcaccaccattgcagctgcaccacctccatcagtcactgtgggtggcagtctttcctccgtcttgggccctcccgttcctgaaattaaagtgaaagaagaagtagaaccaatggatatcatgaggccagtttctgcagttcctccactggctaccaacactgtgtctccatctcttgcattgctggcaaacaacttgtccatgcctacaagtgacctaccacctggtgcctccccaaggaaaaagcctcgaaagcaacagcatgtggatctcaacagaagaaggtgacatgatggagacaaacagcactgatgatgagaagtccactgccaagagtcttctggtgaaggctgagaagcgcaagtctcctcccaaggagtatattgatgaggaaggtgtgagatatgtcccagtgcgtccaagaccccccattactttgcttcgtcactatcggaacccctggaaagctgcttaccaccactttcagaggtacagtgacgtccgggtcaaagaggagaagaaagctatgctgcaggaaatagctaatcagaaaggagtatcctgtcgtgctcaaggctggaaagtccacctctgtgctgcccagttactacagctgacgaatctagaacatgatgtctatgaaagacttactaacctgcaggaagggattatcccaaagaaaaaagcagcaacagatgatgatctccaccgaataaacgaactgatacagggaaatatgcagaggtgtaaacttgtgatggatcaaatcagtgaagccagagactccatgcttaaggttttagatcataaagaccgtgtcctgaagctgcttaacaagaacgggactgtcaaaaaagtgtccaaattgaagcgaaaggaaaaagtctag

SEQ ID NO: 122850 - DNA, 423 bp, Homo sapiens
cgacccacgcgtccgccaaagtctaacaaaagacaatgtcttgttttcgtcaccccccaaagaagaggaacctgtgagaaatattctggagaaatttaacaccatcagtggaagcaaggtgaggagtctctacctccatgcgcctcccctcctgcctctggagaggtagccctttggttaatggcaacccaatagggtaaccaaccatcccattttagcattgagagcattgtgtcctgggagacccttccctggaatgtaaataatcctggttttagaaacaaagtgtggaaggttggaggaaatgcacgaaacccgtaagttttagagggtctgaaagcaacattgtctatcaaatggatacggcacagattattcatctttacttgttgtcacccatttgaccactgatattggcaacca

SEQ ID NO: 122851 - DNA, 484 bp, Homo sapiens
atgcgcgcggcagggagggcgtttccaggagggagcggcctttgctcagcgcgagacggctgggcgccgagtgggacagcgctggtgcggagactgcttccggactccaggtaccgcgcttggcggcagctggccccagacttctgtcttttcagctgcagtgaaggctcggggctgcagaattgcaaccttgccaatggacctgatcggttttggttatgcagccctcgtgacatttggaagcatttttggatataagcggagaggtggtgttccgtctttgattgctggtctttttgttggatgtttggccggctatggagcttaccgtgtctccaatgacaaacgagatgtaaaagtgtcactgtttacagctttcttcctggctaccataatgggtgtgagatttaagaggtccaagaaaataatgcctgctggtttggttgcaggtttaagcctcatgatgatcctgagacttgtcttg

SEQ ID NO: 122852 - DNA, 776 bp, Homo sapiens
aagggcagtactttggtgagtttggggaggtgaatttctccccaggatatggtttatgctccccaccagccaccagtggatgcttttttctgttttccttggctgggggagttgtcagtggagctgctctcacctcctttcttgcctttggagggccgccttttctgagttccctttagggcctgagccaggggaaggcattggccctgagctttgcctgtgtttccagatggaggccattgaactttcagtggatccaaagtctaacaaaagacaatgtcttgttttcgtcaccccccaaagaagaggaacctgtgagaaatattctggagaaatttaacaccatcagtggaagcaaggcactgaggtccagaggggagttatttacccaggtcacatcagatgaagataatgaagtattccaagaggattttagttttattccaaatagggccgcccggattcagccggagggcatggaccgggtggagtcctgcaaggcgagaagggacacagcgcatgcgcgcggcagggagggcgtttccaggagggagcggcctttgctcagcgcgagacggctgggcgccgagtgggacagcgctggtgcggagactgcttccggactccagttcaccgaaaatctcttagttctccgaattttggaggatttggggcgggcagcgaggctgtcccctgtcaccttgttttgtacctggtatggtaaatcgttttgctgcattgcatccaagatgcgttttagtccttccaaggcttga

SEQ ID NO: 122853 - DNA, 274 bp, Homo sapiens
tttcggagtttgcaatggaaatccaggtgttgggtccattctggcagatcatgttgattggattgtgctggtaaataattgaggctgactttgctcttcttccagaatcttctgggcggtaaatcgtccatgctttggactgctcatccatgtccagaaggtgcctgctcttcatcctgtacaagtctcggttcacatcttttgctgtcctcattcccagtgcttgggcgatgaccagggccctctggggaccattgactttgagaaacctgta

SEQ ID NO: 122854 - DNA, 999 bp, Homo sapiens; identical to SEQ ID NO: 116108

SEQ ID NO: 122855 - DNA, 604 bp, Homo sapiens
gcataaacgttcttcaagttcccaccagactcaggagcccagctggcttcaccccgtggatctcgcattggggctgcaggtggagctgcctgccagtcccgagccttcggccgcactcctcagcccttgggtggtcgatgggactgggcgccctggagcagggggcggcgctcgtcggggtggctccggctgcacaggagcccacggaggcgggggtagctcaggcatggagggctgcaggtcccgagccctgccccgcgggaaggcagctaaggcccggggagaaatcgagcgcagcgccgctgagggagccggcttcggccttggccggcccagaaaggggctcccacagtgcagcggcgggctgaagggctcctcaagtgccgccaaagtgggagcccaggcagaggaggcgccgagagcgagcgagggctgtgagggctgccctcatgctgtcacctctcacctgggtctggagctgcagctgtgcccagaagtgtgggctcccgctggccttgtggagcgcacaactctggccacaccccccacttcagccagtttcttctcagcagccactccagagggaccacctctggcatcttaa

SEQ ID NO: 122856 - DNA, 537 bp, Homo sapiens
agggagccgtctccggccttgtccagcccagaaaggggctcccacagtgcagcagtgggctgaagggctcctcaagtgtcgccaaagtgggagcccaggcagaggaggctttatgtaagaaaaggaaaaaacttccctccatccctcccatggtccaatgaagcatttttcaaccctgacctcacatcggcattactattttttttcagtgggaattcctgagtaaatctaaaatagttctaaaaaataaagtttatttaaaaagaaggagaaggaggaaaacacagactaacctgtgaggatgtgtcctccaaaaccctcaggacactggaagcacccaggggaataactcctctggatccaaattgcctgcctgagatatttaccatgatccctactctttaacaaacactgacctcccatttttggtcctatgtttctcatgatttataattctgttgaattttgagatcttttagggagtgagctcatgttgttctcaccaaactcagtgaagagttttcattgtcagaagaa

SEQ ID NO: 122857 - DNA, 3206 bp, Homo sapiens; identical to SEQ ID NO: 114124

SEQ ID NO: 122858 - DNA, 870 bp, Homo sapiens
ctaactgtccatcattgttggttgaaagctgcttccaggagtgtggatcctccattccatttgccttgccgagcactcaggttgagcatgctctttatgccagtgagaggtgacagcgtgctggcagtcctcacagccctcactcgctctcggtgcctcctctgcctgggctcccactttggcggcacttgaggagtccttcagcccaccgctgcactgacctccataagcttctactttaactggaggaccacaataacgtttagggtccgctggtatcaacgtcagctcagagccagtgtccagtagtcgcccaaatgtctgatcatttccctttccgcagtacacagttaccctggtaaaaggctggagatctcgtgaaccatcacccaaatcaagtgttttggggtcgaggtgccgtaaagcactaaatcggaaccctaaagggagcccccgatttagagcttgacggggaaagccggcgaacgtggcgagaaaggaagggagaaagcgataggcagcgggcgctagggcgtggctaagtgtagcgatcacgtgcgctaaccaccacaccttgcgcgctaatgcgcgcattctccaagtgatcacatatccagaggacatttcctctgcagttttcttcctttgttcattccctattcttgccttggtcaggtttctttccttgtgtttactttcattttgtatatcttctttggtgaaaaatctgttggaaacttttgtccattttttatatttgatgtgtatcttattattgagtcctaaaggtttcttatttttcctggagattggtattttgtccgatacctgtgcttttagctggattgctttaatgggccattccgccat

SEQ ID NO: 122859 - DNA, 399 bp, Homo sapiens
tttaggctttttaattaaaattttattttacatgtttttaaaattcacaatagatattttatcctaaaataaagtaaaaccgagaggtgacagcgtgctggcagtcctcacagccctcgcttgctctccccgcctcctctgcctgggctcctactttggcggcacttgaggagcccttcagccctccgctgcactgtgggagcccctttctgggctggccaaggccgggtgggcgtgggcttggcgggccccgcactcggagcagccggccagcctaagcctcccacccactccaagggctcctgtgcggcccgagcctcctcgacgagcaccaccccctgctccacggcgcccagtcccatcgaccacccaagggctgaggaatgcaagcgcaccgtg

SEQ ID NO: 122860 - DNA, 1491 bp, Homo sapiens
atggagcagggagccgcactcctcggggaggctccggctgcacaggagcccacagcagggcagggggaggctcaggcatggtgggctgcaggtcccaagccctgccctgcgaggagacagctaaggcccagtgagaaatcgagcacagcagctgctggcccaggtgctaagcccctcactgccaggggcttgtgggctggccagccactccaagtgtggggcctgccgagcccacaccctcctggaacttgcgctggcccgcaagcaccgtgtgcagccctggttcccatcggcacctctccctccagacctctcagcaagctgagggagctggctctggccttggccagcccagaaaggggctcccacagtgcagtgaaagccctcccagaagcttcccagtatggctccatccaagccaagctgccgcaaagctcagggttctactgtatgattacacgctgccatctcctggccaaagcactgaacttgggcccagatcactcctcctcaccagcaatggaacaaagctggacagagaatgactttgatgagctgacagaagtaggcctcagaaggttggtaataacaaacttctccgagctaaacgaggatgttcgaacccatggcaaggaagctaaaaaccttgaaaaaagattacatgaattgctaactacagtaaacagtgtagaaaagaccttaaatgacctgatggagcttaaaaccatggcacgcaaactacatgacacatgcacaagcttcaatagccaattcgatgaagtggaagtaagggtattagtgattgaagatcaaattaatgaaataaagttagaagagaagtttagagaaaaaagagtaaaaataaatgaacaaagcctacaagaaatatgggactatgtgaaaagaccaaacctactgagaggtgacagcgtgctggcagtcctcacagccctcgctcgctctcagcgcctcctctgcctgggctcccactttggcggcacttgaggagcccttcagcccgccgctgcacagtgagagccccttcctgggctggccaaggccggagctgggtccctcagctgctccgtgcgcccctgtgccgccggagcctccccaacgagtgccaccccctgctccatagcgcccagtcccatcgaccacccaagggctgaggagtgtgggcgcatggtgcaggactggcaggcagctccacctgcaccccggtgtgggatccactgggtgaagccagctgggctcctgagtctgcttatgagcatggtcataagaattaatatgattgtcaaactcctggtgtttgtgatactgcttgtcacataattcacagtaaaagtttgcctttacatcttccagggcctttgctgtggacttcttttctgcaaaatccttcatggcagcccctctcatcacaggcccaaagacctttggcatcactgtgacctggatgtgagacatgaggtcaaaggagatcat

SEQ ID NO: 122861 - DNA, 1227 bp, Homo sapiens
atgaagccgcggaccctcgcggtgagtgttacagctcttaaggtggcgcgtctggagtttgttccttctgatgttcggatgtgttcagagtttcttccttctggtgggctcgtggtctcgctggcttcaggagtgaagctgcagaccttcgcggtgagtgttacagctcgtaacagtgtggacccaaagaactcaggagcccagctggcttcacccagtggatccagcaccagggctgcaagtggagctgcctgctagtcccccagtcccccgccgtgtgctcgcactcctcagcccttgggtggtagatgggactgggtgccctggagcagggggtggcactcgtcggggaggctcaggccgcacaggagcccatggagcggctgagggagtgggctccggccttggccagcccagaaaggggcctcctacagtgcagtggtgggccgaaggactcctcaagtgccgccaaagtgggagcccaggcagaggaggcgccgagagcaagcgagggctgtgaggactgccagcaagcacgctgtcacctctcacctggaggaatgtgcgggcaagagtgaaaattcacacatgaacctcaactgctctggtgggtctctgggccctggcactggtgcccacttgcccctggggccagactcggggcagcctgctgagactctgctgtgggggccctgctgtgggcccggcggcactgggctcacaggctcgggccagacaatcagcctcgggtgccagggaggacagccacgcagggaggtgaagcctccagttccacaaagggtgtctgtgctcttggtcgctgtcaaccccccacccgacagccggtgccgtgtagaaacagatcgtccctggagactctgcatccagagctgcctctgtgggactctcaagcgggatgttttacactcaccatctgtggtcttcaacacaacccgtggtgggacagcagaatggtcccgtgaagacaaagatgctctgctgcctgagtacgctctccatatgcccttcgctgtgggcttcaagctggagtacaaagaaggagtactgggctcaaatctggctgcaggtcctgagaaggagctctgcgaagcaaagaggaatcagtgcccaaagtctggggtcagccacacttccaggcctcttaaacctgaatggtcagattttgtggctgagattgatgagtccaagttgccagatcgaagctga

SEQ ID NO: 122862 - DNA, 2784 bp, Homo sapiens
gagtctctgagagctggaagtttccagcaagagatccagcccgagctggctccgttaatcattctccgtggattcgggacttggcctggatggagttttcaggccacagggttctgcgtgggggtgcgtggcagcccaggaagtgggttcagaggctgtggggcttaccgggcaccttgatctttccggacccaactgtggccctggcagcccctgcagggactggacccaaagcctctgaaggacgcattgaggccatcacctctgggcagacgggcatgcgcagagcatcacctgtgctccgcagacgaacggcctgacttgggatttgagggtctgcagagatggggtgggtgtagggggtctcagggtaaacccgctgtccaccaggcttggggcagatgtggggaaggaacaggagggggtcacacgggatcccccccaccccgcctgaccccacctcaggccctggaagtttccgagcccagcctggtgagcggcggccggcggcgtgcggccagcagagggcgctcgggccaatgcgcccacccccagcctgtgtccaagccccacgtgaggctgtgcactaaatcccacctccccaccagctcccctcgtgtgaggcttcatccacatagtggctgccttctgcagctttgtgactcctgtttccaagagtcatagtttccagcttgggggtgagcttcgagtggctgggagtgatgagtggaaggtggggagagagagagaacacacaggggtccactctgccccctagctcacctgcgtcctcccctggctccccctctccagaccctgcgactcctcctgggccagccacccctgggctgatagacattttgttgctgttgccgatggtggcgtcctcgagaaagcacgatttcatgtggattctctgggcggcttccccctcagggtgagttcttccagtgaggacccacggggtggcagagttgggtctggcctctagatcccagttacctggggggctgccaggggggatgtgggcagggccctcggacgggacgccgtggagcctcatctcattgctgtgtcccagctgcacccgtctcagtatggactgctccagaggatccggtggctccccaccgaggtcccctccctgggctctcttgggtgacttaccgtcctccctggagactgtctgtcttgtaatgatgttcccgtgtccaatctggatggcttcggagtttgcaatggaaatccagctgttgggtccattctggcagatcatgttgattggattgtgctggtaaataattgaggctgactttgctcttcttccagaatcttctgcaaaataatattcaactgtatccctttgccactgtctatgggtcaggggttcccaataccagtcggcagcaccaaattctcctgggcaagcactagtgtcatggtttccctctgcagcccagacacaggcagccgggggcctacctgggcggtaaatcgtccatgctttggactgctcatccatgtccagaaggtgcctgctcttcatcctgtacaagtctcggttcacatcttttgctgtcctcattcccagtgcttggggttcctggggagtgggatcctgtgtcccgggaactgaagggacatgcaaaaacttaccccgttgttgggtccattgccaggatgctccctgcagggtcagacccgcctccccggggtggcagttaccagggctggacaaggccagctctgcaggaccctcgccttcaggatcagtcccgcccaagcaccaggtggcaggggatgtgagggagactttcaactcctttttcattcggtagaggacttggttgagctccctcttgggtgcttggcattccttcaccagctgggcaaagtagaaatctcaccccgggagctaccgctggtccttggaaggaagaagtactgtaccttctctgcccgggtcagcaggagcctgggccatgctgacagcagctgcaaggagtcggagagacttggcaggtgtgcaggcttctgcactgtggccctgagagggtgggctaggtcgaggctggggcttctgaagtggccgagcctggtgcttcttgcagctctgaacccacaagggatttgtccattcatgagggcagagccctcctgacctaatcacttcttaaaggtcttacctttttaataccatcacaatggcaattaaatttccacatgagttttgcaagggacattctaacaatagcagttccattacaggaagccagacacacatgctgaactaatttcaacaaatatcaacttaaaactaacctgaagtcgttggaaatggacggactggttcagacacggctgccttccccagcttcatgcacaggaaactgcactgtctacacaatgcaagagtgttgctgagagatgacagcgtgctggcagtcctcacagccctcgctgctctctgcgcctcctctgcctgcgctcccactttggcggcacttgtggagcccttcagcccaccgctgcactgtgggagcccctttctgggctggccaaggccggagccggctccctcagcttgcagggaggtgtggagggagaggtgcgagtgggaaccggggctgcgagcaagagccagctggagttccggaggtcagattgcgaatacctggggcttcctagggtccagtgcggcagttaccgcacctgccttcaccggtgaacctttagccagctgaacaaccaccaaagcgccctgcagagacaagtcatcgagcc

SEQ ID NO: 122863 - DNA, 662 bp, Homo sapiens
acgcataccccttcttgttacgaggcttaaaataaatgaaaaagtattacaggttctgaccaacatctttttgtttcatgatttctcagttcaaaactttataaaaggacttcagctttctctattagagcatttctattcccagcccttaagtgtcctgtgctgtaatcttccagaagccaaaagaagaataaattttttatcaaataatcaatgtgaaaacatccgacgtctaccatcttttaggaggtacgtggaaaagcaagcttcagaaaagcaagttgcgctcttgaccaatgagagatatttgaaggaggaaacacaattattactagaaaaccctgcatgtttatcatatgaattacttcctggttttgagatgtcttcataagttcacctcttctcttcccaagtatccactaggtcgacagatcagagagttgtactgtacatgtttagaaaagaacatatgggattcagaggagtatgcatcagtcttgcagctgctgaggatgttggcaaaggatgaactgatgaccatacttgagaaatgtttcaagggttttaagtcttattgtgaaaaccaccttggcagcacagcttagagaatagaggagttcctgggccagtttcagagcctcgatgaaccaagaggaagaaga

SEQ ID NO: 122864 - DNA, 1218 bp, Homo sapiens
atggggaaacgccagcagccagcgcagaacacttacatgagagttatcccatcagaaaagcaagggagatggggtatctatataccaccttccatcagtcattggctgaggtctgctaagaataggtttcgagggcattattccccagccctccagcctgctgtgtgcatgcaggcacaacaggctccagccatcagagagagcactggaggagttggaaggcaggagaagcgcccttctgtaagaagaactaagacatataggaagatagcagctgccaagctgtttcaggtcagcaaatatgaccccattgtcagccgtttgaaacccaattctccatggcaattttatttttatgctggaccattccctgaagaatgtacaagaccaggagtgaaccctaatgtaaactatggacctcaggttgtaacgatgtgtcaatgtagcttcattgagcgtaacaaacgtattcccgtggtgcagggcatccgtagaggaagaggccatgtacaatgggggagatatgtggaaaagcaagcttcagaaaagcaagttgcgctcttgaccagtgagagatgtttgaagaaggaaacgcaattattactagaaaacctgcatgtttatcatatgaattactttctggttttgagatgtgttcataagttcacctcttctcttcccaagtatccactaggtcgacagatcagagagttgtaccgcacatgtttagaaaagaacatccggaattcagaggagtacgcatcagtcttgcagctgctgaagatgttggcaaaggatgaactgatgaccatacttgagaaatgtttcgaggtttttaaatcttcttgtgaaaagcaccttggcagcacagctaagagaatacaggagttcctggcccagtttcagagcttcgatgaaaccaaagagaatgaagcactgaaaagggaagaagggtgcattccaaatatcaccccagacatctgcatagcatacaaattgtacctagagtgtcgcaggctaatcaaccttgtggactattcacaggcttttgcaacaattttgacagctgctgaaaaaatggatgcaaattctacatcctcagaagaaatgaatgaaattatctatgcttggtgtattagaactgtttttgaactagaacttttaggatttataaaacctaccaaacagaagactgaccatgtggcaaggctaacatag

SEQ ID NO: 122865 - DNA, 948 bp, Homo sapiens
ggggagataaactctgagaccctatttcgagtgcactagtccatgtggtggaattccttttatctatagtccttattggaaatgaaggagttaagaagaagtaagaagcaaaccaaatttgaagtactcagagaaaatgttgtgaacttcattgactgtctagtgagagaataccttctgcctcctgagacacagcctctccatgaggtggtgtacttcagtgctgcccatgcccttcgtgagcatttaaatgctgctccgcgaattgccctccatactgcactcaacaatccttactattatctcaagaatgaagcactgaaaagcgaagaaggctgcattccgaatatcgcccgcagacatctgcatagcatacaaactgcacctagagtgtagcaggctcatcaacctcgtggactggtcagaggcttttgcaacagttgtgacagctgctgaaaaaatggatgcaaattctgcatcctcagaagaaatgaatgaaattatccatgctcgggatattagagctgtttctgaactagaacttttaggatttataaaacctaccaaacagaagactgaccatgtggcaagactaacatggggaggctgctagaaagcaaataagcaaagccagaactatcacatttagcttaagagaaaaaggtgaccagtcatatttacatatattagaggagcctgttttgttgagaagataaatgtgtaacccccattgatgtttaaccagaaaagtacattgctaacccccaaacaggcatgtatcaaaacacctgtggagtactttagactccaacaaataataatgtaactaaaactgctcacacattttactgtactttccaaagtcattactaaattgtgagtaaatcattcttgaacttagagtatgtaaatgtaataaattccgttatccaggagtataaattaaaa

SEQ ID NO: 122866 - DNA, 770 bp, Homo sapiens
aaaagggttgggcacgaatttaaagaaactagattctcttaattccaaagggttggggaattatggcaaccataaacaaggggttcatggtttggccagggggttttgatgaataaacaaaggctggccccgggaacaatggtgaaggtatgaaaggacggggcatatcctggggaactcagaagagtcacagattctgggtttcctgtaatccctttcggttcctgggacttaagattggataagctagggccaagattggagaaaatactataaagtggaacctcttaattttgggggtactcagaaacagaaacaacttttcattggtggagaagcttgtctatggggagaatatgtggatgcaactaacctcactccaagattatggcctcgggcaagtgctgttggtgagagactctggagttccaaagatgtcagagatatggatgacgcctatgacagactgacaaggcaccgctgcaggatggtcgaaggcctggcatctttcttgtgagacaagcttaaggacacaaaaagaaccacacctttgtgataccactcttctgaaggctacttatagtaataacttcatagatgaacagcatgattcagatctgccaggacagggctgagataatctctagctactgtaacctcaagattcatcagaggctccaaaacttgcttatcagctttcttcagagcctaaagaaattaaagaatgttaacttatctttcataaataaaaacttaaaataaaaaaaaaa

SEQ ID NO: 122867 - DNA, 678 bp, Homo sapiens
gttaaagcaagcttatgtctttttgtatgagctctaggctgtatttatttgagggttttatttatgaaagataagttaacattctttaatttctttaggctctgaagaaagctgataagcaagttttggagcctctgatgaatcttgaggttacagtagctagagattatctcagccctgtcctggcagatctggcacaaagaagaggaaacattcaggaaattcagactcgccaggacaacaaagttgttattggatttgttcccttagcagaaattatggtaggtactttgtaactgaaaagtacatattcttcttaattcaggggatattatatgccaatgaatagacaatcagtaacctgaatcatgctgttcatctatgaagttattactataagtagccttcagaagagtggtatcacaaagttgtgtttcttttgtgtccttaagcttgtctcacaagaaagatgccaggcctctaaatgtaataagatagagggtcaaaggttcaatcaataaaaatattgtattcatacaacagtctcatgtcttattgtacatgatttcaacataaagctgattgtagtacagattgctgtggccgttgtcccctccatttttacatgctctcatggttacatatacagcatgaaagagttgtgcagctattccacgt

SEQ ID NO: 122868 - DNA, 983 bp, Homo sapiens
gaaacaactgaagcaaggaatgccttaattgaacaagttgcagatttggatgatgaatctgctgacttggttttagaagaattttgtgagaattttgatctgttaccagctgaaaagctacagactgcaatacatagagtgacactagctcagacagcagtgcctgtgctttgtggaagtgccctgaaaaacaaagggatacagcccttgttagatgctgttactatgtacttaccttcacctgaagagcgtaactatgaatttctgcagtggtataaggatgacttatgtgcattggcatttaaagttctccatgacaagcagcgaggaccactggtttttatgcgcatttactcaggcactataaaaccccagttggccattcataaatattaaatggaaactgcacggatcgtacccagattgccctcagtgtcaataatcacgaagtgcacatctataagaagaatgggcgccagtgtgtgaaagctcacgaactcaaggagcacaatggacacatcacagatattgactgggctcccaagcatgaccacatcgtcacttgtggggcagaccacaatgcctatgtctggagtcagaaagatggtgtctggaagccaacactgatgatcctgagaattaatcgcacagctacttttgtgaagtggtccgccctagagaacaaatttgctgtgggaagtgaagcacgactcatttcagtttgttactttgagtctgaaaatgactggtgggtgagcaagcacattaaaaagctgattcgctccacagtcctcagcttggattggcatcccaacaatgttttgctggcagcaggatcatgtgacttcaaacacagagtgttttcttcctacattaaagaagtggatgaaaagctggccagcatgccctgggacagcaagatgctttttgggcagctgatgtcagagtctggtggcggtggcactggtggctgggtccacggg

SEQ ID NO: 122869 - DNA, 1685 bp, Homo sapiens
ggatgacttatgtgcattggcatttaaagttctccatgacaagcagcgaggacccactggtttttatgcgccatttaactccaggccactataaaaaccccagttggcccattccataatattaatggaaactgccacggagagaataagtcgtctgcttttgccgtttgctgaccaacatgtagaaatcccttcattgactgctggtaacattgctttgactgttgggcttaaacatactgccactggagacaccattgtctcatccaagtccagtgcattagctgcagctcgtagagccgaacgggagggagaaaagaagcacagacaaaacaatgaaggcagagagacttttattggctgggagtgggagattccaggaacctgttttcttctgtaccataggaacccccatcactgtctaaggcagccagatttgggaacatgcgtttgaaatgtctttcagcgtgaggatccccgttttgaaagtgaggctagatcctgactctggacaaactgtttctgtgtggtatgggggagttacatatagagattattcatgatcgaatcaagagggaatatggactggagacctatctcgggcctctccaggtggcatatcgagagaccatcctaaactcagttcgtgccacagataccttaggataggaactttagggagacaaaaggcatcttgttgacttgttaggaagtgggaaggcaaggccaattgaaacatcatctgttatgcctgtgattgagtttgagtatgctgaaagtatcaatgaaggccttttgaaggtctcccaagaggccattgaaaatggaattcacagcgcatgtctccaaggaccattgcttggatccccaattcaggatgtaggcaattacctttacattccctgacaaattcatccctgggcaccttccacaacttatgatttctgcctgtgtctcaagatgccgtgcaaaaaggctcttgaaagaaaagctgataagcaagttttggagcctctgatgaatcttgaggttacagtagctagagattatctcagccctgtcctggcagatctggcacaaagaagaggaaacattcaggaaattcagactcgccaggacaacaaagttgttattggatttgttcccttagcagaaattatgggttattcaactgtgcttcgaacgctaacatcaggctcagctacttttgccttagaactatctacttatcaagccatgaatcctcaagatcaaaatacactgctcaaccggagaagtggtttgacctaaatgttttagtttttgggagagaaatccaggagcacctagctacttcattttcagtaagaacaatttttattgctttatttattggacgaataaagtactgtttcagtacattcagagaactagataaaagatataacttaagctttgatagtggcactggagccacccgttttaatttatataatgagaaatgtgctttgatgtttaaagccactgtacctgaatcatgctgttcatctatgaagttattactataagtagccttcagaagagtggtatcacaaagttgtgtttcttttgtgtccttaagcttgtctcacaagaaagatgccaggcctctaaatgtaataagatagagggtcaaaggttcaatcaataaaaatattttattcaaa

SEQ ID NO: 122870 - DNA, 1058 bp, Homo sapiens
aggtggtgctgggcctctcggtgctgctgacggcggccacagtggccggcgtacatgtgaagcagcagtgggaccagcagaggcttcgtgacggagttatcagagacattgagaggcaaattcggaaaaaagaaaacattcgtcttttgggagaacagattattttgactgagcaacttgaagcagaaagagagaagatgttattggcaaaaggatctcaaaaatcatgacttgaatgtgaaatatctgttggacagacaacacgaagttgtgtgtgtgtgttgatggagagtagcttagtagtatcttcatctttttttggtcactgtccttttaaacttgatcaaataaaggacagtgggtcatataagttactgctttcagggtcccttatatctgaataaaggagtgtgggcagacactttttggaagagtctgtctgggtgatcctggtagaagccccattagggtcactgtcccagtgctttagggttgttactgagaaagcactgccggagcttgtgagaaggaagggatggaatagttagccatccacctgagtagtctgatccagtcggcatgatgacgaagccacgagaacatcgaccctcagaaggactggaggaaggtgaagtggaggtgagagacgctcctgatcgtcgaatccgcaggatcaggccttcagtgggacttatcgcacgaccagagtggggggatttccctcaacagtgatgaaggagacgtgtcttggatggaggagcagctgtcctacttctgtgacaagtgccaaaaatggataccagccagtaaggagcttctcaattcctttgatttgtcaattcctgtgtgaaggtttgtttttccaacctgtgaaagaaacgtgaatgtaaaagagacctaaataaaaggataattatatttattctctagttgatcagctataaatttatataaaacataggcatgtttgtactaatgaaacgtactgtcaacctctatcacattgttaaattaacacttttggtggtaactcaataaaattgagaaaattggaaaaa

SEQ ID NO: 122871 - DNA, 3262 bp, Homo sapiens
  misc_feature (1)...(3262): n = a,t,c or g
atggatagtagcatccacctgagtagtctgatcagtcggcatgatgacgaagccacgagaacatcgacctcagaaggactggaggaaggtgaagtggagggagagacgctcctgatcgtcgaatccgaggatcaggcatcagtggacttatcgcacgaccagagtggggattccctcaacagtgatgaaggagacgtgtcttggatggaggagcagctgtcctacttctgtgacaagtgccaaaaatggataccagccagtcagctgagggaacagctcagttaccttaagggtgataatttttttaggtttacttgttcggattgctcagcagatggcaaggagcagtatgaaaggctgaagctgacatggcaccaagtcgtcatgttggcattgtacaacttgtctctgaaaggaagtggacgtcaaggttatttcaggtggaaagaagatatctgtgcttttattgagaaacattgaacttttttactaaggaataggaaaaagacgtctacctgcaggagcaccggggcaggttgcctcagcgtgggaagtcccatgtacttccgataaggtgcttaggaatttggagagccaagatggtggaaacttgttcataacttgcccttaacgatgaaacctgaacgagagaagacggctgcctctactctgaacattttcgcagcctcaaaaccaactttagatcccatcattactgttgagggacttagaaaacgagcaagtcggaatcctgtggaatctgccatggaattaaaagagaaaaggtctcgaactcaggaagcaaaagacattagaagagcccagaaggaggccgctggctttcttgacaggagcacatcttctacccctgtaaaattcataagccgaggccgcaggccagatgtgattctggaaaaaggcgaagtgattgacttttcctccttgagctcctctgaccgcaccccgctgacaagcccatctccttctccttctctggatttctctgcccctggtacacctgcctctcattctgccacacctagcttgctttcagaagcagatctgattccagatgtgatgcccccacaagccttgtttcatgatgacgatgagatggaaggcgatggagtcatagacccagggatggagtacgtcccaccccctgctgggtcagtagcttctgggccagtggttgggggcagaaagaaggtcagaggccctgaacagataaagcaggaggtagagagtgaggaggaaaaacccgacaggatggatattgacagtgaagacacagattcaaacacatctttgcaaacaagggctagagaaaagaggaagcctcagctggagaaggacacaaagccgaaagagcccaggtatactcccgtgagcatctacgaggaaaagctgctgctcaagaggctggaagcttgtcctggtgctgttgccatgactccggaagctcggagactgaaacgccaaactgattgtcagacaagcgtaaaagggataggggattaccactttttgacttggatcaaagttgttaatgctgctcttttgttagttgacgggatttatggagccaaagaaggaggaatttccagacttccagctggacaagccacgtacagaaccacctgtcaggacttcagaatccttgaccgataccagacttcctttgccgtccaggaagggttttcggacaccaggaccaccaagtttttgtatcgcttggtaggatcagaagatatggctgtggaccagagtattgtcagcccttatacctctcggatcttgaaaccttatatcaggagcgaccctcactggacgccggagcccgacgcacctctcgattactgttatgtgcggccaaatcacatcccaacgatcaactccatgtgtcaggagtttttttggcctggcattgacctgtgctgagtgtctgcagtacccagacttcagtgttgttgttctttataaaaaagtcatcattgcctttggcttcatggttcctggatgtggaaatacaatgaagcttacatttcatttctgttcgtccaccctgantgggagaagagcagggattgcaactttcatgatctatcatctgattcagacctgcatgggcaaggacgtgagcgctttacgtctcaaaaagcaaccccgctatgctactgtaccaaaagtttggatttcaagactgaagaatatgtattagatttctatgataaatattacccattggagagtacagagtgtaaacacgcattctttctgagggctccggcgctggatgcgaatacagctcacagaggaaacgcatgtgctattgggaggaccaggtctttgtgggagatcctaaaggcagtgattgaatttcacagggagctctaatctctgtgattacatggtccttcaaactccccaacccaaagtgagaaaagcgggcatgccagtgaaaatgaagcagtgagcagccccttttagcaaaatcgcccctcccagtccctcccctggagatgccttccagcccagcatccccagactcccacagttatttaatgaaatgatgtcggtgattccccctcccacctgacagtttgtaagagtgaaagagcatcctaacctgatgctcttggagagagataacctgtctgtcataacttaaaggatgagaaaatgtggtgtagctattaaagattcatgcagtcccaaaaggcactgtccctgggatgatgagagattataaggtgatttcataaaaggaatcctaccctgtgcccggccattgatgtgttgtcattgaatccaggaggatttcttagggcacttgaagttttgttgtttcttttgctgactttggttacagtcagaaaaaaataaactagatgtttgtgtctacatgttctacctgttgtacctattagcatcttcctgcagggacttggggcccatggcctgggaggttggtttgggattggggttgttgggcagcctgccattcacctggcctatcctggcccttcttcatgcccaagacagttgtttcacaggagtggaagtgtgggtgatgcaagtagaaccctctagatgtaccctgtgtggtctgcaggactggactgtttgctgtgtttgtggatgttggcgatagactgtcaattaggttgtttgtgatccaacaagaacatttccaaaagtatctaggtgttctcaaataaaaagctttctttgcacaacccatggccagagcgtcaaaaaa

SEQ ID NO: 122872 - DNA, 813 bp, Homo sapiens
atggagactcggtacccactgctgagggtggggaccaagtctgcgtcatcctctcctcagtgcctcaaacggtctgggagccaatgttcaacaaacgagcatgcgggcataaagtccatagtcattgtctgccaccagtatataccccagagaactgaaagcagggactcaaaaggatacttgcccaccagtgttcagagcagtattattcacaacagcaacccagtgtccctcaacagacgcctggatgaacaaaatgtggtacagccgtacaatggaatgttactcagccctaaagaggaaggaaattccgccacacgccacagcaaggcaccccatgtgcctacagttctgcaggtggtaaacgtgagtggctccctgctccggaggaccagtggggcagcagtggcggcagctgccagtctccctgttcccaggtgctggcggcatcacctagtcatgcaggtgacatggggcctcacacaaaaaaatgtaaataaaagcaagattgatgagcttggtcataccccatgtagtagttcatatccagagtcctgtgggaacatcgaagtgtggacaaagaggaaaccaaaagaacacacacagctgttctgtgcagctgtgcgtgcatctcccctgcagaatgctagagaaaaactacactgtgacactcaaaatactgaactgccgtgggccatcggcatgggcccctcagaatggaatctggtcgcgctagagcagcatgtccacattggccaactgtattcaactgacaagctgatcattgagaatcgagacatgcccaggacctag

SEQ ID NO: 122873 - DNA, 676 bp, Homo sapiens
  misc_feature (1)...(676): n = a,t,c or g
cctgacacccgtgcagactccagtcgcgcacaagtgttatctctgtaccgggcgatgctgagagagagcaagcgtttcagcgcctacaattacagaacatatgctgtcaggaggataagagatgccttcagagaaaataaaaatgtaaaggatcctgtagaaattcaaaccctagtgaataaagcccaagagagaccttggagtatttcgtggacaggtgccacattgggccaactgtattcaactgacaagctgatcattgaggaatcgaggacatgcccagggacctaggcaaggccgggggaccaggccaccagtggcggccaggggaccacctttcagcatccactgttctgttttgagctggggggctcccaaaacccagctttacaatagccttttgcggctgcctgtcctgtgggagctgattaaaccaagttcacatttgcattctgttgcaggcttaagtgaaaaaggacttgctgtctttccttgggttcaaggtgttagaatggaggagcttggagttcggttcagaatangttgctgtgttgttaccacgttctccccttgcacccccatttcctaccttgtagctcatgaccacttngtgtatagcattttctacacatttgttttcttggtccttggcccaataaaaagaatgatctccctg

SEQ ID NO: 122874 - DNA, 391 bp, Homo sapiens
  misc_feature (1)...(391): n = a,t,c or g
ccatatcctccttttagctctgtgaagagcgactatgcctcctttgaaagagcatctaaggaaaaggggtcaatccccttntgattaataacaaatcctttatctgaattactacagactttccttttcagttctattatttgttttaactctatcttcaatgaattttctttcagcttttatgagtttttctctttctgcactcttgtaaaaaacgccagaattcacttctcttgtatcagtttcagatttatgtttcttgtcaatgatcacaaaatcatgaagagatcaataggttcatcttttcttttaatggccaaaatggagcccactacagcctctgttaagacatctgcaagttcagcatgaactttagtacaaagagatgccc

SEQ ID NO: 122875 - DNA, 617 bp, Homo sapiens
taataaaaaagatttctggaatgagggaaatgatcagtccattttagccagattagagttgcagtgctgtactttagtatgggtaaacagaaatgtatccagaaggagagaggggtgttcaggtcttctaagtagaagtcagacactcctcaaatattgtggacaggggtcatggtttagagtagaaaattgggctaacagagaagctttgaattcccatagttaatactggaggaaatgagtcatcggtgataagcaaagccacacacaatattgttggttcttattgactgaatttactttggttgccttttaggtgagcccgtggtagcagcagaagcaggcattatgggataacgattgtgtaaagaaacagcttcttcattcctggtaagtttgggaaaatgaaaactaaactgttagagaatcatcatactcttcatttggtgttttctgtttagttgctcattttcccccatgaataatgtaatcagctgaaagtatggaaaccgaactagccctctgatgtgtagaggggaagggggaaatttaattggatgttaacgtgtgcagcttagttggaagtgggaagttgagtcgaattagggctcctaatc

SEQ ID NO: 122876 - DNA, 800 bp, Homo sapiens
  misc_feature (1)...(800): n = a,t,c or g
ctgcagattgtcttaacagagcctgtagtgnactccattttgcccattaaaaagcaagatgancctattgatctctcaatgattgagatcatggagatgaaacataaatctgaaactgttacaattttaatcagagggcttgttttggaccacggagcacggcatcctgatatgaagaaaagggtggaggatgcatacatcctcacttgtaacgtgtcattagagtatgagaaaacagaagtgaattctggctttttttacaagagtgcagaagagagagaaaaactcgtgaaagctgaaagaaaattcattgaagatagggttaaaaaaataatagaactgaaaaggaaagtctgtggcgattcagataaaggatttgttgttattaatcaaaagggaattgaccccttttccttagatgctctttcaaaagaaggcatagtcgctctgcgcagagctaaaaggagaaatatggagaggtatccgagtaatttgacttttactcattttgcaagtgaattgggattatttctttttccttatactttatttttgggttttttcaactgtatagttaattggcattaactatattcacattgtgcaccccgtcagcactgtccatctctaggacttttttcatcatcacaaactgaaactgtatacccattaaatagttactccccatttctccctcccccttgccccttgtaaacattattttactttttgtttctgaattcaatatacttttttccaaagagctccccacaataaaaagcttttttaaaaaaaaaaaa

SEQ ID NO: 122877 - DNA, 1411 bp, Homo sapiens
  misc_feature (1)...(1411): n = a,t,c or g
gcacggcatcctgatatgaagaaaagggtggaggatgcatccatcctcccttgtaacgtgtcattagagtatgagaaaacagaagtgaattctggctttttttccaagagtgcagaagagagagaaaaactcgtgaaagctgaaagaaaattcattgaagatagggttaaaaaaataatagaactgaaaaggaaagtctgtggcgattcagataaaggatttgttgttattaatcaaaagggaattgaccccttttccttagatgctctttcaaaagaaggcatagttgctctgcgcagagctaaaaggagaaatatggagaggctgactcttgcttgtggtggggtagccctgaattcttttgacgacctaagtcctgactgcttgggacatgcaggacttgtatatgagtatacaagtcctgcatgtcccaagcagtcaggactttgtatattgagtagtacattgggagaagagaagtttacctttattgagaaatgtaacaaccctcgttcctgtcacattattgatcaaaggaccaaataagcacacactcactcagatcaaagatgcagtgagggacggcttgagggctgtcaaaaatgctattgatgatggctgtgtggttccagggtgctggtgccgtgggaagtgggcaatggcagaagcccctgatttaaccataagccccagtgttaaagggcagggcacagcttgggagtcccaagcatttgcttgatgcatttgctcattatttccccaaggttctttgcttcaggaactctgggtttttgacctttcagggaaacattaagttaaaattcaaagcagaacattccagaatccaggtccagcttgtgggtgtggaccttgaacacaggtgagccaaatggtggcaagcagaagtaaggccgtatggggatanacctaattgtggtaaaagaaaacaagccttccttcaactccctgcacctggtgaattgcccaccaacattctccttgggttgaatgagatcatgcgagctggaatgtccttctcttgaaaaggttggaatttgaagcttcctctgtatctgaatcttgaagactgcaaagtgatcctgaggattacagctgtggaatttttgtccaagcttcaaataattttgaaagaaattttcccatatgaaaaaaggagagaacactggcatctgttgaaatttggaagttctggaaattatagtatttttaaaaattgcactgaagtgtatacacataaagcaggtcttttatccagtgaacaggatgttttgctttagcagcagtgacataaaattccatgttagataagcatatgttacttcccttgtttttaaatattttttgaaaagccaaaaaaaaaaaaaaaaaaaaaaaaaaaaaaaaaaaaaaa

SEQ ID NO: 122878 - DNA, 1610 bp, Homo sapiens
ttttttttttttttgaggtttcaacttaacatttatttgcacactccaggtcactgctgagcccccaaaacccacagcctagtaacaccaacttcactttcaaggacacgcagagatagaccaactatataaatcttgtggaaacatagtaatttggggtgaggaaactatgacgctagaggctttggggatgaatattttgcataagcaaaagttcagaagcttgaaaatataggcagccctacaaatctcaaatttcacctggatacccgtggccccttaggccacccatggccttccaggctctctcacttcccttgcctctagattactcctcttcccatttcctacaactttgctagggggagcattttaggcaaagctattttcaaaagcgtggaaaagtccaactgatccaataaatttactcaggaaatttacacctaacgggatgcctccccaaattttaaattacctaagcgttatttatattagcataaaaattttaaaacccagatgccttaacaatagggtactgctgaataatttaacatatgtccacataaaattaaaccattaaaatctgctttttcaaggaatatttaataaggtaggtaatatatgcttatttacacatggaattttatgtcgctgctgctaaagcaaaacatcctgttcactgggtgaaagacctgctttatctgtgtacacttcagtgcaattttttaaaaaatactgtaattataatttcagaacttccgaatttcaacagatgccagtgttctctccttttttcacaatgggaaaattcccttgaaactcatttgaagcttggacaaaaattccacagctgtattcttcaggatcactttgcagagtcttcaagactcagatacagaggaagcttcaattcaacctttcaggagaagattccagctcgcatgatctcatcaaccaagagaatgttggtggcaaccagtgcaggaatgaagaagctgtttctttacacaatcgttatcccataatgcctgcttctgctgctaccacgggctcaccttgggaagtaacgagcaacgcgatcagcaaatgcttggactccaagctgtgccttgccctttacactgagcttatatttattcagggcttctgccattgccacttccacggcaccagcacccggaaccacacagccatcatcaatagcatttttgacagccctcaagccatcccttactgcatctttgatctaagtgtgggcttatttggtcctttgatcaataatgtgacagaacgagggttgttacacttctcaataaaggtgaacttctcccaatgtatactcatatacaagtcctgcatgtctcaagcagtcaggacttaggtcctcaaaagaattcagggccacccccgccacaagcaagagtcagcctctccatattcctccttttagctctgtgaagagcgactatgccttctttgaaagagcatctaaggaaaaggggtcaattcccttttgattaataacaaatcctttatctgaattactacagactttccttttcagttctattataagttttaactctatcttcaatgaattttcttcagct

SEQ ID NO: 122879 - DNA, 1728 bp, Homo sapiens
ccttacttgaagcaaactagtatttttgttgaaaatgtatatcagcatcagttaaagttgatttttcagacctgctcctcagtaataatactagctagtcagcattcacgcctaccaggacacaaaaatcctcttcaaaactactcagaaaagaaagtcattactcaggaatgatgtccattcaggagaaatcaaaagagaattcctccaaagttactaaaaaaagtgacgataagaattcagaaacagaaattcaggattctcaaaagaatctagcaaaaaaatcaggtccaaaggagactataaaatcacaggctaaatcttccagtgaaagtaaaataaatcagccagaattggaaacacgcatgagtacaaggtcatcaaaggcagcatctaatgataaagctactaaatccattaataaaaatacggtgactgtgaggggatattcacaagaatctacaaaaaagaaattatctcagaaaaaattagtacatgaaaaccctaaagcaaatgaacagcttaaccggagatcacaaaggctacaacaattaacagaggtttcaagaaggtcgttacgcagtagagaaattcagggtcaagttcaagcagttaaacagagtttgccaccaactaaaaaagagcagtgtagcagtactcagagtaaatctaataaaacaagtcaaaaacatgtgaagagaaaagtactggaagtaaagtctgactctaaagaagatgaaaatctagtaattaatgaagtaataaattctcccaaagggaaaaaacgcaaggtagaacatcagacagcttgtgcttgtagttctcaatgcacgcaaggatctgaaaagtgtcctcagaagactactagaagagacgaaacgaaacctgtgcctgtaacttctgaggtgaaaagatcaaaaatggctacttcagtggtcccgaaaaagaatgagatgaagaagtcggttcatacacaagtgaatactaacacaacactcccaaaaagtccacagccatcagtgcctgaacaaagtgataatgagctggagcaagcaggaaagagcaaacgaggtagtattctccagctctgtgaagaaattgctggtgaaattgagtcagataatgtagaggtaaaaaaggaatcttcacaaatggaaagtgtaaaggaagaaaagccctcagaaataaaattggaagagaccagtgttgaaagacaaatacttcatcagaagggaacaaatcaggatgtgcaatgtaatcgttttttcccaagtagaaaaacaaagcctgtgaaatgtatactaaatggaataaacagctcagccaagaagaactccaactggactaaaattaaactctcaaaatttaactctgtgcagcacaataagttggactctcaagtttcccctaaattaggcttatttacgaaccagtttttcaccaccagctttagaaatgcatcatccagtgactcaaagtacatttttagggacaaagctacatgatagaaatataacttgccagcaggaaaaaatgaaagaaattaattctgaagaagtgaaaattaatgatattacagtagaaattaataaaaccacagaaagggctcctgaaaattgtcatttggccaatgagataaaaccttctgacccaccattggataatcagatgaaacattcttttgattcagcatcaaataaggtaatctgtttttattatgcacaatag

SEQ ID NO: 122880 - DNA, 395 bp, Homo sapiens
  misc_feature (1)...(395): n = a,t,c or g
gccatttcacgggccctgggacgctatgtgctttttccctgtctcatacaggatggcatatttgttgcacacacagcacatgcaatattgacgtcacttgaagacaagtctgtgaatgttccagccaaagacatgctggtgcctgcgccaactgacacgacactctgagtgtcaacatggaaactccacacccaagtttccaggaagagctctctggactcctgctcttgaaaatgttacgatcacctatagaagcatccaaggataaagacaaggtaaaaagcaatgcagtccgggcccttggaaatttgcttcattttctgcaaccctctcatatagaataacccacatttgctcaaatcaatgaggaggctatccaagccctaatttctatn

SEQ ID NO: 122881 - DNA, 730 bp, Homo sapiens
  misc_feature (1)...(730): n = a,t,c or g
agtaacgctgatacgctcagcttggcacgaggcagaacacccaactnnnnaaagagcgcctgtgatgccctgtcttccatcttgccagaggccttcaggaatctgccgaatgacaggcagatgctgtgcatcacagtgctgctcgggctgaatgacagcaagaatcgcttagtgaaagctgcaacttcacgcggccctgggagtctatgtgctttttccctgtctcagacaggatgtcatatttgttgcagacgcagcaaatgcaatggtgatgtcacttgaagacaagtctctgaatgttcgagccaaagcagcctggtccctgggcaacctgacagacactctgattgtcaacatggaaacaccagacccaagtttccagggaagagttctctggtctcctgctcttgaaaatggttacgatcaagctttagaagcatccaaggataaagacaaggtaaaaaggcattgcagtcccgggcccttggaaatttgcttcattttctgcaaccctctcatatagaaaaaccccacatttgcagaaattcatttgagggagtctatccagggccctgaattttctactgttctaacagaagcttgccatgaaagtccgatggaatgcttgttatgcaatgggaaatgtatttaaaaatcctgcccttcctttagggacagccccatggacctcccaggcctacaatgccctgacatcggtcgtgacatcatg

SEQ ID NO: 122882 - DNA, 2185 bp, Homo sapiens
ttttttttttttttttttggggacacactatttttcgttagtttattacaaaactacagatacaatacacaaaattctaattccgaaatccttctacatttttttttttctgagactaaatgccctcaaagcccgtctgcttggcctggtattacaacctgactcctcggctcctgggatgcacaggtcagatgttccaacaaccctgaccatggccagtgctatgggagtcactccaaaggtgggttgagccctctgtgaaaatttaaatgggctgctaaggtcattctaaataaatacgtgaacggattgtttctgccccgaaggatgaaatcccacagatgcttatgctcaagcttcaggtccttcctactgccgccttcggacatctaggaaagtatgggtggggatcttcactggatttgttaaccctggggagtgcccccttgtgaaaccagatgagtccaaaacaaacggccaggatctcttcctaaaaagcccatgatggcccttctggctgtgtctccagttggtgcctggatgctgcccatgtgtttaagggccattctgaccatctggtctctttcctgtgggctgtggggtgctccagtgtcatctccctatgctcctagattttaaagactgtagaatataggcgtggaccatattcccactcagttcaagggtttctttcatacaaagggaggtccgaggcacttggccaagcttcaagaggtgaatcagtgccttggcagatttgggtccgtaggcttgacacagtacttgaattccaaaaagtctatggtgtcttcactcttctgtaaaagcggtgaccaatgcattccagatccgagcatactggtcaacagacccgtactgctctctcttccccgggacggaaagggcagctgcagatctgatgcgcactttgaagttcttgcatgatgtcacgaccgatgtcagggcattgtaggcctgggaggtccatggggctgtccatttattaatggcatccacttctgtacacagctcataggggatttccagtttatattccctctcattccagtttttttccttcctgttttcttgaccattaaagtaatatatgcttattgtagacaacttgtctttatccttggatgcttctatagctgatcgtaacattttcaagagcaggagaccagagaactcttcctggaaacttgggtctggtgtttccatgttgacaatcagagtgtctgtcaggttgcccagggaccaggctgctttggctcgaacattcagagacttgtcttcaagtgacatcaatattgcatttgctgcgtctgcaacaaatatgacatcctgtctgagacagggaaaaagcacatagactcccagggcccgtgaagttgcagctttcactaagcgattcttgctgtcattcagcccgagcagcactgtgatgcacagcatctgcctgtcattcggcagattgctgaaggcctctggcaagatggaagacagggcatcacaggcgctcgcctggagagttgggtgttctgaattctgcagagaatctggaaaaaggaccgttcagcatcatagtccagaacatcaccacctttgctccatgaagctgaatggatggatctgcttcccccatgcacttgcaaatcacctctccaagctccatcaagtaggcttgagtcattgaaaagtagccccttgccagaagagtcaatacctgtaaggcctccagtcgcatgggggatggttcgtaggtgcttcctgctgcagagccagcatcgctacctgaacaggaatcctccttgggcagtacgacaatggaaatgcagagtcgaatgagccagcagggctctgaagaccccttaggtgagctaactgacgtttcttccagagagggtcctgcaggggctttcttccaccaatcaggagggctgaggtgaggggttgctgaattgctattaccgagtccagaagaacatggctgttgcagaagtagttggacttcaggtaaaggtgcgtgggtggacactatagctcccaagagtgtgagacttgacacacgaacattaacatctttgtggcgaatataaggctttatctggttccagactttggtcagcaggctgagttttagacgatcataaggtgcatttgatactaaatttgcaaggca

SEQ ID NO: 122883 - DNA, 6607 bp, Homo sapiens; identical to SEQ ID NO: 120391

SEQ ID NO: 122884 - DNA, 273 bp, Homo sapiens
atggtgatcatggagcgtagcaagctctcagagctggccgccagcacctccgtgcaggagcagaacaccacggacgaggagaaaacacagcctgtgtctctgctccccattacaataaagctgcttcatgatctctctccacttcctctcctccggaatatcctggcaccagaatttcttctgccaggaacccatgtggcccaacctgagagcttgacagaatctaaagagttggaagattctaggggattttcaagtctcactgcccaccca

SEQ ID NO: 122885 - DNA, 616 bp, Homo sapiens
  misc_feature (1)...(616): n = a,t,c or g
ttttttaaagggtaaagccaaaatttatgggggggtgttgtgtttaatcttgcgctgtgctttgacaaattctaagaagctggtgctgccagccgacggggcttctgagagaggaagggcagctcacacaggctccacagagagaaagaccttgaacgcccaccatgatgaacgagctgtggcgcagggcggggggctggctcacctggcaccttgtccaccgatgcaaacacggagcgctgcactgtggggtcgctgctgccccggcgcccctggtcgtagaagcggaaaggcaggtgctgagtggaggtggaggagccgagtccaaaccccaggacttcagtggtgggctggattgggaggtccagggagggcagctattctctgcatcttcatgcgccttgcctgggatgcggcctttggccaggcgctgcttggcgatgatgcagccgatgtggtctgagaggatganggtggcctgnaggatggggaagggcttggaatgggggctggacgcaggcttgtggatggtgatgttcagggcacggctgtcgtcctccacgccagtcacctgcatgtcctgcaataggcctgcanacttgaccactccccagcc

SEQ ID NO: 122886 - DNA, 990 bp, Homo sapiens
atggtacacggcagagaggagggaggcatggatcctgaaaaattagagcgaatccagctccccgtgccaaatgcggccgagaagaccacctacaaccacccgctagctgaaagactcatcaggatcatgaacaacgctgcccagccagatgggaagatccggctggcgacgctggagctgagctgcctgcttctgaagcagcaagtcctgatgagtgctggctgcatcatgaaggacgtgcacctggcctgcctggagggtgcgagagaagaaagtgttcaccttgtacgacatttttataaggtaattggcagagcacagatggacagcagcatgggagaagacatttttttggacatgtttgaagatgagtataggagcatgacaatgaagcccatgaacgtggaatatctcatgatggacgcctccatcctgctgcccccaacaggcacgccactgacgggcattgacttcgtgaagcggctgccgtgtggcgatgtggagaagacccggcggctgttgcccagagtagacgagtgtggctgtgaagtgacaagcccagggcctggcagacagcagcttgcacatgcagcaaggaagcaggagggtgaaaaccgagcctttgttccaggccagctcgtgggctcagcacatcaccggtgccatcccgttgtacctgcacgctctgtttcttcctccataaaatcttcaagttacaataaggtgcccacagttcctgccaccccggattattatgaaggtcacctgatacttggggacaaggtcctggcagatgacgggtgctcagttcaggccatccgggtgttcttcatgctgcgttccctgtcactgcaattgcgaggggagcctgagacacagttgccgctgactcgggaggaggacctgatcaagactgatgatgtcctggatctgagagggctctcaccaggtagtggcaagatggccttcagcagccccaagatttgttga

SEQ ID NO: 122887 - DNA, 2780 bp, Homo sapiens
tgtcgtggaaagcggctcgcggttcctccaccgcctccgccgccgcattctccgcttgtgctaccgccgcgggcgctgggccgctctgctggtccggcatgagaccgtgagacgagagacgggtcggggccgccgacatgtttggccgctcgcggagctgggtgggcgggggccatggcaagacttcccgcaacatccactccttggaccacctcaagtatctgtaccacgttttgaccaaaaacaccacagtcacagaacagaaccggaacctgctagtggagaccatccgttccatcactgagatcctgatctggggagatcaaaatgacagctctgtatttgacttcttcctggagaagaatatgtttgttttcttcttgaacatcttgcggcaaaagtcgggccgttacgtgtgcgttcagctgctgcagaccttgaacatcctctttgagaacatcagtcacgagacctcactttattatttgctctcaaataactacgtaaattctatcatcgttcataaatttgacttttctgatgaggagattatggcctattatatatcgttcctgaaaacactttcgttaaaactcaacaaccacactgtccatttcttttataatgagcacaccaatgactttgccctgtacacagaagccatcaagtttttcaaccaccctgaaagcatggttagaattgctgtaagaaccataactttgaatgtctataaagtggataaccaggccatgctgcactacatccgagataaaactgctgttccttacttctccaatttggtctggttcattgggagccatgtgatcgaactcgatgactgcgtgcagactgatgaggagcatcggaatcggggtaaactgagtgatctggtggcagagcacctagaccacctgcactatctcaatgacatcctgatcatcaactgtgagttcctcaacgatgtgctcactgaccacctgctcaacaggctcttcctgcccctctacgtgtactcactggagaaccaggacaaggtcttcttaattatacatcatgcaccgctggtgaactcgttagctgaagtcattctgaatggtgatctgtctgagatgtacgctaagactgaacaggatattcagagaagttctgtcttacccactctaagctccttatggcagggatctcacctgtcactgaatcagctgcagtctgggctgcacaaatgctcatctcacttatgcggagcccaggctgcagctgattcagtgacaggtgagatccctgccataaggagcttagagtggctaatcagtgctggttccaaggcgcgcacattcttcttcctgaaaatgctaataggcttctgggagaaggttgattgtgaatatcaaaggcgtcaagtgctgagcacgcggctgcaagaggccttgccgtcaaatcgcctcactgatgttgcagctgtgcattcttcatgcatgttgggctttggttccacagctccacgcggctcctggattggcgatccagcggctgtgcatctgcccctacctggggagctggccgagcaccttgggtccaagggtaccaccactgtcaccaagcaccagccccaggccaagcccagcattcggtgcttcattaaacccaccgagacactcgagcggtcccttgagatgaacaagcacaagggcaagaggcgggtgcaaaagagacccaactacaaaaacgttggggaagaagaagatgaggagaaagggcccaccgaggatgcccaagaagacgccgagaaggctaaaggtacagagggtggttcaaaaggcatcaagacgagtggggagagtgaagagatcgagatggtgatcatggagcgtagcaagctctcagagctggccgccagcacctccgtgcaggagcagaacaccacggacgaggagaaaagcgccgccgccacctgctctgagagcacgcaatggagcagacccttcctggatatggtgtaccacgcgctggacagcccggatgatgattaccatgccctgttcgtgctctgcctcctctatgccatgtctcataataaagaaaatctcctgaaaaagaggaaggcttatcaggcactcaaagccacccaggcaaagcaggaacttttggcaaagaaggagcagaagaaaggaaaagggctcaggtttaagctactggaatcattcctacatgattactggcagcagaaacctgacaaggtgcatctcagacgactagaagtgaaacctcatgccgtggaattgccagataaacattccttggcctttgttgtacgcatcgaaaggattgatggcgtgagtttactggtgcagagaaccattgcaagactttgcctaaagaaaatttttagtggtgtctttgtaaaagtcaccccccagaatctacaaatgctgcgtatagtggaaacttatgtgacctggggatttccaaatctgaagtctgtccgagaactcattttgaaacgtggacaagccaaggtcaagagtaagaccatccctctgacagacaacacagtgattgaggagcacctggggaagtttggcatcatttgcttggaagacctcattcatgaaattgcattcccagggaagcatttccaggagatctcatggttcttgcgccctttccacctctcagtggcccatcatgctaccaaaaatagagtgggcttcctcaaggagatgggcacacttggctatcggggtgaacgcatcaatcagctcatccgccagctgaactag

SEQ ID NO: 122888 - DNA, 3052 bp, Homo sapiens
cggaacctgctagtggagaccatccgttccatcactgagatcctgatctggggagatcaaaatgacagctctgtatttgacttcttcctggagaagaatatgtttgttttcttcttgaacatcttgcggcaaaagtcgggccgttacgtgtgcgttcagctgctgcagaccttgaacatcctctttgagaacatcagtcacgagacctcactttattatttgctctcaaataactacgtaaattctatcatcgttcataaatttgacttttctgatgaggagattatggcctattatatatcgttcctgaaaacactttcgttaaaactcaacaaccacactgtccatttcttttataatgagcacaccaatgactttgccctgtacacagaagccatcaagtttttcaaccaccctgaaagcatggttagaattgctgtaagaaccataactttgaatgtctataaagtgtcattggataaccaggccatgctgcactacatccgagataaaactgctgttccttacttctccaatttggtctggttcattgggagccatgtgatcgaactcgatgactgcgtgcagactgatgaggagcatcggaatcggggtaaactgagtgatctggtggcagagcacctagaccacctgcactatctcaatgacatcctgatcatcaactgtgagttcctcaacgatgtgctcactgaccacctgctcaacaggctcttcctgcccctctacgtgtactcactggagaaccaggacaagggaggagaacggccgaaaattagcctgccggtgtctctttatcttctgtcacaggtcttcttaattatacatcatgcaccgctggtgaactcgttagctgaagtcattctgaatggtgatctgtctgagatgtacgctaagactgaacaggatattcagagaagttctgccaagcccagcattcggtgcttcattaaacccaccgagacactcgagcggtcccttgagatgaacaagcacaagggcaagaggcgggtgcaaaagagacccaactacaaaaacgttggggaagaagaagatgaggagaaagggcccaccgaggatgcccaagaagacgccgagaaggctaaaggtacagagggtggttcaaaaggcatcaagacgagtggggagagtgaagagatcgagatggtgatcatggagcgtagcaagctctcagagctggccgccagcacctccgtgcaggagcagaacaccacggacgaggagaaaagcgccgccgccacctgctctgagagcacgcaatggagcagacccttcctggatatggtgtaccacgcgctggacagcccggatgatgattaccatgccctgttcgtgctctgcctcctctatgccatgtctcataataaaggcatgggatcctgaaaaattagagcgaatccagctccccgttgccaaattgcggccgagaaggaccaccttacaaccacccgttaggttgaaagattcattcagggttcatggaacaacgtttgcccagccagatgggaagatccggctgggcgacgctgggagcttgaggttgccttgtttcttgaaggcagcaagtcctgatgagtgctggctgcatcatgaaggacgtgcacctggcctgcctggagggtgcgagagaagaaagtgttcaccttgtacgacatttttataagggagaagacatttttttggacatgtttgaagatgagtataggagcatgacaatgaagcccatgaacgtggaatatctcatgatggacgcctccatcctgctgcccccaacaggcacgccactgacgggcattgacttcgtgaagcggctgccgtgtggcgatgtggagaagacccggcgggccatccgggtgttcttcatgctgcgttccctgtcactgcaattgcgaggggagcctgagacacagttgccgctgactcgggaggaggacctgatcaagactgatgatgtcctggatctgaataacagcgacttgattgcatgtacagtgatcaccaaggatggcggcatggtccagcgattccttgctgtggatatttaccagatgagtttggtggagcctgatgtgtccaggcttggctggggagtggtcaagtttgcaggcctattgcaggacatgcaggtgactggcgtggaggacgacagccgtgccctgaacatcaccatccacaagcctgcgtccagcccccattccaagcccttccccatcctccaggccaccttcatcttctcagaccacatccgctgcattcattcgccaagcagcgctttgccaaaggccgcatccaggcaaggcgcatgaagatgcagagaatagctgccctcctggacctcccaatccagcccacaactgaagtcctggggtttggactcggctcttcaacctccactcagcacctgcctttccgcttctacgaccaggggcgccggggcagcagcgaccccacagtgcagcgctccgtgtttgcatcggtggacaaggtgccaggcttcgccgtggcccagtgcataaacgagcacagctccccgtccctgtcctcacagtccccaccctccgccagcgggagccccagcggcagcgggagcaccagccactgcgactctggaggcaccagctcgtcctccaccccctccacagcccagagtccagcagatgcccccatgagtccagaactgcctaagcctcaccttcctgaccagttggtaatcgtcaacgaaacggaagcagactctaagcccagcaagaacgtggccaggagcgcagccgtggagacagccagcctgtcccccagcctcgtccctgcccggcagcccaccatttccctgctctgcgaggacacggctgacacgctgagcgtcgaatcgctgacccttgtccccccagttgacccccacagcctccgcagcctcaccggcatgcccccgctgtccacgccggctgccgcctgcacagagcccgtgggcgaagaggctgcatgtgctgagcctgtgggcaccgctgaggactga

SEQ ID NO: 122889 - DNA, 361 bp, Homo sapiens
ggcacgagcggcacgaggaaatatgtcaacatactacagttagtgtacagaatcagcatttcattgttaggacattttcctcaactttctaaagccagcatttcaactgacttttccagaccatatttgaagatgttagtggttttggtgcctggcatcgaagatggtgtgttctttctggaaactgtatatcttattggacttatccagatgatgagaaacgcaaggtaatttatatagtactgtttagtggtgaaagccctgattgactttcgtgtagtgttcatgcaaatgttccctctggcccccatcactcacccaaattaataaccctttttgtgtactcactaagccattaaag

SEQ ID NO: 122890 - DNA, 406 bp, Homo sapiens
gtgttttttccaagtagaacttctcttcagtgtgtcagacagcgttttttgatggcgatggtttgtacaagatttctcttcacaccagagaggggctgctggttacttgcttctgaaagtggctgtctagctcgcttagcatgagtcatagaccttggagctgctgtgggcctctcagccatttttctctgaagattctctcgcctggcacgggttcgctccagcagttttctccgtaaacggatccatcgccccaggcgtcggactacgagacgatggaaacggtggttcaaattcaggaagagaaaagtgagtctcagctcagtgtgtctcctggaaaaaaccaggagtctgaggcgggggaactctcccacaaccagctgtcctctcctctgggcttccagtt

SEQ ID NO: 122891 - DNA, 618 bp, Homo sapiens
gaaaaaaacatccaagtccaaggctattactccaaagcgactcctcacatctataaccacaaaaagcaacattcattcttcagtcatggccagtccaggaggtcttagtgctgtgcgaaccagcaacttcgcccttgttggatcttacacattatcattgtcttcagtaggaaatactaagtttgttctggacaaggtcccctgttttatcttcttatggagggcatatttatttaaagataagatgtccagtggattcccagtgttggaagaagaggttttctaaccatatttgaagatgtaagtggttttgggtgcctggcatcgaagatgttgtgttctttctggagactgtatatcctattgggcttatccagatgatgagaaacgcaagaatcccataggaaggataaatctggctaattgtaccagtcgtcagatagaaccagccaacagagaattttgtgcaagacgcaacacttttgaattaattactgtccgaccacaaagagaagatgaccgagagactcttgtcagccaatgcagggacacactctgtgttaccaagaactggctgtctgcagatactaaagaagagcgggatctctggatgcaaaa

SEQ ID NO: 122892 - DNA, 3704 bp, Homo sapiens
atggttgccattatcactatcatcatcattatcaaggtagaaaccaaagacatagtgggatggagacacactgagctgagactcacttttctcttcctgaatttgaaccaccgtttccatcgtctcgtagtccgacgcctggggcgatggatccgtttacggagtcctggcgcagcaagagtgaggcgcaggcctgcggaacgggtcctgctggaagcagctggaatgccctgcagggcggggtccggggccggtgactcagtgcggctgccgccgggaaaggcgaaactgctggagcgaacccgtgccaggcgagagaatcttcagagaaaaatggctgagaggcccacagcagctccaaggtctatgactcatgctaagcgagctagacagccactttcagaagcaagtaaccagcagcccctctctggtggtgaagagaaatcttgtacaaaaccatcgccatcaaaaaaacgctgttctgacaacactgaagtagaagtttctaacttggaaaataaacaaccagttgagtcgacatctgcaaaatcttgttctccaagtcctgtgtctcctcaggtgcagccacaagcagcagataccatcagtgattctgttgctgtcccggcatcactgctgggcatgaggagagggctgaactcaagattggaagcaactgcagcctcctcagttaaaacacgtatgcaaaaacttgcagagcaacggcgccgttgggataatgatgatatgacagatgacattcctgaaagctcactcttctcaccaatgccatcagaggaaaaggctgcttcccctcccaaacctctgctttcaaatgcctcggcaactccagttggcagaaggggccgtctggccaatcttgctgcaactatttgctcctgggaagatgatgtaaatcactcatttgcaaaacaaaacagtgtacaagaacagcctggtaccgcttgtttatccaaattttcctctgcaagtggagcatctgctaggatcaatagcagcagtgttaagcaggaagctacattctgttcccaaagggatggcgatgcctctttgaataaaagccctatcctcaagtgctgaagatgcgtctttggttaatgcctcaatttccagctctgtgaaagctacttctccagtgaaatctactacatctatcactgatgctaaaagttgtgagggacaaaatcctgagctacttccaaaaactcctattagtcctctgaaaacgggggtatcgaaaccaattgtgaagtcaactttatcccagacagttccatccaagggagaattaagtagagaaatttgtctgcaatctcaatctaaagacaaatctacgacaccaggaggaacaggaattaagcctttcctggaacgctttggagagcgttgtcaagaacatagcaaagaaagtccagctcgtagcacaccccacagaacccccattattactccaaatacaaaggccatccaagaaagattattcaagcaagacacatcttcatctactacccatttagcacaacagctcaagcaggaacgtcaaaaagaactagcatgtcttcgtggccgatttgacaagggcaatatatggagtgcagaaaaaggcggaaactcaaaaagcaaacaactagaaaccaaacaggaaactcactgtcagagcactcccctcaaaaaacaccaaggtgtttcaaaaactcagtcacttccagtaacagaaaaggtgaccgaaaaccagataccagccaaaaattctagtacagaacctaaagaagtgatacgtgaaattgagatgagtgtggatgatgatgatatcaatagttcgaaagtaattaatgacctcttcagtgatgtcctagaggaaggtgaactagatatggagaagagccaagaggagatggatcaagcattagcagaaagcagcgaagaacaggaagatgcactgaatatctcctcaatgtctttacttgcaccattggcacaaacagttggtgtgagtttagtgtccacacctagactggaattgaaagacaccagcagaagtgatgaaagtccaaaaccaggaaaattccaaagaactcgtgtccctcgagctgaatctggtgatagccttggttctgaagatcgtgatcttctttacagatctcaaagattcaaagaaacagaacgtccatcaataaagcaggtgattgttcggaaggaagatgttacttcaaaactggatgaaaaaaataatgcctttccttgtcaagttaatatcaaacagaaaatgcaggaactcaataacgaaataaatatgcaacagacagtgatctatcaagctagccaggctcttaactgctgtgttgatgaagaacatggaaaagggtccctagaagaagctgaagcagaaagacttcttctaattgcaactgggaagagaacacttttgattgatgaattgaataaattgaagaacgaaggacctcagaggaagaattaaggctagtccccccaagtgaatttattgccatcccaaaggatcagtttactttgtcagaaatccgcttgccctaaaaagcagattttgtctgcagtacggttcagaaaccagatgcagcaaattactattacttaattatacttaaaagcaggagctgaaaatatggtagccacaccattagcaagtacttcaaactctcttaacggtgatgctctgacattcactactacatttactctgcaagatgtatccaatgactttgaaataaatattgaagtttacagcttggtgcaaaagaaagatccctcaggccttgataagaagaaaaaaacatccaagtccaagaaaagcaacattcattcttcagtcatggccagtccaggaggtcttagtgctgtgcgaaccagcaacttcgcccttgttggatcttacacattatcattgtcttcagtaggaaatactaagtttgttctggacaaggtcccctttttatcttctttggaaggtcatatttatttaaaaataaaatgtcaagtgaattccagtgttgaagaaagaggttttctaggctgccctggaggagggcgactccaaccaaagagacagaccatatttgaagatgttagtggttttggtgcctggcatcgaagatggtgtgttctttctggaaactgtatatcttattggacttatccagatgatgagaaacgcaagaatcccataggaaggataaatctggctaattgtaccagtcgtcagatagaaccagccaacagagaattttgtgcaagacgcaacacttttgaattaattactgtccgaccacaaagagaagatgaccgagagactcttgtcagccaatgcagggacacactctgtgtttaccaagaactggctgtctgcagatactaaagaagagcgggatctctggatgcaaaaactcaatcaagttctttgtgatattcgcctctggcaacctgatgcttgctacaaacctattggaaagccttaaaccgggaaatttccatgctatctagaggtttttgatgtcatcttaagaaacacacttaagagcatcagatttactgattgcattttatgctttaagtacgaaagggtttgtgccaatattcactacgtattatgcagtatttatatcttttgtatgtaaaactttaactgatttctgtcattcatcaatgag

SEQ ID NO: 122893 - DNA, 243 bp, Homo sapiens
tcaagaagaaagagtaactatggccacctttaggtcaccagccaataatactgcttctctatcctgttctgctgtgacatttgtcccagcaggtgttccagtctgtcctgcagggccactgtagatgaggagcttcctgtcgctcagcaggacaatggctttagaggataagatccttcttaggaagcaagatccatgctcttgctcctgtttctgcctcctgaccactctggtcttccccat

SEQ ID NO: 122894 - DNA, 739 bp, Homo sapiens
agggttggagaagggaccaagcctcccctgaaagctgaggggtttatggtcaagaagaaagagtaactatggccacctttaggtcaccagccaataatactgcttctctatcctgttctgctgtgacatttgtcccagcaggtgttccagtctgtcctacagtagtgagaccacctgatatggtgaggaaggcaggtaattgatcttactccatcatatcatcacatctatttccaccccccgcccttgggagacaaggtctcacttccattcatttagggccggaatgcagtggtgcaatcataggctcattgtaggtctcaaacacctgggcccaagtgatcctcactgtagttttcccaagtagctaggacttacaggcacatgccaccacacctggctaattaaaaaaaattttttttgcacagagatgggggtcttgatatgttgcccaggctggtctggaactcctggccacaagtgatcctcccacctcagcctcccaaagcactgggattactgttgtgagccaccatgaccagccccatcacttcttttgtaggtttgtatttgtttttatttttgacaaagacttttatttcacggtgacttcttcacaagtttcctcagatgctagtctgaacaaaggagagcagggaactagaaatgtagactttctgttttttccagctatggcatcactgatctcatccatcttactaaaagtttgtgcagtctc

SEQ ID NO: 122895 - DNA, 2262 bp, Homo sapiens
atgtgctcgacgcccggaatgccggcgccgggggcctcgctggccctgcgggtgtccttcgtggacgtgcatcccgatgtgatcccggtgcagctgtgggggctgggcaaggaggtgcacgggtgcgtcctggacgtgctgctgctccatcgcctggtcctcctggaggtgcctgatgtgttccaacagatgcgggagctgggcctggctcggcgggtgcccgacagcctcttccgttcgctgctggagcgctatctcacagcggccactgctagcgtgggctccggggtcccggttctctcgcgagtcccgctcaagcaaaagcagcctggtctggattacttctatccccagctgcagctgggcgtgacggaggccgtggtcataacccaagagatccaccgcctctccgagagcatggcccaggtataccggggttccacggggacaggggatgagaactctaccagtgccacctgggaggagagggaggagagcccagataagccgggctctccgtgtgcatcctgtggcctggatggacattggtacagagcactgttgcttgagacttttcggccccagcgctgtgcccaggtgcttcatgtggactatggaaggaaggagttagtgagttgcagcagccttcggtacttgctgcctgaatattttcgaatgccggtggtgacctacccttgtgctttgtatggactctgggacggtgggagaggctggtctcggtcacaggtcggtgacctgaagacactgatactaggcaaggcagtgaatgcaaagattgaattttattgctcctttgagcatgtgtattatgtcagcctgtatggagaagatgggattaatctgaaccgtgtgtttggagtacagtcgtgttgcttggctgaccgagtccttcagagccaggcaacagaggaggaggaaccagaaacatctcagtctcagtctcctgctgaagaagtagatgaagagatttcactcccagccttaagatctatcaggttaaagatgaatgccttctacgatgcgcagtggaaagaaaatggttattatagggccatagtcaccaaattggatgacaagagtgtggatgtattcttagttgaccgaggcaattcggaaaatgtggactggatcatcaatatgttattgagattcttgacgaatcaagaacagggggaagaaaccattagtaaggtaattgcccaagctggatatgccaagtatcaggaatttgaaacaaaggaaaatatcctggtaaatgcccactccccagggcatgtttcaaaccactttactacggagagtaacaaaataccttttgccaagactggagaaggagagcagaaagccaagagagagaataaaaccacatctgtttcaaaagctttgagtgacacaacagttgtaacaaatggttcaactgaactagttgtgcaggaaaaagtgaaaagagcatctgtttattttcctcttatgcagaattgcttggaaattaagccaggctcctctagtaaaggagagctggaagttggaagtacagtagaagtcagagtgtcttatgttgaaaaccctggctatttctggtgtcagctgaccaggaacatacaaggacttaaaactctaatgtctgatattcagtactattgcaaaaatacagctgctcctcaccagagaaacacccttgcttgtttggctaagcgaacagtaaacagacagtggtccagagcacttattagtgggatacaagtctgtggaagcatgtcaatgtaacatttgtagattatggagacaagagaaatggtatctgtgaagaatatttattcaattagtgaagaatttctgaaggttaaggcacaggcttttaggtgcagtctttataatttaattcaaccagttggccagaatccctttgtttgggatgtaaaggcaatacaagctttcaatgaatttatagataatgcatggcaaaaaaatctagaattaaaatgtacaatatttgctctggcttcaattaatgaagaactgtttaacattgtggatttgctaaccccctttcagagtgcatgccatttcttggtagaaaagagacttgcaagaccagtaaaacttcagaagcctttggagtcctctgttcagctacattcctacttctattctacacatgatattctattcacattcttagcccaatttttgatgggattgtttgtttttttcttgctaatttgtttgggttatttgtag

SEQ ID NO: 122896 - DNA, 2904 bp, Homo sapiens
atgggtccagtgatgtccctccaatttgtagaagagaaaactgcaggtgaagaagttaagtgtcttatgtatctcacaacaaatgaggtgactgatttttatcaaggcgaggacagaatggatgcagggctgtgggtaggccacctcttcatgctggcatcgtcatcaaaaggcagcgtgcgcatgactcctgggggctccaggatcagaaaacatggaccatgtaaagtggcccatgctatctctactgacgaaggaaacccttgcacaaaccaggaagcgtggagaagacaggagacagagggatccaccaggaagggcggaaatgcagcttcaacaccctcccctcaggtcaatttgaaattctggattcggcatctactgacccaagggagtgcacgtggcatcctgtgtgcagcaccttcggacccagctgtggtagaacctggcacagccagtgggccctgtcacggtggcctggaggagccccagaggacagcgacaggaaccaggaccctggcagggtttattttccagtttctgggtaaagaggaaagaactgagactaggaatagaacctggaaaccagctgcacatgcagggtggaaatggaaccggcattctctgcgggcagatcattatgctgcggcagcacttcgctttctgccttgctttgagtgttacaagcacagcgtcccagacgttggtgcggctgatggtgggggggccatcacagactctgatcagatgcacaggacttggggtttcgaggacattctctggggagcttcctgcactctattgcgcacagaaactaccgtggatcttgttacaaggcagcttttgttttgggtctctgctgggagtagtgagggtgtagacagaatgaatgaactaagtcacttccgagctttctggctacacattgcgcacccagcaatgtgggtgacgggtcttgacatgggcacatgtgccgagcttaaggaagaggccttggatggtgaaacggaaaatgaaatgagcacttttctattttaccggatcacacatgcagggacagtcgccttcgctcctctcctcagtggtttcctgcactgtgaatctctgctcacttttcttttgccttttatgctccagttagcacctcctcattcttgcgttttctggaacaaggagcaccggtgtcttacaaggtctctgtggtccgccttgcacggaagcactggcagtcaggaagcagtggctgtcgcagcacctgccactcaagaagctgatggtgaaaagcaaaacaagggggtccagatgctgcccgaccccagcactcagccacaggaggggtgtcctcagcctgccttctatgttctagcttcgtccaactggctgcttagtatgattagacctcaaaatgctaaggattctactgctaatggtatgcagaacactgagaatccttggtatgaatggttcagagagttacacaaaataaatgcatttgacactcctgattcattgctcgtgagaggcaaggagtttgttgactctatacataacacctttgaccatatgtggagaacccaggaacataatgaagctggttggttcctcctaagttcactggacaaagtgatgaaagaaaatgatgaactcagagattctaactcctgccttcagaagcagatactgagcctcaaatctaagattgccctgagtcagagtcttatttcctgtagagaaagagctgacattgtggcaaatcaaacagaagctcttatcattgccagatgtgtaattatcagagatatacttagcagctggcagaacccccatgttggctccatgactgggagggtgagggctgctatgatgggaaaggccaaatggaagccattagagctgcctttacttagaaaaatagtaaataaaaaacaatatcatatccctggaggaactgtggagattagtgccaccatcaaagacttgaaagacccaggggtggtgatttccactacatccccattcaactctcctatttggcctgtgcagaagacagctgctgtaccagatatggtttcattgcttgagcaaatgaactcatctcctggtacctggtatgcagccattgacttggcaaatgcctttttctccattcctgtccataagccccaccagaagcaatttgccttcagctgccactcctgtcatcgcccaatgggccctgaacaaagtggccacggtggcagggatggaggttacacatgggctcagcaacatggacttgcattcaccaatactgatctggctacggtcaatgccaagattgggtttgcctatcctgtgtgcgatgcttctgccaagactaccatccgtggactcttggaatgccttatccgctgtgatggtattccacacagcattgcctctgaccaagccaggattcacaggtccaggaatcaagaggtggaagtggaagtggcaccactcaccatcacccctagtgatcccctagcaaaatttttgctttctgttcccgtgacattacgttctgctggcctagaggtcttagttccaggggaaggaatgctgccaccagggaacacaaggacaattccattaaactggaagttaagattgccacctggacactttgggctcctcctaactttaagtcaagaggctaagaacggagttacagtgttggctggggtgattgacctggactatcaagatgaaatcagtctactactccacaatgggggtaagaaagagtatgcaaggaatacaggagatccattagggcgtctcctagtattaccatgccctgtgattaagatcaatgggaaactacaacagcccaatccaggcgggactacaaatggctcagacccttcaggaatgaaggtttag

SEQ ID NO: 122897 - DNA, 588 bp, Homo sapiens
attgggtttgcctatcctgtgtgcgatgcttctgccaagactaccatccgtggactcttggaatgccttatccgctgtgatggtattccacacagcattgcctctgaccaagccaggattcacaggtccaggaatcaagaggtggaagtggaagtggcaccactcaccatcacccctagtgatcccctagcaaaatttttgctttctgttcccgtgacattacgttctgctggcctagaggtcttagttccaggggaaggaatgctgccaccagggaacacaaggacaattccattaaactggaagttaagattgccacctggacactttgggctcctcctaactttaagtcaagaggctaagaacggagttacagtgttggctggggtgattgacctggactatcaagatgaaatcagtctactactccacaatgggggtaagaaagagtatgcaaggaatacaggagatccattagggcgtctcctagtattaccatgccctgtgattaagatcaatgggaaactacaacagcccaatccaggcgggactacaaatggctcagacccttcaggaatgaaggtttag

SEQ ID NO: 122898 - DNA, 1699 bp, Homo sapiens
atggacaaatatttcatgattaaaacaccaaaagcaatggcaacaaataccacaattgacaaatgggatctaattaaactaaagaacttctgcacagccaaagaaaccatgatcagagtgaacagacaacctatagaatgcaagaaaatgtttgcaatttatccatctgacaaagtgatactgctgtttaaaatggcccccaagcgtaatgctgaagggctgtctactgtttctacatgcaagaaggctgcaatgtgccttatagagaaaggatgtgagttagtgggtccagtgggtccccagactcatcctgtggtcacttccccagtgtcagaatgcataattggcatagacatacttagtggctggcagaacccccacattggctctctgactggtagggtgaaggctattatggtggcaaaggacaaattgaagccattagagctgcctctacctggaaagatagtaaatcaaaaacaacattgtatccctggatggattgtggagattagtgctaccatcaaggacttgaaagatgcagtgatagggattcccactctacccccattcaactctcctatttggcctgtgcagaagacaaatggatcttggagaatgacagtggattatcataagcttaaccaagtggtgactccaattgcagctgctgtaccagatgtggtttcatggcttgagcaaatcaacacatctcctggtacctgcctgcactggtggcctcatggggagttcccaagattagttgacagagaagagaggactaggacctggttcacagatggttctgcacaatatgcaggcactacccaaaaatggacacctgcagcattacagcctctttctaggacatccctgaaggagagtgaatgtttcatccaccatcatggtattccacacagcattgcatctgaccaaggcactcactttatggctaaaaaagtgcggcagtgggctcatgctcatgaaattcactggtcttaccatgttcctcattatcctgaagcagctggattgatagaaaagtggaatggcattttgaagccacaattacaatgccaacttggtgataatactttgcagggctgggacaaagttctccagaaggccttgtatgctgctgaatcaacattcagtatatggtactatttctcccatagccaggattcacagatccaggaataatcaagaggtggaagtggaagtgacaccactcatcatcacccctactgatccactagcaaaatttttgcttcctgttccttcaacattacattctttggacctagaggtcttagttccagagggaggaatgctgccaccaggacacacagcaatgattccattaaactggaagttaaggttgccacctggacactttgggctcctcctacctttaagtcaacaggctaagaagggagttatagtgttggctggggtgattgacctggactatcaaaatgaaatcagcctactactccacaatggaggtaaggaagagtatgcattaaatataggagatccattagggcatctcttagtattaccatgccctgtgattaatgtcaacgggaaactacaacagcccaatccaggcagaattacaaatggtgaggacccttcaggaatgaaggtttgcgtcactccaccaggaacaacaacaacaacaaaaaagccatga

SEQ ID NO: 122899 - DNA, 1330 bp, Homo sapiens
atgtggaagcaactttggaactcggtaacaggcagaggttggaatagtttgaagcgctcagaaaaagacaggaaaatgtgggaaagtttggaactccctagagatttgttgaatggctttgcccaaaatgctgatagtgatacggacaatagaatccaggctgaggtggtatcagatggagatgaggaacttgttgggaactggagtaaaggtgactcttcctatgttttagcaaaaagactggaggcattttgcccctgccttagggatttatggaactttgaacttgagaaagatgatttagggtatctggtggaagaaatttctaagcagcaaagcattcaaaatgtgtcttgggtgctgttaaaggccttcagttttataaggaaagcagagcataaaagtttggaaaatttgcagcctgataatgtgatagaaaagaaaatcctattttctgaggagaaatttaagctggctgcaaaaatttggataagtaatgaggagctgaatattaatccccaagacaatggggaaaatgtctgcagggcatgtcagaggtcttcacagcagctcctcctgtcacagacctggaggcctagaaggaaaaaatggtttcatggtctgggcccaaggcccccttgctctgtgcagcctaaggacttggtgccttgcgtcccagccactccagccatggctaaaaggggccaaggtacagtttgagccattgcttcagagagtgcaagccccaaggcttggcagcttccatgtggtgctgagccgcaatttgcagccctgcctggattgggtaattataaattcccactgaccttaatcacagggtatggtagtaataagagccccccctagggatatcttgtattccagacatactcgtccttacctctattgagattgccacctggacactttgggttcctcctacctttaagtcaacaggctaagaagggagttacagtgttggctggggtgattgacccagactatcaagatgaaatcagtctaccactccacaacagaggtaaggaagagtatgcatggaatacaggagatccattagggcatctcttagtattaccatgccctgtgatcactccagatggttcagcccaattggcactaccagtggttcccatgggacaggatcagagtgggcttcccatggagattctcagactaatggggaaatcaaatgccaacctccagttctctcctccaacttccaataaagtggatctgtaaaaattctctgtgagtggcattatgacagcttaaaaggagatggtggagcagtctgaaataattgttcctc

SEQ ID NO: 122900 - DNA, 289 bp, Homo sapiens
ctggaacctccgctgcttacaggggcgcgtgaatcctgtggagtacagcatcgtgatggaatttctcgaccctggtggcccaatgatgaagttggtttataagcttcaagctgaagactataagttcgactttcctgtctcctacttgcctggtcctgtgaaggcgtccatccaggagtgcatcctccctgacagtcctctgtaccacaacaaggtccagttcacccctactgggggccttggtctgaacttggccctgaatccgttcgagtattacatattcttcttt

SEQ ID NO: 122901 - DNA, 1158 bp, Homo sapiens
atggccaagggcacagtctggcgggccatagccctgtgccacccaccgcgggtgtgcagcggtgcagaagcagatgcgtctgtctcagcgagttctccccaggagtcgttcatgcccaccaaggggcacatgctggtggtgcgcctgccactgaagcacctgcacgcctttgccgacagcctgaagccagagcaggtcctggaggtgtggctgagctacctgcagccatggtggtatgcagctgacaagcaggctgccagcagcaactcccagccccaatacctcggaggcatcctgaaaacctgtgggcagcaaccaggttctctgtgcccccggaagtgggcgctaggttcgtctcctgccttccagttcgagcagctgttcccggagccggagctcgtcatccccctaccgccagcaccgactcttcacagcctgcacattcgccagcagcatcctgtcatagtggccaccagtgagtcacatctatggcctggagggccaggactgcaagtacacccgatgttcgggcccgaggcttacaccctggtcctgcaccttactcagctcatcacgcaggccaagcacacggccaggtccatctcggaccagtgtgtggagactccagctggccactccttcctgttgtggctgggctttggccccacagacaccaacggctcctattcagccatgacctgggcgagatggggcaggacagcgtccagaagatggacgagtgcctggaggaggccctggagtacctgcgccagatattccgagtatgagcaatggggcctgttccacggccagcccacgctggccagcggccacaggctcaacctgcacttcctaggcagctacctgacactgccctggctactgctggctttcttcatggcctctctgttctgcatcaggcccctcacctgtgcactgctgttcaccctgggctacgccctctactccttggccatgatgttgctgaccaggtggggaagctgcaccagccctgatggcattggaggtgggaggccactccagtgccgccggtctgtgggtgtccagatcgaccagcagaggcagatcctggacttggacctgggcctgcagttcctacagcagcagtacttggagttgctggccaagctccactag

SEQ ID NO: 122902 - DNA, 2523 bp, Homo sapiens
atggcttacatgcgaagagtgaagctgtgtgggcctgagaccaagaaaagagcgcttggacttgcttttgggaccagctctgatgaacctgtgtacactgagttgcaagtgatggacaatagctcagaccaacagtccacaggagctgcacgccatctccccatggctggtagcattttcggcagcctggatggtgtccttgtgggctggaacctgcgctgcttacagaggcgcgtgaatcctgtgaagtacagcatggtgatggaatttctcgaccctgggaaggtacctgtcatggttcctgcccaccaaaggcagcctgccaccaccctcactgtcctccagcccaggatgggccagtccctcacctgctcccaggaggctgcatacaggcccgtttctgcagatgctggcccaccccagatctgctggcatgtgcaagccagcacatgccaccacaccaggaagacaccagccatgccctttgcttcctgtagcctccagcacactagccccctgaagcgacacttctctcatcagatgtctgtgaatgcagaccccgcctcccaggagatctggaggtcagaaactctgctccgggtgagagctgagctggtctcaacgtctgtttcaaaagaaactggtttttgtcgaaatgtggcttcaacactattctctggagatgtaccaaaaaatgcagttcccctcatgccaaggcagcatgccctgggcacacatcctgtagtccggtgcccgtggcgtctatgcatgggagactttgcctttattgctgacaaagttccagaaggcttcatccagaatgaaggatctgtgggtgatggagttaaacttcagaagagcctcctgtcacttttcctccggttctggagaagagctctggaggtgctgcactaccgactctgtgtctccagtgcccaccacagcccccggcagcccaacctccaggccctccacacctaccaaggcccagtgctaaggaaggagctgaagacacagaggcctgggacttacggtaatgtgggtgctgccctgttcagaactgtcatccagcttggaggttccatgacccagactgtgtgcacaaatgacaagcgtatggatggatttgaggtcagtgaagcagagttcaggcccatgggggatttcggggacgacagagttagagccactggagaagagggacatgagggcttgggccagggcagtgtccaggaagcatctagcaacccccatggcaggacaggtgaccagggagaccctggaggagagtcgttcatgcccaccaaggggcacatgctggtggtgcgcctgccactgaagcacctgcacgcctttgccgacagcctgaagccagagcaggtctcacctttcgtccactcccacaccaccagcccgctgggggagttcaaacaggccaccttactgtgcaagcggctggtgaccctcccctcctctgcaggccgctgtcccgaggtcctggaggtgtggctgagctacctgcagccatggtggtatgcagctgacaagcaggctgccagcagcaactcccagccccaatacctcggaggcatcctgaaaacctgtgggcagcaaccaggttctctgtgcccccggaagtgggcgctaggttcgtctcctgccttccagttcgagcagctgttcccggagccggagctcgtcatccccctaccgccagcaccgactcttcacagcctgcacattcgccagcagcatcctgtcatagtggccaccagtgagtcacatctatggcctggagggccaggactgcaagtacacccgatgttcgggcccgaggcttacaccctggtcctgcaccttactcagctcatcacgcaggccaagcacacggccaggtccatctcggaccagtgtgtggagactccagctggccactccttcctgttgtggctgggctttggccccacagacaccaacggctcctattcagccatgacctgggcgagatggggcaggacagcgtccagaagatggacgagtgcctggaggaggccctggcgtacctgcgccagatattccgagtatgagcaatggggcctgttccacggccagcccacgctggccagcggccacaggctcaacctgcacttcctaggcagctacctgacactgccctggctactgctggctttcttcatggcctctctgttctgcatcaggcccctcacctgtgcactgctgttcaccctgggctacgccctctactccttggccatgatgttgctgaccaggatgccctcaactttttgccactggaccacacttccctgctgtgaacaggccaaatctagatgcttctcagacctcatggcctggagcctctggcagcacagcttcaggctctccagacaccacccctgctccctgcacctccacatccccctccttgcaccaggcaacgctattcccctggaacccatttgtggcccactctcttccatgaccaacacatcctatctctag

SEQ ID NO: 122903 - DNA, 375 bp, Homo sapiens
agtgtggtccagaacaagagaaggctctgcaacaggcgcaggctgctgtgcaagctgctgtgccacttgagcgatatgacccagcagatccaatggttcttgaggctgacctggctatggccactgctgagtgcccaatttgccagcagcggagaccaacactgagccctccatatggcaccgttccttggggtggtcagccagctacctggtggcaagttgattatattggatatcttccatcatggaaagggcagagttttgttctcactggaatagacacttactccggatatgggtttgcctatcctgcacataatgctattgccaagactaccatctgtgaactcacaaaatgccttatccaccgtcatg

SEQ ID NO: 122904 - DNA, 301 bp, Homo sapiens
gagacttccagccttttaccagggtaactgtgcattggggaaaaggaaatgatcagacatttaggggactactggacactggctctgagctgacattgattccaggggatccaaaacatcattatggtcctccagttaaagtagggggcttatggagctcagctgctgtagcagatgtggtttcattgcttgagcaaattaacacatctcctggtacctggtatgcagccattgacttggcaaatgcctttttctctattcctgtccataaagcccaccagaagcaatttgccttcagctg

SEQ ID NO: 122905 - DNA, 376 bp, Homo sapiens
acctctggccttttaccagggtaactgtgcactggggaaagggaaatgatcagacatttcagggactacaggatactggctctgagctgatgctgattccaggggacccaaaacgtcactgtagtcctccagttaaagtagggtcttatggaggtcaggtaattaatggagttttagctcaggtgcgacttacagtggctgctgtatcagatgtggtttcactgcttgagcaaattaacatatctcctggtacctggtatgcagccatagacgtggcaaatgcctttttctccattcctgtccatatggcccatctgaagcaatttgccttcagctggcaaggccagcaatatacatttactgtcctgcctcagag

SEQ ID NO: 122906 - DNA, 607 bp, Homo sapiens
atggtaaatcaaaaacgatatcacatccctggagggactgcagagattagtggcaccatcaagaagttgaaaaatgcaggggtggtgattcccactacatccccactcaactctcccatttggcctgtgcagaagacagatggatcttggagaatgaccatggattatcataagcttaaccaagtggtgactccaattgcagttgctgtaccatatgtggttgcattgcttgagcaaattaacacattttcttgtacctggtatgcagccatcgacttggcaaatacctttttctccttttctgttcataaggcccaaagaagtaatttgccttcagcaggcaaggccagcaatatacctttactgtccacccttagtgataactactctccttttgagagacagctcttggcctgttactgggcttcggtggaaactgaacatttgactatgggttatcaagtcaccatacaacttgaactgcctatcatgaactgggtgctttctgacccatctagccataaactgggtcatgcaaagcagcattccatcatcaaatggaagtggtatatacgtgatcgggctcgagcaggtcctgaaggcacag

SEQ ID NO: 122907 - DNA, 319 bp, Homo sapiens
ggagacctccagccttttgccagggtaactgtgcactggggaaagggaaataatcagacatttgagggactactggacacttgctctgagctgacgttgatttctggggacccaaaacgtcattgtggtcctccagctaaagtaggggcttatggaggtcaggggtatatcaactctccagctttgtgtcataatcttattcagagagaacttgatcgcttttcgcttccacaagatatcacactggtccattacactgatgacattatgctgattggatccagtgagcaagaagtagcaaaacacactgaacttattg

SEQ ID NO: 122908 - DNA, 1074 bp, Homo sapiens
atgactaaaacaccaaaagcaatgacaacagaagccaaaattgacaaatgggatctaattaaactaaagagcttctgcacagcaaaagaaactatcgtcaaagtgaacaagcaacctacagaatgggagaaaatttttacaatctacccatctgacaaagggctaatatccagaatccacaaagaacttaaacaaatttacaagaaaaaatcaaacaaccccatcaaaaagtgggcaaaggatatgaacagacacttctcacaagaagacatttatgcagccaaaagacacatgaaaagatgctcatcatcactggccatcagagaaatgcaaatcaaaaccacaatgagataccatctcacaccagttagaatggcaatcattaaaaagtcaggaaacaacaggatgcagggggaggaacatggcttcattcctgctctgagtcatcgtcactgttcccacatccacttggtgatgagggacacacatctcagctgtgaagctcacagaactcactcaagagccacagatctatttcgaacgcatttggagagttggtgtgtgcaatccgaacacttgcagcctgcagacaacctactgtgggaccttgtgagcatggtaactgtgcactggggaaaaggaaatgatcagacatttcagggactactggacactggctctgagctgactttgattccaggggacccaaaacgtcactgtggtcctccagttaaagtaggggcttatggaggtcaggtaattaatggagttttagctcaggtgcaacttacagtgggtccaaagacagatggatcttggagaatggcagtggattatcataagcttcaccaagtggtgactccaactgtggctgctgtaccagatgtggtttcattgcttgagcaaattaacacatctcttggtacctggtatgcagccattgatttggcaaatgcctttttctccattcttgtctataaggcccaccagaagcaatttgccttcagctggcaaggacagcaatatgcctttacaatcctacctcaggggtatatcagttatctggctttgtga

SEQ ID NO: 122909 - DNA, 862 bp, Homo sapiens
atggtaagactagtgaattccatgaacatgagcccactgccacacttctttagccataaagtgagtgccttggtcagaggcaatgctgtgtggaataccatgacagtggataaggcattctgtgagtccactgatgatagtcttggcagaagcattgcatacaggataggcaaacacatatccagagtaagtgtctattccagtgaggacaaacctctgccctttcagaagaggtccaatacaatcaacctgctaccaggtagttggctgatcaccctgaggaatgtggctatactgagggctcagtgtcagtctctgctgctggcaaattgggcactcgacagtggctgcagccaggtctgccttgtagccctcaccctaccattcagggagccaatggtgggggtcctgccagctgctaagtatgtctatgccagttatgcatcctggcactgggaaaatgaccacaagatgagtccagggacccactggacccactgtagtgcagggtttatctcctcagacaaaggtggaatggctgatggcagcatgggtcaagaaggagatattgccactactggggatggtgaagctgtttgttctggcaaaaaagcttcaccagagtttacaagctcagtgtccccagcttcatcagggtcctcccacacatccccattcaaagttgtagggtcccattcttttccagtcaatgccctcacattaatagtagacacctgctttgcagctttgctaactgctgttaggctttcttctctaaaggctaaacagaaactagccctttcaaataatgccaccactgttatcaaccaactgcctgacactgcccctccttttttgcctg

SEQ ID NO: 122910 - DNA, 1488 bp, Homo sapiens
atgggccgggcgaggcggctcacgcctgtaatcccggcactttgggagaccgaggcggacggatcacgagctctaacagtggaaaccacagtcactcaactacaacatttaaatacagtgggaataattggattccgaggtggcaggggccaagtggcagcagtcaactgtcaaaagcgagatatccagccttttaccagggtaactgtgcattggggaaagagaaatgatcagacatttcaagcactagtggacactggccttgagctgacattgattcccggggacccaaaacatcattgtgatcctccagttaaagtaggggcttatggacatcaggtaattaatggagttttagctcagattcaaattacagtaggtccagtgggtccctggactcaccctgtggtcattttcacagtgcctaaatgcataattgacatagacatacttaggtggcagaactcccacactggctccctgactggtaggatgaaggctattatggtgggaagggccaaatggaagccgttagagctgcctctgcctagaaaaacagtaaaccagaaaccatatcacacccctgtagggactgcagaaattagtgccaccatgaaggacttgaaagatgcaggggtggtgattccaaccacaaccctgttcaactctcctatttggtctgtgcagaagacaggtggatcttggagaatgacagtggattattgtatgcttaaccaagttgtgtctgcagttgaagctattgtactagatgtggtttcattgcttgagcaaattaacacatctcctgccatagagtgggtcatgcacagcagcattccatcatcaaatggaagtggtacatacatgatcgggctcaagcaggtcctaaaggcacaacctgcaccaatggcctcatggggagtttcctatgatcagtggacagaggaagagaagactacggcctggttcacagacggttcttcacgatatgctagcaccacccgaaactggacagctgcagcactacagtccctttctaggatatccctgaaggacagctgtgaagggaaatcttcccaccacccgtgtcatggaggcaaggatggaggttatgcatgggctcagcaacatggactttcactcaccaaggttgacctggctatggccactgctgagtgcccaatttgccagcagcagagaccaacactgagccctcgatatggcaccattcctcagggtgatcagccagctacctggtggcaggttgattatatgggacctcttccatcatggaaagggcagaggtttgtcctcactggaatagacacttattctgaatatgggttgtttgcctgtcttgtactctatgcttctgctaagactaccatccatggactctcgaaatgccttatccaccatcaccgtattctacaaagctttgctgctgtccaaggcacttactttatggctaaagaagtgcagcagtag

SEQ ID NO: 122911 - DNA, 1059 bp, Homo sapiens
atgtcttctgtgttgctccggctcatttatcaactgacccaaaagactgccagttttgaggggggtccagaacagaaggctctgcaacaaatccaggctgctgtgcaagctgctctgccacttgggccatatgacccagcaaatccaatggtgcttgaggtgtcagtggcagatagggatactgtttggagcctttggcaggtccccataggtgaatcacaacagagatctctaggattttggagcaaggttctgccatattctgcagataactactttccttttgagagacagctcttggcctgttactgggctttgttggaaactgaccgtttgactgtgggtcatcaagtcaccttgcaacctgaactgcctatcatgaactgggtactttctgacccatctagccataaagtgggtcatgtacaccagcattccatcatcaaatggaagtggtatatacgtgatcagactcgagcaggtcctgaaggcacaaccacccctgtcatcacccaatggatgcccatgaacaaagtggccttagtggcagggatggagaaagggcagaggtttgtactcactggagtagatacttactctggatattggtttgcctatcctgcacacaatgcttctgccaagactagcatctatggattcacagaatgccttatccattgtcatggtattccacacagcattgcctctgaccaaggcactctctttacggctaaagaagtgtggcagtgggctcatgctcatggaattcactggtcttaccatattccccatcatcctatagcagctggattgatagaatggtggaatggccttttgaagtcacaattacaatgccaactaggtgacaatactttgcagggctggggcaaagatctccagaaggccatgtattctctgaatcagcgtctgatatatagtactgtttctcccatatccaggattcatgggtccaggaatcaaagggtggaagtggaagtggcaccactcaccatcacccttagtgatccactagcaaaatttttcttcctgttgccatga

SEQ ID NO: 122912 - DNA, 3348 bp, Homo sapiens
ttaacttgtttctcctcctccacagaactctggcagttcatcagtgtcgcaggcatatgggaaggactcctgttttaaaggcctaagaggacccatgtcctgtttttcaatattaacaccaaatactgtttcaagctgagcagaactgccaaaaacaacaacaaataagatctcagatagtactctgtttttcttcaccaaactagagaagacactagcaggatgttcctggaatgtccttctgttcgttagtgtgggagcagatgagagataacttctttcctcaggacacacaacatgtcgtagtagttgtagtcctgatgttccacccccatcagtactcccagcaatgctctcgtcttcctgcagaggttctgccagtgcctcaagaatgtcctcagagttctgtccattcttcttctgctcagacgttttgtctgaaagtattttcccaggccagagctggactctctctctcctagaatcaacatcaattccctcaacagtcttttgctggagaattccaggtaatgtgctcaggtctttgacaaggatggcagggccatcctgctgattggtccattttacagagagccgattggtctgttttacagagagccgattgctccgttttgacagggtgctgattggtgcgtttacaatccctgagctacacacaaaagttctttccccacgtccccactagattagctagatacagagtgtcgattggtgcattcacaaactctgagccagacacagggtgctgattggtgtgtttacaaaccttgagcagactctcgagcccagctggcttcacccagtggatttcgcactggtgctgcaggtggagctgcttgcccttcccgcgccatgcgccggcacttttcagtccttgggagatcgatggaattggctgccctgaatcagggggctgcgctcgtcggggaaactcgcgtcgcgcaggagcccacggcggtggggggtggtggggagactcaccgtcggccggcactgctgggggacctggcgcaccctccgcagctgctggcttgggtgctaagcccctcactctgttatgtagtagtagactgatttcatcttgacagtccaggtcaatcaccccagtcaacactgtaactcctttcttagcctgttgacttaaaggtaggagaagcctaaagtgtccaggtggcaatctcaacttccagtttaatggaatcattgttgtgtctcctgacggcagccttcctccctctggaactaagacctctaggcaagcaggacgtaatgtcatggcaacaggaagcaaaaattttgctagtagatcactaagggtgatggtgagtggtgccacttccacttccaccctttgattcctggacccatgaatcctggatatgggagaaacagtactatatatcagacgctgattcagagaatacatggccttctggagatctctgccccagccctgcaaagtattgtcacctagttggcattgtaattgtgacttcaaaaggccattccaccattctatcaatccagctgctataggatgatggggaatatggtaagaccagtgaattccatgagcatgagcccactgccacacttctttagctgtaaagagagtgccttggtcagaggcaatgctgtgtggaataccatgacaatggataaggcattctgtgaatccatagatgctagtcttggcagaagcattgtgtgcaggataggcaaaccaatatccagagtaagtatctactccagtgagtacaaacctctgccctttctgccaccaggtagctggctgatcaccccgaggaatgatgctatatctagggctcagtgttggtctctgctgctggcaaattgggcactcagcagtggccatagccaggtcagccttggtgagtggaagtccatgttgctgagcccatgcgtaacctccatccctgccactaaggccactttgttcatgggtatccattgggtgatgacaggggtggcacttccatttgatgatggaatgctggtgtacatgacccactttatggctagatgggtcagaaagtacccagttcatgataggcagttcaggttgcaaggtgacttgatgacccacagtcaaacggtcagtttccaacaaagcccagtaacaggccaagagctgtctctcaaaaggaaagtagttatctgcagaatatggcagaaccttgctccaaaatcctagagatctccgttgtgattcacctatgggtgcccgccaaaggcgccaaacagcatccctatctgacactgacacctcaagcaccattgaatctgctgggtcatatggcccaagttgcaaagcagctagcacagcagcctggaccaataagtccagtgtgtttactacttcttgcttactggatccaataagcataatatcaccaatgtaacggactagtgtgatatcgtccagaagtgaaaagtgatcaagttctctccgaataagattatgagacaaagccggagagttgatatacctctgaggtaggacagtaaaggtatattcctggcttttccagctgaagacaaattgcttctggtgggccttatggacaggaatggagaaaaaggcatttgccaagtcaatgcctgcctgacctccaaaagcccctactttaactggaggaccacaatgatgttttgggtcccctggaatcaatgtctgctcacagccagtgtccagtagtccctgaaatgtctgatcatttccctttccccagtgacagttaccctggtaaaaggctggaggtctccttttgttgcaggtcagccacttgcaggataagagctgtgtctgttttcccacaatttcagctctttctctacaggagataagactctcactcagggtaatcttggcagatttgaggctcagtatctgcttctgaagccaggagacagaatccctaagttcatcatcttctttcatccttttgtccactgaagttaggagcaaccaaccagcttcattatgttcttgggttctccatatatggtcaaaggtattatgtatagagtcactaaacttcttgcctctcgtgagcagtgaattaggagtgtcaaatgcatttattttgcataactctctaaacagttcacaccaaggactatcagtgttctccatactattagaagtagagtccttagcattttggggtctaatcatattaagcagccaacttcagaaaccccaaaaccaacaaaagaactccatccttaatattctgttcctctagaaccactcccaataccaaaatctgtattagtcagggttcttcagttttgggacttgga

SEQ ID NO: 122913 - DNA, 469 bp, Homo sapiens
cacgaattcatgtccgtcccgagatcaccttgactgcggaaacactgcgcgaccctactgaattgacccgcacgacactttgttgtcgcactccaactttggttcttctgactgcccgtcgtcgagcaaaatgcgtcaggcgctggaactggtcagggaacgtgcaccagaactgatgattgatggtgaaatgcacggcgatgcagcgctggtggaagcgattcgcaacgaccgtatgccggacagctctttgaaaggttccgccaatattctggtgatgccgaacatggaagctgcccgcattagttacaacttactgcgtgtttccagctcggaaggtgtgactgtcggcccggtgctgatgggtgtggcgaaaccggttcacgtgttaacgccgatcgcatcggtgcgtcgtatcgtcaacatggtggcgctggccgtggtagaagcgcaaacccaaccgctgtaa

SEQ ID NO: 122914 - DNA, 1881 bp, Homo sapiens
atgtggcgcatgtttcattttcgcaccattgcggggcgctgtttttattatttcctgtctacactcagcttattgggacgcgaaatcgtgcgcaaaaagctggcacctactttggcttatacgaggatggggcacagacaggtaaccgacgtttcccaaacgtcctataacggatattttcgcctcacagggaagcattatgaaaaagatgatgatagccacactggctgccgccagcgtgctgcttgccgttgcaaatcaggcgctgctggcgcgacgcttgatgccgttcagaaaaaaggttttgtgcaatgcgggatcagtgatggattacctgggttctcttatgccgatgctgacggtaagttttcaggtattgatgttgatatttgtcgtggtgttgccgctgctgtatttggtgacgacacgaaagtgaaatataccccgctcactgcaaaagaacgcttcaccgctttacagtcaggggaggtggatttgctctcccgtaatacgacctggacttcatctcgcgatgccgggatgggaatggcatttaccggcgtcacttattacgacggcatgggcttcctgacgcacgataaaggggggctaaaaagcgcgaaagaacgggatgggcgctaccgtcggtattcaggcggccagatgctggatcgcaaagggatgaacctggcgtcgaacctgttccatatcgggattctggggatttttgtcggtcacttcttcggtatgctgacgccgcactggatgtatgaagcctggctgccgattgaagtgaaacagaaaatggcaatgtttgctggtggtgccagcggcgtgctgtgtctgattggcggcgtgctgttgctgaaacgtcgtctgttcagcccacgcgtgcgtgcaaccactaccggagcggatatcctgatcctgtcgctgctcgttatccagtgcgcgctgggcctgttgaccattccgttctccgctcagcatatggacggtagcgagatgatgaaactggttggctgggcgcagtcggtggtgaccttccacggtggcgcttctcaacacctcgatggtgtggcgtttatcttccgtctgcacctggtgctggggatgacgttattcctgctgttcccgttctcgcgtctgatacacatctggagcgtaccggtggagtatctgacaccgaattttagttcacatagaccctgcttcggcggggtttttttatatattctggtgatgccgaacatggaagctgcccgcattagttacaacttactgcgtgtttccagctcggaaggtgtgactgtcggcccggtgctgatgggtgtggcgaaaccggttcacgtgttaacgccgatcgcatcggtgcgtcgtatcgtcaacatggtggcgctggccgtggttcgggcactcaaagacgcaggcgtgaaagcaaatcgcatctttactgacaaggcatcgggcagttcaagcgatcggaaagggctggacttgctgaggatgaaggtggaggaaggtgacgtcatcttggtgaagaaacttgaccgccttgggcgcgatactgctgacatgatccagttaataaaagagtttgacgcccaaggtgtatccattcggtttattgatgacggaatcagtaccgatggggagatgggtaaaatggttgtcactattctatctgcagtggcccaggcagaacgacagagaatactagagcgtaccaatgaaggtcgccaagaggcaatggcaaaaggagtcgtattaggtagaacacgaacactagatagagatgcaggtattaactatgtggcaacaggggttaggtgcctcacatatatcaaaaacaatgaatatggctcgttcaacagtatataa

SEQ ID NO: 122915 - DNA, 1578 bp, Homo sapiens
tcatgccgaactatctgcgcttcgtgcgtggtctgattgactccagcgatctgccgctgaacgtttcccgtgaaatcctccaggacagcacggtaacgctgttacctgcgcaatgcgctgaccaagcgtgtgctgcaactgctggaaaaactggcgaaagacgacgcggaaaaataccagaccttctggcaacagtttggcctggtactgaaagaaggtccggcggaagatttcgctaaccaggaagcgatcgccaaactgctgcgttttgcttctacccataccgattcttctgcgcagaccgtatctctggaagactacgtttcccgcatgaaagaagggcaggagaaaatctactacatcaccgcagacagctatgcggcagcgaagagcagcccgcacctggaactgctgcgtaagaaaggcatcgaagttctgctgctttccgaccgcatcgatgagtggatgatgaactatctgactgagttcgacggtccaccgttccagtcggtgtctaaagttgacgagtcgcttgaaaacctggctgacgaagttgatgagagcgcgaaagacgcggagaaagcactgactccgttcatcgaccgtgtgaaagccctgctcggcgagcgcgtgaaagatgtccgtctgactcacgcgggatctggactcgtcggtgagaacgtataaataaccgtcgggtccagtgcgaacatcacgaattcgctgccctctgtccgttaaaatacggccatcttctgtcactttgtcgccgttgacgctcatcacaatgacatctttatctttcagcgcgccaataaataatttttgctgccactgggggaatttatcgctgttatagaaggccatgccgctcacagcgggcgaatctttccagtaaaaaacaggttgctcggtcccggcgacgatctcccctttcgcttccggtatcttaaagcctgaatagttgattccccaggttgccagcggccagccgtagtttttgccggattcctttataaaaggattatcatccgggatttcgccctggtcggtcagacgcaccagtttgccctgtaatttatccagatcctgcgccgtcgggcgctgattgttttcgcccagagcaataaaaagataacctttaccgtcgaataccagccgcccgccaaaatggttgccggtagacagttttggcatctggcgaaagacggtgcggaagtcggtcacttttgagagatcatcacttaagcggccataacccacagcagttccggctttgccatcatcgccaacttcggaataacttaaccagatgcggcgagactgagcaaaatcaggcgctaaaaccacgtccagcaggccgccctgcccgtgcgcccaaacgtccggaactccggaaagcggcgcagataatccttttcctgcttgccagtgacgcaactcgccgccgcgcagagtgattaacataccgtgattatcgggtaaaaaggccagtgcccagggatggtcgagtttgtcttgcagtacttcgacatttaccgttgcaggagccggccagagagcggcagaaagacacat

SEQ ID NO: 122916 - DNA, 508 bp, Homo sapiens
gctggaatttggtaaaaaactgggtaacgctgccgctgattattttattgccaataaaattgaccagccgaaaattgccgtcatcaattgcgaagcctttgaagtttgtgtgcagcgacgtaaaggatttgaagaagttttaaaatcccgcgttcccggcgcgcaaattgtcgctaatcaggaagggactgttttagataaagcgatttccgttggtgaaaaactaattatctccacgccggatctcaacgccattatgggggaatcgggcggtgcgacactcggcgcggtaaaagcggtacgtaatcaaaatcaggccggaaaaattgctgttttcggttcggatatgacaaccgaaattgctcaggagctggaaaacaatcaggtgctgaaagcggtagtggatatttccggtaagaaaatgggcaatgctgttttcgcgcaaacattgaaggttatcaataaacaagccgacggtgaaaaagtgattcaggtgcctatcgatcgg

SEQ ID NO: 122917 - DNA, 1401 bp, Homo sapiens
gctgcgcatccttcagcggatatttctgctgctcggcgacatcgaccttaatcacaccgctggcaatcaaagagaacagttcattactggcctcggttaattcctcccgcgtggtgatatagccttgcagggaagggcgtgtcacatacaacgagcctttttgattgagaatgcctaagttcacaccggtaaccgcacctgatgagttgccaaaactgaccattaagccgcggcgttgcaggcaatccagcgaccgttcccaggtgtctctgcccacggaatcgtacaccacgcgcactttcttaccgccggtgatctcttttaaccgctcgaccagatcctcttcacgatagttaataacctgccacgcgcccgcttttagcgcgctctgcgctttttgcgcggttccctgaacccccagccgtgttgaaggtaaccaggagtacccaagcttggtgtacatcccggtcccaggctccggtggaatatgtgaacccgcgatcataaacacggcctgaatctgtatgttcagcgtgtgttcatcatgaccgacgcagaacagttcatgccgaactatttgcgtttcgtgggtggtctgattgactccagcgatctgccgctgaacgtttcccgtgaaatcctccaggacagcacggtaacgcgtaacctgcgcaatgcgctgaccaagcgtgtgctgcaaatgctggaaaagctggcgaaagacgacgcggaaaaataccagaccttctggcaccagtttggccgcgggattatcatcttcaccgatagtcagttcaaccgttgaaccttttaacatgctcaacgcttcagccagtttttgctgtgcaccgcggttgttcaaatgccgctgagaggagcgcaaatgcagacatactgcgttgtcgctctcctctttccaggcatttaacgccacctgttcgaccagttttggtagcgaaagttggctcacctgtgccgcccacgggtcgcgctcaatggcttctgccgctagcttcgccgccagttccggcgttttttcatgttccagcgcttttttcagcgccttcggcgtggcgaccacttctttttgctgcatcaccggagtggtcgccttccagcgatacgcttcttttttggctggcgctttttccagcgccgatggcaccggacgcgcctgaacgcgatcggtgaccgaagccagtctttccagcgcagcgttattcaccggccgcgcgcgggtagcggctgccggttcactcttttttgctttggttgctccctgcacgcgctgcaactgctggcgcgccgccagcacctggctggtggtttccgggagcggtacagtcggtgcctgctgcggcgctgattgcggttgcggcggcacctgggttggcgtcatta

SEQ ID NO: 122918 - DNA, 1977 bp, Homo sapiens
tcatgccgaactatctgcgcttcgtgcgtggtctgattgactccagcgatctgccgctgaacgtttcccgtgaaatcctccaggacagcacggtaacgctgttacctgcgcaatgcgctgaccaagcgtgtgctgcaactgctggaaaaactggcgaaagacgacgcggaaaaataccagaccttctggcaacagtttggcctggtactgaaagaaggtccggcggaagatttcgctaaccaggaagcgatcgccaaactgctgcgttttgcttctacccataccgattcttctgcgcagaccgtatctctggaagactacgtttcccgcatgaaagaagggcaggagaaaatctactacatcaccgcagacagctatgcggcagcgaagagcagcccgcacctggaactgctgcgtaagaaaggcatcgaagttctgctgctttccgaccgcatcgatgagtggatgatgaactatctgactgagttcgacggtccaccgttccagtcggtgtctaaagttgacgagtcgcttgaaaacctggctgacgaagttgatgagagcgcgaaagacgcggagaaagcactgactccgttcatcgaccgtgtgaaagccctgctcggcgagcgcgtgaaagatgtccgtctgactcacgcgggatctggactcgtcggtgagaacgtataaataaccgtcgggtccagtgcgaacatcacgaattcgctgccctctgtccgttaaaatacggccatcttctgtcactttgtcgccgttgacgctcatcacaatgacatctttatctttcagcgcgccaataaataatttttgctgccactgggggaatttatcgctgttatagaaggccatgccgctcacagcgggcgaatctttccagtaaaaaacaggttgctcggtcccggcgacgatctcccctttcgcttccggtatcttaaagcctgaatagttgattccccaggttgccagcggccagccgtagtttttgcctttttgcgggatattaatttcatcaccaccgcgcgggccatgttcattcagccacagtgcattactccacggattcatcgccattccttgcggattacgaatgccataagaccagatctcggcgcgcgcaccggattcctttataaaaggattatcatccgggatttcgccctggtcggtcagacgcaccagtttgccctgtaatttatccagatcctgcgccgtccggcgctgattgtttttccccagaacaataaaaagataacctttaccgtcgaataccagccgcccgccaaaatggttgccggtagacagttttggcatctggcgaaagacggcgcggaagtcggtcacttttgagagatcatcacttaagcggccataacccacagcagttccggctttgccatcatcgccaacttcggaataacttaaccagatgcggcgagactgagcaaaatcaggcgcttaaaccacgtccagcaggccgccctgcccgtgcgcccaaacgtccggaactccggaaagcggcgcagataatccttttcctgcttgccagtgacgcaactcgccgccgcgcagagtgattaacataccgtgattatcgggtaaaaaggccagtgcccagggatggtcgagtttgtcttgcagtacttcgacatttaccgttgcaggagccgcccagagagcggaagaaagacaaataaggggcacaaggaaaaaggattgtcgatgcataacgcctccggattgactctggcttaaagcgtagtcagtggaggagataacaaattcatttttacaaaaacttaaacatgaagggggagacgctttctcccccttagttttcaggccttctcaagcatggcgtgcttctgcaggctctggatactcagcgtttaagctcatcagacaattttcaagcttatcggcgttgacggtaataacagtcgggcaatcatggtgcccact

SEQ ID NO: 122919 - DNA, 1060 bp, Homo sapiens
gccaaactgctgcgttttgcttctacccataccgattcttctgcgcagaccgtatctctggaagactacgtttcccgcatgaaagaagggcaggagaaaatctactacatcaccgcagacagctatgcggcagcgaagagccagcccgcacctggaactgctgcgtaagaaaggcatcgaagttctgctgctttccgaccgcatcgatgagtggatgatgaactatctgactgagttcgacggtaaaccgttccagccgggggctaaagttgacgagtcgcttgaaaaactggctgacgaagttgatgagagcgcgaaagaagcggagaaagcactgactccgttcatcgaccgtgtgaaagccctgctcggcgagcgcgtgaaagatgtccgtctgactcaccgtctgaccgatacgccagcgatcgtttcgaccgacgcggactaaatggacccctcggatggcgaacgtgtttcggtggggcgggccagaaagtgccagaagtgaaatacatcttcgaactgaacccggatcacgtactggtgaaacgtgccggccgatactcgaagaagaagcgaagttctgcgtgtggggtaagaactgcgtgctgggacccttctaaagggcgaccccgccgggcgagctcggcttgggcgtctcggccccccgggttcttacagcggcctgcggaaaggtcaagatccatctgggcggtagcccacagccgccatcggtcgtagtgagcgccgacggccggcaaccgctcagcccgcccccgcccggcttctgcatcgcgtcctgacaacgtggcggcctctcggtgctcgccgaccgcgcggtcctctcactcgtcccgcgcctctcgcgacagcttcgcacgctctgctgagaacgtcccgctgggcggcgccgatgagggcgagaccgtcgcgcgctcgctcgcctctcgactcgacgtgccctcgggtggtggcggtacatgtggagttctctgtgactgcgcgatgcgcggcagctcggctccagactgtcgctctcctcccgcagcttctgttcgct

SEQ ID NO: 122920 - DNA, 750 bp, Homo sapiens
gggcccgcccggggggtggggtgttaatggtttcccgggccccccattcttgtttcatcaaagaggtttttccgcccagaatttaggatatggcttttcaataaaaccctttgcataccagaaataaaataccctggaaaagtagcctgaatgtccagacactcccggcgaaaggaaaagaatctctgataaggcattgagataatggatattcttagtgaagaagaagtgagttactataaaaaatcgctcatatcccaggaaggaagcataaaaaaaggtgcgccaggagacgcaccagttgttgcaaaatcagcactgtggggcgtaattaccccttgccttttacactgctgataaaggtggaacgggcagatgtcgatcccaggcgttcagcttcatcaagcagttttaacgccttatcaacatcacctttcgcgacagcgtttttgatcgcggtattaaaataactttccgtgtcgttgagcatcggctcgcttttcttcaccggtgccggagcgggtgcagccacagctggtgccgccgtgttacctaccgtaaccggagctggagcggaagaaccaaataaaggtcctaccaacacgctggagctggagttcgttttcactttcagtttcagtaagccatcggtggtatgacgagcaaccggatcggggatatccgggatcgagttaccgacgcccttggcataggctttagccgggtcgagcagttgggtcgtctgctgga

SEQ ID NO: 122921 - DNA, 834 bp, Homo sapiens
atggcactgagaccctctcacatcagccagattcacccaatacttcttgggagtagtggagcaggggtcaccgtggtcattttacggatgaagaaactgagtctagaggttacagtgctggtctgctttgcctggctgtccatctccagtgccggctgggggcctcctggtccccaaggtgaggagcacattgctcagccagaatctccaccaggcgaaggccacatcaacttgaccctcagcactcgaaatgtgctcagtgctaatccattcttgaacgaacacatgaataaggacattctcaagctatttccccctgtatgtggagacctagctggccactcctgtttgaagaggtgcaggtacgggattaacaaggtaaccgcgaagaatccggggaatacacgcataaaagaaaaggatagcaccaccgtagcgaaaggggttctcagagatgctgggtatgcagcttacgctctgcccttctcatatagaagatctccccttcagtactacctggagcatggaagtgagctggaggagaatccattaagaaggcccctgccaatccagcaagagaacatgcttcatatagatgatagatacagattgttagaattggaagggccctcaatgatcatcaaatacaatgatgcatttccagatacatatgaagcaagagagcacagagcagcagacgatgacagcacgacgctaacagtgaagcgaagtagacgaatagagagaggacacgacactagcagcaagaggaagaacagaagcatagtcagctcggtaccagcttacatgacagtccgtgccatcaccgcatga

SEQ ID NO: 122922 - DNA, 1383 bp, Homo sapiens
atgcggattgtgttatctcagcagcaccaaaaagcaatgcttggtgggccgatcaagggaggcttaggatgggaccacgatcgcgaggaacacaactgctgcatatgcaaaaaggactcgggacttcgacgaatgcctgatgacggcgcctgcggacgacggatgacgcccaaagatggctggactggcagtgctagctggcacacagtcataagccttactcgcaatcctctgaagctctatgggcccgaatgtgatcctcattgccgcagacctcgaggtgacacattggtttttgagccccgtctacaactcgtatatttggtgttgcggacactttacgcggcgcgttgccggtggaattggctggacccgtcgttttcacgcgatttgcccaaaaactgcggtattcggggattacccgggaattggatatccggttcacacgacgttccggccgggtgcaatatccgccagaacgcagtttgtaactcgatgtaccggatggactgtgaagattacgttcaccgtattggtcgtacaggtcgcgcaggcgcaagcggtcactctatcagcctggcgtgtgaagagtatgcattgaatttgcctgctattgagacctatattggtcactcaattccggtggctggaagcatccagacgctgacgcgaataaaacgcaaagtgcgtctggctgctggcctgaatagcgaaaatgccctctccaatgaagcaatggagcgcggttggcaatgtttgcgcctgtttgctgaacgtctgacattagtcgatttatcaaaacgcagtaatttgagattgttctactattttagccgttttagccagacaatgatgtggatcgacacggttaacggtttgattatggtggactgcgccagtgccaaaaaagcggaagatacgctggcattactgcgtaaaagcctggggtcgttaccggttgtaccattgagcatggaaaacccgattgaactgacgctgaccgaatgggttcgctccggtagtgcggcacagggcttccagctgcttgatgaagccgagctgaaatcgttgctggaagatggcggcgtgatccgcgcgaagaaacaagatctgaccagcgaagagatcaccaatcacattgaagccggaaaagtggtgactaaactggcgctcgactggcagcagcgcattcagtttgtgatgtgcgacgatggttcgctcaagcgtctgaagttctgcgacgagctgcgcgatcaaaacgaagatatcgaccgtgaagatttcgcccagcgttttgatgccgatttcatcctgatgactggtgaactggcagcgttaattcaaaacctgattgaaggattaggtggcgaagcacaacgttaa

SEQ ID NO: 122923 - DNA, 5484 bp, Homo sapiens
ttaatgactttctttttcgcgtaaacgccaggcgtgtaataacggttcggtatagccgtttggctgtttcacgccgaggaagattaaatcgctggcagctttaaaagcacacgagttagcgaaattccccgccatcggacgataagccggatcgccagcgttttgctgatcaaccactttcgccatattctccagcgacgcctgcacctgttctttggtcagaataccgtgacgtaaccagttggcgatatgctggctggagatacgcagcgttgcgcggtcttccatcaacgccacattgtgaatatccggcacttttgaacaaccaatcccctgctccacccagcgcaccacgtaccccagaatcccctgcacgttgttatccagctcttgttggatctcttgcgccgaccagttagcgttttcagcaaccggaatagtcagcagatcgtccagcagcggttcaaattcagcattgaactcggtctgggcaatgttggcttgtacgctctgtacgttggtttggtggtagtgcagcgcatggagcgtagcagcggttggtgacggaacccaggctgtgtttgccccggcacgcagttggtcgcccttctggctgtacatgtctgccatcaggtccggcatgaaccacatgcctttaggtaccgagctgagtgatcccgtggggggggggggggggggggcggtcggtgggggctgcggtttctcgtcgtgggtggggcggtgtcgctgtggttgcgcgcgtggtgcgtgtggtgggggggggggcgggggggggggtgggggtggggggcgggtgcgtctgtgtgtcgtcgctcctgtggcgcgcgtcggcccccggggtcccgtgttggggggggtgggtggcgtgcggttctggttgtgtggagtactccacacagagatgggcggtgggtgtagcagggtggtatgctttgtgtagtgtccgggctgatgctgggcggtgttcatgcctgcgctgcggtttgtcatctggtgtcggtacgtgggtgttcggcgacaatgtttcgggaagcgtttacgcagcgcgtcgatcacatcagacgtgtcatccaccgacagcgtggtctgggtcataaaggagagcttctcttcgtttttgaccgtcagtttccacacatcgtccggcgattcgagccagatacattcccccttccgggttactgtactggcccattgtcccttccacttgccgggtgcccggcgtgaccgatgagaatagattcttcgccacggcgatctggcgcgggcgacttccatatgcactttggtcaccagcggacaggtggcatcaaacaccgtcaaatcgtaacttttggttcgttgtacgactaatagtatccaagccactatctccactgctgcttttactgcggtaacagatatatcgcctccatcaccgctgaagtaatgaagtaaggcagcaagcctcgccatgttctccgccattttagaagcataatccttaaaatcataaagaaggccaatcattctcatttctgactcgacctggttgtagaattcgatccaatgtctttctgcttctgcagagaatcggaggcagatgcgattattttcattaattttaatgatgctctcattaacaatttccataagacgttggtgaaataccggcaaatgttcatttgaaaaaattgggttggaaatttttctgttaccttgtgttgaagcaggctggcacatgaggcaccgtgcaaaaaatccaatcccctttgccatatctcctttcctgtcgatataacccttaaaaacattaggctggaccatcagcgacagtgttattcttgcatctctaattaatttctcgggctcgtttttcctttccaccgtaaatattgaaccatcccacatcttattgataaacggcagctcgttaagtgtgtaaccattaaaaatgatcccagcttcatcagacatgatgccgactgatcgccagtgcccacagagatgagctttaatagctgcaggtgtggcatcgttaaataaaaatttgaatctcactggagctttcgggtttgtcgtaagtagttctttaagtctttcatttgttgccaagtgatctttgttacgtcgaatatctgatttaagttttgacatcagtgcttttttttcaatattaaaaattgcttcatcatttctccatgcggtaagatcgtgggtgtatttttcaaataaatcctcttccagttgatataatggcttcatcagcagtttatcaaccgtactcttacgttcacctgagtcaggtagttggtgttggttggtggtgtgggttgttgttgtctggtatggtgtgtgggtgtgttgtgcgtgtgtgtggggcgtgtttgtgttgtgtgttgtgtttggcgatttagcgttaagtccggaaggttgaattctccgcggagtttgctgggggcaaaaatgtaagcgtgatttgagttccccgagccgtgggggcgcacgggcaggtaaaatccccatggttaaggtctgctgctgtctgaaggcatcggcgacacgctgcgcgtatcgctggcggccgatccggtcgaagagatcaaagtcggtttcgatattttgaaatcgctgcgtatccgttcgcgagggatcaacttcatcgcctgcccgacctgttcgcgtcaggaatttgatgttatcggtacggttaacgcgctggagcaacgcctggaagatatcatcactccgatggacgtttcgattatcggctgcgtggtgaatggcccaggtgaggcgctggtttctacactcggcgtcaccggcggcaacaagaaaagcggcctctatgaagatggcgtgcgcaaagaccgtctggacaacaacgatatgatcgaccagctggaagcacgcattcgtgcgaaagccagtcagctgcctggcgaaacggccatctggcagcgcattgaaggcacactgaaaaacgtgctcggcagctacggttacagtgaaatccgcttgccgattgtagagcagaccccgcttgaacagtgatgtacgatgattctccatgagcaaacactcgatagaggaccctaggcggtagtgcttgtgcgaggttgcaccgataaagcccagcgtcatcgggataccggccagagacagcatcatcaccgtcatcactgccgcgaggatcggacgatgccagaacagaccgcggtaagagaacagggaatcagcatccgggccacgatacgggctggacatcaggctgaccacgccgaacgcgccgaggctgctgaacagataaccggccaggtaaacccctaccgcttccatcgacatctcgccggtttgcagcgcaatcagcgctaccagcagatagccgaggtgagagatagatgagtaaccgagcagacgtttgatattggtctggctcagcgccatcaggttaccgaagatgatggaggcaaaggcgataatcgccagcaccacgcgaatcgcttcgctgtcacccaccggtgcgtagaggaacagacgcatcaccacaccgaagatagcgattttgctcgccgtcgccaggaaagtggaaaccggcgcaggcgcgccctggtatacgtctggcgtccacaggtggaacggcaccagagagagtttgaagccgaggccaacaatcatcaggccgaaacctgccagcaacagcggctcgttgagcataccgtcgccaaggtttttacccaacgcgacaaacgacaggtcgccagactgcgcatacaccagcgccataccaaacagcaggaaagaagacgctgcggcagaaaggatggtgtatttgatactggcttccagtgaacgtttctggcggaaagcgtaaccgaccaggccaaacagcggcaaagagatcagttcgataccgaggaacagagacgccagatggttggcattcgccagcaggatcccgcccagcgcggcaattaacaccaacaggtagaactcatccttgttgtcgttatagccttcaagccacgggtaggcgaaagtacaggtggcgaggctcgccaacaataccagcccggtgtaaagcatggcgaaaccatcaacgcgcatcagcggcgtaacgtccatagcgcccgcctggccaacaaaccagagcgaaaccagcgccgcgttaagcccaataaccgagagcgtagcgttgaggaaatgattgcgtcgccacgcaatggagagcatcacaaccaccaccgtcaagccgacgatcagcaacgtagcagtgcgatcagtttgtggacttttattctttgtttttttgttctgttttattttggtgttctgctgttttgtttgtgctgtctctttttctttgcttgtatttgtcttttgtctctgtttcttgggcgacggcgcgagggacgagagcgacgagagaggcagcaaagctctgggtctgatcccagcactcggaggttttcgtttgtcatatgctgtcccaaccccgtgccccgggtgccgggcgatatctgtacagcgcaaagccgcgaggcgctggaagtcgaggttgtgatacctggcaggcagatgcggtacgcgatacccgtaccctttcccggcggcgaaagtttcctcgttagtctggcgctggcgctggcgctttcggatctggtcagccataaaacacgtattgactcgctgttccttgatgaaggttttggcacgctggatagcgaaacgctggataccgcccttgatgcgctggatgccctgaacgccagtggcaaaaccatcggtgtgattagccacgtagaagcgatgaaagagcgtattccggtgcagatcaaagtgaaaaagatcaacggcctgggctacagcaaactggaaagtacgtttgcagtgaaataactgatgctcgccattggtcggctggtatccggctttccgcatggcacattttggggcaggaccaggcgctcgcaggggacgcctctctcggcacgaaggggtcctccgagaggtgtgttccaggactagcacgactgcctgggcgcggacccacttgaccctgggcgcccgggtcaggtggttgcgatccgggtcgttgctggcccggcactcgtaagtgcccgtgtcctcctccacgagcgtgtcgatggagatggtgctggccgcgtgctggtggtaggtggcgtggatgtggacgcggtccagccgggcgccgtcccagagctgggagcaggtgtcgttgggaccctgcccttcaaaccaccactggatctcgggcaccgggctgcccacggctcgcagtgcagctccacactgcccccaccactgaagccgctgtggggagagcacgcgtggggtcttgttagtgcctgggccgtgtttctctctttctctctgtgtgatcttgctgcttgttcgttcgtgttgtgtgttcttttttctttcttttgctgttgtgtctctgtttgttttttcgtctttcat

SEQ ID NO: 122924 - DNA, 887 bp, Homo sapiens
ggtgcgacccggagatcgcgaagactgtaaggacaccgtcgacgaccatttaaaaggggtcgaaaaagccgataacgcgggggaagtcaaagacgcgttaacgaagatgcgcgccgcagcgcgtggatgcgcaaaaagcaacgccgtctaatctcgaagataagtgaccggactgcccggaaatgaatgatttccgccacggtttcgacattctggtcggtcatattgacgacgcgctgaagctggcaaatgaaggtaaaggaaaataagcgcaggctgctgcatagcaactgaaaacgacccgcaattcatatcacaagaagtatcgttaattcctcatttccctgttgcctgcactcaggtaacagggaacttatcatcgcaaatgatgcaccacctgattgctgctgccgcgccagatcagggaaagggcctttaaattcttggccaaatttgccggcaaccaccacgttattcaaatcaacaacctgcatttgcgcagcgttgagttcggcgagtttatagcctgtccacacccagatgtctttacccggacactcggcgcggatgcgttgtaccagtttcagaatatccggcacgttttgcggatgcagcggatcgccgccggagagggaaataccctggcgtttgatacgagtgtcattcagatcgttaatgatctggtcttccattgctttggtaaatggctgaccggaatttacccgccatgtgcttttgttatagcaaccggggcattcatgaacacacccggagacaaacagggtgcaacgagtgccggggccgttgacgatgtcgacaggatagtactgatgataattcattatttcgcctggcttatcagtccgcgtgtaggctgcatccggtaa

SEQ ID NO: 122925 - DNA, 2673 bp, Homo sapiens
ttacccctgctgctccagcgcatacttatacagcgcatttttcttcacgccgtgaatttctgcggccagcgccgccgcttttttcagcggcagttctgcctgtagcagcgccagcgtgcgcagggcatcggcgggtaagtcttcttcctgtgctttatgaccttcgacaatcagcaccatttcgcctttgcgacggttttcatcttcctttacccacgccagcagctcgccaacgggcgcgccgtgaatggtttcccaggttttggtcagctcacgcgccagaaccacgtagcgggattcgcctaataccgcaacgatatcttccaggctatctaacagacggtgggtagattcataaaaaatcagcgtgcgcggctccgcttcaatggcttttagcgcatcacgccggccttttgatttggcaggtaaaaagccttcgtaacagaaacggtcagagggtaaacccgctgcgcttaacgcagtgatagcagcacacggcccgggtagcggcaccacgcggatccccgcttcacggcaggtacgcaccagatggtagccaggatcgttaattagcggcgttccggcatcggaaaccagcgcaatgttttgcccctcttgcagcttcgccagcagcgtttcagctttttgttgttcgttatggtcgtgcagcgcaaacaaccgggcattaatcccaaaatgttgcagcaataaaccggtgtgacgagtatcctcggcggcaatcagatcaacggcctgtaatacctctaacgcacgctgggtgatatccgccagattgccgattggcgtcggtacaatgtaaagctggcccattgttgcaaaatcagcactgtggggcgtaattaccgccttgccttttacactgctgataaaggtggaacgggcagatgtcgatcccaggcgttcagcttcatcaagcagttttaacgccttatcaacatcacctttcgcgacagcgtttttgatcgcggtattaaaataactttccgtgtcgttgagcatcggctcgcttttcttcaccggtgccggagcgggtgcagccacagctggtgccgccgtgttacctaccgtaaccggagctggagcggaagaaccaaataaaggtcctaccaacacgctggagctggagttcgttttcactttcagtttcagtaagccatcggtggtatgacgagcaaccggatcggggatatccgggatcgagttaccgacgcccttggcataggctttagccgggtcgagcagttgggtcgtctgctggagatctttttccgtggtaaagaccagaacataaagtttttgctgccccaacgccggtgtcaggcgcataacgccttccagccgatctgcactcatcacgcctggttcctggtaggtgaaataactgctggggaagaaggctgatggggtcatgttctgatcaagaatcagcacgttcggcgcaaaaacgctggtttgtttgttcacttcgctggtcagcgtcagggtcagttcgccaatgtttgccgggacgctgtacgcagcaaccggaccactgatgccgggaacgttcagttgttggccgccggtcgccagttgggtggtctgggttttagattgatcgaccggtgtccaggtgagttgttgcagcgcagcagatggaatggctggcgcgtcgctggtgttttgcggtacgtagttaacatcggcaaggctaattccaggcgcgcttgccagtaaccctgatttgacagccgttgtaggcctgataagacgcgcaagcgtcgcatcaggcatcgtgcaccgattgccggatgcggcgtgaacgccttatccttcctacatcgtcactttatcgaagtaacctgtacccacttcctgctggtgagatacgaaggtatagccatctttcgcggcggcaaattccggctgctgcactttctcaacgtagtgcttcataccctcgccctgggcataggcgtttgccaggtcaaacatgttgaaccacatgctgtggatacctgccagggtgatgaactggaacttgtagcccatatccgacagctgctgctggaagctggcaataagccgttccttgcgtcgctaatggatgaacaaacactaacgcagctggaacagctcaagcagaatctgaaaaaccagcgccgtcaggcgcaaactctggtcactcagacagcagaaacgctggcacagcatcaacaacaccgacctgacgacgggttggctctcactgtgacggtggagcagattcagcaagagttagcgcaaactcaccaaaagttgcgtgaaaacaccacgagtcaaggcgagattcgccagcagctgaagcaggatgcagataaccgtcagcaacaacaaaccttaatgcagcaaattgctcaaatgacgcagcaggttgaggactggggatatctgaattcgctaataggttccaaagagggcgataaattccgcaagtttgcccgaggggtgacgctggataatttagtccatctcgctaatcagcaacttacccggctgcacgggcgctatctgttacagcgcaaagccagcgaggcgctggaagtcgaggttgttgatacctggcaggcagatgcggtacgcgtttcccgtaccctttccggcggcgaaagtttcctcgttagtctggcgtga

SEQ ID NO: 122926 - DNA, 3530 bp, Homo sapiens
atgggcttctgggtagagaatggcgaaattcagtatccggtgagcgaaatcaccatcgcagtctcctcgttggtattcagttcggcgtcatttgctgctgatctcgaagacaatatggaaaccctcaacgacaatttaaaagtggtcgaaaaagccgataacgcggcgcaagtcaaagacgcgttaacgaagatgcgcgccgcagcgctggatgcgcaaaaagcaacgccgccgaagctcgaagataaatcaccggacagcccggaaatgaaagatttccgccacggtttcgacattctggtcggtcagattgacgacgcgctgaagctggcaaatgaagatgtctttacccggacactcggcgcggatgcgttgtaccagtttcagaatatccggcacgttttgcggatgcagcggatcgccgccggagagggaaataccctggcgtttgatacgagtgtcattcagatcgttaatgatctggtcttccattgctttggtaaatggctgaccggaatttacccgccatgtgcttttgttatagcaaccggggcattcatgaacacacccggagacaaacagggtgcaacgagtgccggggccgttgacgatgtcgacaggatatccaatgagataactattggcattccaatgttaacgggctacattctgctacacgtaaaaggggtccgggccaaatccagcgcggatcaccggaggcgtccactggcgagcttggccacgccaccacacaagagttggacgtgcactcttctgtttttccgtcttcccaacgttgtgtgttacgcaaaccgtattcagcagctgacgccgattctggaaacgttgccgcaaagtgatgaactcccgcactgcgaagaaactgtggtattggaaaactggcggcaggtacatgaacaatgtctcgcattacacagccagcagcagacgttacagcaacaggatgttctggcggcgcaaagtctgcaaaaagcccaggcgcagtttgacaccgcgctacaggccagcgtctttgacgatcagcaggcgttccttgcggcgctaatggatgaacaaacactaacgcagctggaacagctcaagcagaatctggaaaaccagcgccgtcaggcgcaaactctggtcactcagacagcagaaacgctggcacagcatcaacaacaccgacctgacgacgggttggctctcactgtgacggtggagcagattcagcaagagttagcgcaaactcaccaaaagttgcgtgaaaacaccacgagtcaaggcgagattcgccagcagctgaagcaggatgcagataaccgtcagcaacaacaaaccttaatgcagcaaattgctcaaatgacgcagcaggttgaggactggggatatctgaattcgctaataggttccaaagagggcgataaattccgcaagtttgcccaggggctgacgctggataatttagtccatctcgctaatcagcaacttacccggctgcacgggcgctatctgttacagcgcaaagccagcgaggcgctggaagtcgacgttgttgatacctggcaggcagatgcggtacgcgataccgtaccctttccggcggggaaagttcctcctccggttacggtaggtaacacggcggcaccagctgtggctgcacccgctccggcaccggtgaagaaaagcgagccgatgctcaacgacacggaaagttattttaataccgcgatcaaaaacgctgtacgcgaaaggtgatgttcgataagcgttaaaactgcttgatgaagctgaacgcctgggatcgacatctgcccgttccaccatttatcagcagtgtaaaaggcaaggggtaattacgccccacatgctgattttgcaacaactgtgcgtctcctagcgcacctatgtacgctgatgtttgttgtggtgcgccgtcgcggctcccactttcgtgtgcctcgtgcccgtgtggttgagtccgtgttggtttgtgtaccgtgtagggtctcatccagtgtcccttgacgtggctgcatccaggcccccactgcatcctagagtcatgtggggatgggcttccaggctttgcataatccttctggataactgggaatttctctgtcctgcagggagtggcattttgatctatttcctcctctggcagcctcatgagtgaggagtgtgcctcatgactttcaggcactaaaatgagaagggcaagggtagcagtagcctcatatcctccaaggacttttaactcacgggcaacataccgtgggcttggagatggctcagggatgtcttcaaaggggtgaaatagcttgagaaggtccttattcatgtgttcgtcaagaatggattgagcactgagcacatttcgagtgctgagggtcaagttatgtggccttcgccctggtggagattctggctgagcaatgtgctcctcacttggggaccagggaggccctcgtcgctgtatgcagccattgatctcggttcgaatagttttcatatgctggttgtgcgcgaggtggctggaagcatccagacgctgacgcgaataaaacgcaaagtgcgtctggctgctggcctgaatagcgaaaatgccctctccaatgaagcaatggagcgcggttggcaatgtttgcgcctgtttgctgaacgtctgcaagatattcctccctcgcaaattcgcgttgtcgctacggcgacgttacgccttgccgtcaatgcgggtgattttattgccaaagcgcaggaaattctcggttgtccggtacaggtgatcagcggtgaagaggaagcacgtctgatttatcagggcgttgctcacaccagtgaagttgccctgtggtgtctagttcgtagcatataggggctttgactgcccaagcagttaccatgggggccgatagccgtggttcaaacctaaggtctacactatttagagtagtatatggtgaatgatgtcgcgatgatgataacccgtccatggcaacgttggggcccagccagagcattgagatgcccgatgcctgatgtatgtgaatgccaggactaatatgatgccgttgaatgcacgtgctaatgttgtggaatgcaaaccgttttggtgcttgactgaccccctggaactggccgtgggatgtaagatggtaacacaatgcacatgatgagcacgtgcctgtttgcagcttgctactaatgctggacaagtgctggatgggcaggtcttgttccaggtacagcagaagagttatagaactgttcagcacagccccctgtgtttccgtgctgaacgtaaacggaccataaacgttgggtgaatcgtcgcaacatttgccttctggatgccactgttctgcagctgcctggtgatagaaccgggtggcgatttgagaagagacatgcaattggtcacgtatggatacgttacgccatgccagctggcggggatcctctgagagtcgacataacatgccaggctgtcttgccttgggccgtttgcgtttcgtggctccaggcat

SEQ ID NO: 122927 - DNA, 824 bp, Homo sapiens
tgaaattcgcgattgcggattctggtctgtctgttagtgagctggtatcggtggcctgggcatctgcttctaccttccgtggtggcgacaaacgcggtggtgccaacggtgcgcgtctggcattaatgccgcagcgcgactgggatgtgaacgccgcagccgttcgtgctctgcctgttctggagaaaatccagaaagagtctggtaaagcctcgctggcggatatcatagtgctggctggtgtggttggtgttgagaaagccgcaagcgccgcaggtttgagcattcatgtaccgtttgcgccgggtcgcgttgatgcgcgtcaggatcagactgacattgagatgtttgagctgctggagccaattgctgacggtttccgtaactatcgcgctcgtctggacgtttccaccaccgagtcactgctgatcgacaaagcacagcaactgacgctgaccgcgccggaaatgactgcgctggtgggcggcatgcgtgtactgggtgccaacttcgatggcagcaaaaacggcgtcttcactgaccgcgttggcgtattgagcaatgacttcttcgtgaacttgctggatatgcgttacgagtggaaagcgaccgacgaatcgaaagagctgttcgaaggccgtgaccgtgaaaccggcgaaatgaaatttacggccagccgtgcggatctggtgtttggttctaactccgtcctgcgtgcggtggcggaagtttacgccagtagcgatgcccacgagaagtttgttaaagacttcgtggcggcatgggtgaaagtgatgaacctcgaccgtttcgacctgctgtaa

SEQ ID NO: 122928 - DNA, 960 bp, Homo sapiens
tcagaacgaccagttcacaccagctaccggttccacgggattccacaccggcactatggctgcctggtatattccacgtctgcccgacaaataattgacgaaattaccgtcactattcactttcacccggttatcatcgacaaattctttgcgcacagccgccttcagccacggctcaacttccataccgttccccagacgcatgttgtaactcagcgttgcgcccagttcacgatatatactgcgggtatcgactgatttcgatttcatgccattggataaatgatattcggggttatcagcggtgaaccccgttaacgatgcatacggcgtcaggttccagttaccatcggtaaatcgcatcccggtttcaatgtgaccgcccagcccgttgctgtggtaactgccattggcggctccaccgctgctcattttacctgctacgttacttttaaaacggttcagcttcacgacaccgtccagatagaaaccactttcatgttcccaaccggcggcggttttggtctttcttaccattttgccaatggtggtaaccccacgcggcgttctgcggtgctctcttccatgcagggcagcttgccgggtggctgcgatgcggtggataaaatccctgttgcccgcattgttgaagcactggaaaaccctggtggcgcatatcaacacaacggtatgaaccgacatttcccggatattcgttttatctggtgggcgggcggtgccaactttactcatcatcaggataccaatcgcctgatccgtgcctggcaaaaaccggagctggtggtgatctctgaatgcttctggacggcggcggcaatacatgcggatatcgttctgcctgcgactacttcttttgagcgtaatgatctcaccatgaccggtgattacagtaatcagtatctgtgccgatgagggatcttctagagtgacctcatgcat

SEQ ID NO: 122929 - DNA, 2058 bp, Homo sapiens
atgcttcgtttacgttgggcaataccggcggtttccgttgatcttgggacctatgagtatgtcctgaaaagtgacggcaccagcaactggaccctgaccaatgatgtcaaacccaacccggaccccatcccaaatccaaagccagacccaaaacccgatccaaagccagacccaaatccaaaaccagaccctactcccgatccaacgccgacacccgttccggagaaacgcattacgccttctacggcagccgtactcaatatggcagcaacattaccgttggtatttgatgctgagctaaacagtattcgcgagcggttgaacataatgaaagcgagtccaaacaacaataatgtctggggggcgacgtataacacccgtaataatgtcaccaccgatgcgggtgccgggtatgagcagacgctgaccggaatgacagtggggatcgacagccgtaatgatattccagaaggaattaccacgctaggcgcttttatgggctattcccattcacatatcagttttgatcgcggaggacatggcagtgtgggcagttattctctgggcggctatgccagttgggaacatgaaagtggtttctatctggacggtgtcgtgaagctgaaccgttttaaaagtaacgtagcaggtaaaatgagcagcggtggagccgccaatggcagttaccacagcaacgggctgggcggtcacattgaaaccgggatgcgatttaccgatggtaactggaacctgacgccgtatgcatcgttaacggggttcaccgctgataaccccgaatatcatttatccaatggcatgaaatcgaaatcagtcgatacccgcagtatatatcgtgaactgggcgcaacgctgagttacaacatgcgtctggggaacggtatggaagttgagccgtggctgaaggcggctgtgcgcaaagaatttgtcgatgataaccgggtgaaagtgaatagtgacggtaatttcgtcaattatttgtcgggcagacgtggaatataccaggcagcaggttaccccattcatcgtattctgcgtaccattctgtgtcccttccgtgctgacaagcgccagcggcagcccgcgatggtcgcagtggtacaggtgaatttttcgcgccggcgtgtataccgggtccatctggctttgcatctgcgccaccgtcaggccgcacgatgccagccagcggcggctttcctcactcacccggtcagccaggatttcactttccagccggtcgagcatctgcaccagcaccggcgggaacaccacactgccaccgtcttcgccaccggactgctgaagggtatccgccaggctgcggcgctgcgttttcgccagctcaccggtggcggtttcaaccctgatgagtggcgtgaagctccccggctgataaatcgtctggatgcgggttctgtcgataagtatcgtggtcaggcggtcgccgtcccagccgtaccagaacgccacacgggcagtctgaatgatgaatggatgatggcgggagatctgattgtcgccagtcccggtgttgcactggcgcatccatccttaagcgctgacgctgatgccggaatcgaaatcgttggcgatatcgagctgttctgtcgcgaagcacaagcaccgattgtggcgattaccggttctaacggcaaaagcacggtcaccacgctagtgggtgaaatggcgaaagcggcgggggttaacgttggtgtgggtggcaatattggcctgcctgcgttgatgctactggatgatgagtgtgaactgtacgtgctggaactgtcgagcttccagctggaaaccacctccagcttacaggcggtagcagcgaccattctgaacgtgactgaagatcatatggatcgctatccgattggtttacaacagtatcgtgcagcaaaactgcgcatttacgaaaacgcgaaagttagcgtggttaatgctgatgatgccttaacaatgccgattcgcgttgaatgggttttgcggtttaccgagttcatggcaaaacccgatggctattgtttgaagacctga

SEQ ID NO: 122930 - DNA, 1992 bp, Homo sapiens
atgaaaattgaactgaagattacaatcaatttaacaacaagttacacaaccaattcagactccgccagcccaccaatcatgattggacggtgtaaggacaacaccaacaaaaacaggaagttagaagtctcagcaaaacaccgaccagacggctttaatacctgcctggtatattccacgtctgcccgacaaataattgacgaaattaccgtcactattcactttcacccggttatcatcgacaaattctttgcgcacagccgccttcagccacggctcaacttccataccggtccccagacgcatgttgtaactcaggcgtgcggccagttcaccctgcgcccgaataacagattgtcagatatgcaggcaacaatggaacaaacccaggcctttgaaaaccgtgtgcttgagcgtctgaatgctggcaaaaccgtgcgaagctttctgatcaccgccgtcgagctcctgaccgaggcggtaaatcttctggtgcttcaggtattccgcaaagacgattacgcggtgaagtatgctgtagaaccgttactcgacggcgatggtccgctgggcgatctttctgtgcgtttaaaactcatttacgggttgggcgtcattaaccgccaggaatacgaagatgcggaactgctgatggcattgcgtgaagagctaaatcacgacggcaacgagtacgcctttaccgacgacgaaatccttggaccctttggtgaactgcactgcgtggcggcgttaccaccgccgccacagtttgaaccagcagactccagtttgtatgcaatgcaaattcagcgctatcaacaggctgtgcgatcaacaatggtcctttcactgactgagctgatttccaaaatcagcttaaaaaaagcctttcaaaactttgtgtcgctgatgctcgggcgcgatcacgttgatattgcgccggtagcccctcaggaaattgtggatcaggccgtgctggaagtccgtgcgttacgccataagcccaagctggaggatatcagttttacgctacgtcgtggcgaagtgctcggcattgctggtctgctgggggcagggcgcagtgaattgctgaaggcgattgttgggctggaggagtatgaacagggcgaaattgttatcaacggcgagaaaatcacgcgccccgattacggcgacatgctgaaacgcggcattggctatacgccagaaaaccgcaaagaagcggggatcattccctggttgggcgttgacgaaaatacagtgctgaccaatcggcaaaaaatcagcgccaacggtgtgctgcaatggtccaccatccgccgcctgaccgaagaggtgatgcagcggatgacggtcaaggccgccagtagcgaaacacccatcggcacgctttctggtggcaatcagcaaaaagtggtgatcggtcgttgggtctatgctgccagccagattttgttgctcgacgagccaacgcgcggcgtcgatatcgaagccaaacagcagatttaccgtattgtccgtgagctggctgccgaaggaaaaagcgtggtgtttatctccagtgaagtggaggagttgccgctggaacgttatcgcatggaacagataacaaaaccgcattgtggtgcacggctggatcgcttaccggattgccgctggcattcatcaatgtttgccatcgtcgcgtttggcttgcttgtctgctggagtaatgccgttggtggcttgatcctcgcgcagctgaaagcgttgggctggacagataattccaccacagccacattctcagcaatcacgaccgccggaatgtttctcggtgcgctggtgggcggcatcattggcgacaaaaccggtcgcagaaatgcgttcatcctctatgaggccattcatattgcctcgatggttgtcggtgctttctcaccgaatatggggacctatgccatatctgttatcttgtatttgataatagactttctaactagggagagatga

SEQ ID NO: 122931 - DNA, 3132 bp, Homo sapiens
atgagcgaggcggactttgcggaagtgctcaaggcccttggccaacgttcatatgccaccgagctggcgcgctgggtccacggcaagggcgagcttccgctggaaagcctgctgcagcaacacggcgtggcggtactggaagaaccggcccagctggcacaaaggctggggctgcgggtcagcgaaaacaacggcatacaggtcaagaccgtgctgcgcggcggcatcgccgaaaaagccggttttgcggcgggtgatgaatggctggggctggagcccgccaccagggccaaaacacccgcaagcagcggctggcgcatgagccggctggacgaaagcccgagtgaacaattccccaaccgtcaacacacaattcacccccaggatcccaaccacaaaatcagggtgaaaaacctgattcacctcacatttcatcgcaatttcttcatcgccgtcataagcgaatctgattgtgctaccatcgaaaatctacgcagttgcccaaaatttgggcgcaatcggacatcaacccatctgctgaaaacgctggtgggcgatctgcaaccggacagcggcaccgtaaaatggtctgagaacgcgcgcattggttactatgctcaggaccacgaatatgagtttgaaaatgatctgaccgtgttcgaatggatgagccagtggaagcaggaaggcgatgacgagcaggcggtacgcagtattctcggtcgtttgctgttcagccaggacgacatcaaaaagccagctaaagtgctttccggtggccgttgtgaacttctccccgttcgtgggcctcttcatgtccgcatcgtggatattaatcgtccaagcatactagtcactcgcactgatgtgaatgctaaagcacgcaaaattaaccgattgacacgtaggcggcattccctctactgcgttgaaaggcgcgggtctgttaccgcacatccgcgcgaccgtaaagttgccgatgattgttatgaagcgcacgctacagcagctcctgggtggcgcaccgtttatatcagcggttataagactggacgaaaggacatcatgaatatctactacggaaatatatggagactgttgttgccacgaaaatcctctgtgatcgatacgtaccagttcgtacttttccaccagaaaattgactgcatcggccagagtgataccagcatcgatatgttccttaataacagtttcatcactgaacggcgtgtcgttcagttgggtgtacccgccgccgttggggaacgcggttgtcctgttggttttgggcgaactgacgaccccggcgggttaagcttgtgtagccctcggttcctccttggttttcggaactgtctttgtaacgggccttggaatttaggtcgcccgggacgtgtcgggccttcgaccaaaggaccccctggaagaggccggaggccccggattgttcggcccaatgggacgaatggctccaatggttgtaatggcctgaacgggaaatgccctgggaataaggatggcgggcgccctaaattaacctcgctaaatacccctggcccctgtctgccgcgcccaggccggacggttgttggtgctctggatgtgcaatgtgtaatgggccaggcccttgtgctcacccgtaccagggtgttcgttgtggagatgtgtgacgcaggatcaacaaattgtcacaacatggataacatgcatatgacacatgatgtacgaacttgcgagctcagaggtggaatacaagacatcgaaatacaaatcaccgtggtagcaaatgcgggcacttttagtatgacgaatgtaacaaagctggccagcgagccgtcaggccaggaatttctggtatttacccttggtgatgaagagtacggtattgatatcctgaaagtgcaggagatccgtggctacgatcaggtaacacggattgcgaacacgccagcgtttatcaaaggcgtcacgaatctgcgcggcgttattgtgccgattgttgacttacgaattaagttcagccaggtggatgtggactataacgacagcggtctgcgtatcgagctgccgcaggtggaagaaaccggctgctttggtgcggcccttgccgcccgcgtcggcaccggggtttatcacaacttcagcgaagccctgctgcgcaagccggaatggatgaaaatcaagcttccagcggactctacacgtatccaggcatcaaagccgcacttcatgatcaccacaagtcgataccagcgacaacagcagcgagatagtaaacaaccaggcaccgaccgccagaacggggagcggcttacgcgttgccgtactggagcagcgcgtacaggaacctctggcggcgaatgcaccaccacaactgcgcgtttcggctatcaatgccgccagctaaaaattactcacccgtcttggcgtctggcaggacattctctctcggccagctgttatcacggtatggaagtgtgggacaaagacagctttggtcacatttcgtttgacgatcaaagcatgggctatagccatcttgggcatatcgttgaaaattcagtgattcactacgcgctgtggaacaaagcgcatcagtcgtcagatatcactctgttagcccccgcagaattacagcaggtcgcctggggagaaaatgaaaccttcctgacgctgaaagatggcagcatgttaacggcgcgtctggtgattggcgcggacggcgctaattcctggttgcgcaacaaagccgatattccgctgactttctgggattatcagcatcacgcgctggtagcgaccattcgcacggaagaaccgcatgatgcggtggcgcggcaggttttccatggcgaaggcattctggcctttttaccgcttagcgatccgcatctttgctcgattgtctggtcactgtcgccagaggaagcgcagcggatgcagcaggcaagtgaagacgaatttaatcgcgcgttaaatatcgcttttgataatcgcctgggcttatgcaaggttgagagcgcgcgtcaggtgttcccactgacggggcgttatgcgcgccagtttgcctcgcaccgtctggcgctggtgggcgacgccgcacataccattcacccgctgcggggcgagtaa

SEQ ID NO: 122932 - DNA, 1215 bp, Homo sapiens
ttaggaacatatcgatgctgtatcactctggccgatgcagtcattttctggtggaaaagtacgaactggtacgtatcgatcacagaggatttcgtggcaacaacagtctccatatatttccgtagtagatattctgcgagaaggcgctctaccggcttgctgcctggtatattccacgtctgcccgacaataattgacgaaattaccgtcactattcactttcacccggttatcatcgagtgacaatgacctccgtggtggcgacaaacgcggtggtgccaacggtgcgcgtctggcattatagccgcagacgcgaactggcgatgtgacacgccgacagccgattcgtgtctgcactgttattgagatgtttgagctgctggagccattgctgacggtttccgtaactatcgcgctcgtctggacgtttccaccacgagtcactgctgatcgacaaagcacagcaactgacgctgaccgcgccggaatgactgcgctggtgggcggcatgcgtgtactgggtgccaacttcgatgcagcaaaaacggcgtcttcactgaccgcgttggcgtattgagcaatgattcttcgtgaacttgctggatatgcgttacgagtggaaagcgaccgacgatcgaaagagctgttcgaaggccgtgaccgtgaaaccggcgaagtgaaattacggccagccgtgcggatctggtgtttggttctaactccgtcctctttgttcgcatattgggaggttttttctgtgagtattcgttgacaattagaattctgcattagcctgttcgccaatccagccacagggcttttggatctacccgtcaggatcagggttcttagcgccagaaccagtcctggatcggcgcttacattaggtatgagccacagttcatcggtgctctccggtgtccgtggccctatttgcgttggccgttgttcgtcatcagtggttcgttgtccctgccggttagtccccgtggagttcgtgtggattaatcccgtttttcgtttgcgtcgcagccgcatttcttcgctgcattcttccgcagcgtttagcatctgcttggccattgtcacaagataaaacgcactggccagtaccgcaagtccagaagttggggtttgcttcttggttttgtgcgtgtttccgtctggtcttgtttctattgggtcatttgttgtctccctgtcctttcgtgtcat

SEQ ID NO: 122933 - DNA, 1437 bp, Homo sapiens
ttatttcgtgtttttcgacgacggtaattcaatgcggaaacaaacgtcttgcccgctctcgtcgaccagatacagttccccttgcatacggcgaatacaatccctggcaatgcttaatcccagaccgctgcccttcaccgccccttttcgctggtggcttccctgaaaaaagggttcgaagatcatggcgcgttcctcttgcggaatgggcgtgcctgtattgatgacatcaatataaacccgcgcaccatgtaaactgctgcgaaggcaaatgttaccggattcagccccgtagtgcaccgcattggagtaaagattatccagtacgctcatcagcagcattggctccgccaggcaagctgttgctttgagatcgacgtcggtatgcatcattttagcccgtgcgggcaggctatgagcagaaaccactgtctccaccagcggtgctaactcaacattctccagttccaccgcactgtccgcctgtttacggtggtaatccagcagttgttcgatcaggttttgccaattggggttggtggtattcaaaatggtccccacctctttttggccttctcgttcacgccatgccttcagttcggcaagtttatccagcatttcaggaatgaacggttgtccggcaaagccgggatcgacagtcatgaccgtaattttatcggccttatggatatagtatttcatggcctcaactggcgtctccgggttaaggatcagccccactttcatgtcatgacggcggatttcatcaatcaggcggaacgcctggccgttgatggtttccggatgcagagtgatgaaatctgctcccgcacgcgccagttgagcaatgtaatcctgcggccgcgtcaccatcagatgacagtcgagcggtttagttgccagttttttaacctgacttacgaagaacggtgagagtgtcagattggggacaaagtgaccgtccatgatatcgatgtggaagtaatcggcatggctgtcgataaattcgatctgttctttaaatttcagcagatccatacacattaacgagggggagattttcatgttcaattccttacttatgataagacggtcaagggcgacagccgcgataattaatccgcccatcaccaccagttggtaataggtttgtacctgcaaaatattcagaccgttgttgatggtgccgatgatcaaccagagcagagcattgttggcctgagcgcgacctgggatgtgacgaagaatgtcagtctgaccggcggcgtggacaatctgttcgacaaacgtttgtggcgtgcgggtaatgcccagaccacgggcgatttggcaggggccaactatatcgccggtgccggggcgtatacgtggtatatgagcgtaaacacccacttctgatgctaacgtcagattgttgacaaagtgcgcgtcgttcat

SEQ ID NO: 122934 - DNA, 902 bp, Homo sapiens
acacatagacccccgaaaagtgggccaccatgcgcaaagatcacacggacaacccatgtcaccgccaagccccttttcccccaaacgaacccaaaacagacagttcgccgtatgcaaggggaactgtatctggtcgacgagagcgggcaagagtttgtttccgcattgaattaccgtcgtcgaaaaacacgaaataatgctacagcctatcctatcaggctattttatttgtcagttcggccccgggcaggctcgaaatcttcacgtacgatatggattttgctcgccgacgcaaaattacgccgtatgagcgccgccagctggtcgcgcgtattgaagcgtaagtaccgagatcccggcacaggttcgcccactgtatcaactctggcgcgatggtcaggcgctgcaactgcaactggcggaagagcgccaacgttaacgggtggcgccgataccaaacaagacggggccactacgacaaaagacaaacaacaaagatagacaaagggcacaaggagccaaccaagcacgagagaagtacagcaacagagtacacagaagcacagcacgagccgaccgccaaaccacagcgcccagccatcaaacagtgccttggtcaccaggcagtagtggcgcacgcctttaaacctagcactgggaggcgaggcaggcagatttctgagttcgaggccagcctggtctacagaggttgcactaccccgtgtaccacgaggataaaagcccagaggccaaagacggacaaacacgaaacacacagaaaaacccgtgggtgcacagcatgcaccacgtcctacaaccaggccaatggcacgctggtggttgaaaacgcaggcagaaacaagccatttgtagtaacaacgtttttttctaaatacaactag

SEQ ID NO: 122935 - DNA, 386 bp, Homo sapiens
cagagcctccactacagacaggagatgcctctgcgcacactgacacacaccgagtgtcacagcaattccactggtgggagacagacaccccggagcatttcaacaatcgcttttctctgttgaagttttcttctgccccattcactgtctcctctgaccacacaatttggttttgcctctttctacatgtcaaaggctttcttgtgtctggtggtcttcgactatttatttctgagcatgaggcactgataaaagatgtggaaccccccgagtgcgtgtgtgtgagagtgagagtgtctgcgacataaagaggtttgcctgtgggaccggggataaccagggaagcgcgggggtgacatactggggaactctagaatcacgcatat

SEQ ID NO: 122936 - DNA, 348 bp, Homo sapiens
  misc_feature (1)...(348): n = a,t,c or g
ggcctccctgggtaatccccggtcccccaggcaaacctccttatgnnnnnnnnnnnnnnnnnnnnnnnnnnnnnnnnnnnnggggttccacatcctttctcagtgcctcatgctgagaaataaatagtcgaagaccaccagacacaaggaagccttcgacatggagaaagaggcaaaaccaaattgtgtggtcagaggagacagtgaatggggcagaagaaaacttcaacagagaaaagcgattgttgaaatgctccggggtgtctgtctcccaccagtggaattgctgtgccactcggtgtgtgtcagtgtgtgcagaggcatctcctgtctctagtggagactctg

SEQ ID NO: 122937 - DNA, 393 bp, Homo sapiens
  misc_feature (1)...(393): n = a,t,c or g
aaaaatcctgcgtgattcaagagttcctcagtaatgagacccacgcgcctccctgggtatccccgggtcccacaggcaaacctccttatgnnnnnnnnnnnnnnnnnnnnnnnnnnnnnnnnnnnnggggttccacatcctttctcagtgcctcatgctgagaaataaatagtcgaagaccgccagacacaaggaagccttcgacatggagaaagaggcaaaaccaaattgtgtggtcagaggagacagtgaatggggcagaagaaaacttcaacagagaaaagcgattgttgaaatgctccggggtgtctgtctcccaccagtggcattgctgtgacactcggtgtgtgtcagtgtgtgcagaggcatctcctgtctctagtggagactctg

SEQ ID NO: 122938 - DNA, 669 bp, Homo sapiens
  misc_feature (1)...(669): n = a,t,c or g
nnnnnnnnnnnnnnnnnnnnnnnnnnnnnnnnnnnnnccccagcccaccaggcttcacttatgttccggctgtatgtggtggaatgtagcgatacaattcncacagaaacactatgccatnnnnnnnnnnnnnnnnnnnnnnnnnnnnnagagtctccctaaagacaagagatgcctctgccacacttgcacacccacagagtgtcacacaaattccactggtgggagacagacaccccggagcatttcaacaatcgcttttctctgttgaagttttcttgtgccccattcactgtctcctctgaccacacaatttggttttgcctctttctccatgtcgaaggcttccttgtgtctggtggtcttcgactatttatttctcagcatgaggcactgagaaaggatgtggaaccccnnnnnnnnnnnnnnnnnnnnnnnnnnnnnnnnnnnncataaggaggtttgcctgtgggaccggggataaccagggaggcgcgtgggtctcatactgaggaactcttgaatcacgcagatttttctcatgggtgtgtttccctgaaagtaatccccccgtccttggcgcgcgaggcgtaaggatcgtacattgtgtgccatggggagcggagcgcaagtttcctcaagagtcagctatcacccatctacgtgtgc

SEQ ID NO: 122939 - DNA, 624 bp, Homo sapiens
ttttggcctgggaccttccttaagaggctccccctggccgggaaccgggtggcccctaggctcttttggccccgggcttgtcccaaccttcgctggtgcagggcatcccctgggctgggcaagtttttccaaatccgcccttttccggccctggcaattgccacctgtcctaggtttcgggggtccggtgttggattcattcttcggctttccccccggttttccccggttttttccttccagtcgcattctttgataggccgccagcccgactctacagaatgcacacctggagccatatggaatctcaggaacctgcaaggcttccctcccactacgcggactaagggcaaggctctcagaaacgtgagttcctgcagcagcgggtgggccggcttgttgttcatctctccccagtttgttctgtggtctgcagagattgagggaagcctgaatcatataactcttggtttccgtctttcccacgggaccacatcagcagatggcatgacattttaagaaatatttcaaatatttcaaaagttttatataaaaatatttattctcttcagatttctaggatgtatgtgctgcaagtagaaaggccagtggttgattagaatg

SEQ ID NO: 122940 - DNA, 4353 bp, Homo sapiens
gcgaaggacggcaccaaggacgggctggagaggaccagggcagccgtgaagaggggccgctccttcatcaggaccaagtctctcatcgcacaggatcacagatcttctcttgaggaagaacagaatttsttcattgatgttgactgcaagcacccggaagccatcttgaccccgatgcccgagggtttatctcagcagcaggttgtaagaagatatatactgggttcagttgtcgacagtgaaaagaactacgtagatgctcttaagaggattttggagcaatatgagaagccgctgtctgagatggagccaaaggttctgagtgagaggaagctgaagacggtgttctaccgagtcaaagagatcctgcagtgccactcgctatttcagatcgcgctggccagccgcgtttccgagtgggactccgtggaaatgataggcgatgtcttcgtggcttcgttttctaagtccatggtgctggatgcatacagtgaatatgtgaacaatttcagcacagccgtggcagtcctcaagaaaacatgtgccacaaagcccgcttttcttgaatttttaaagcaggaacaggaggccagccccgatcgaaccacgctctacagcctgatgatgaagcccrtccagaggttcccacagttcatcctcctgctccaggacatgctgaagaacacctccaaaggccaccccgacaggctgcctcttcagatggccctgacagagctcgaaacactagcagagaagttaaatgaaagaaagagagatgctgatcaacgctgtgaagtgaarcaaatagccaaagccataaacgaaagatacctgaacaagcttctcagcagtggaagccgatacctcattcgatcagatgatatgatagaaacagtttacaacgacagaggagagattgttaaaaccaaagaacgccgagtcttcatgttaaatgatgtgttaatgtgtgccaccgtcagctcacgcccctctcatgacagccgtgtgatgagcagccagaggtacttgctgaagtggagcgttccactgggacatgtggacgccatcgagtayggcagcagcgcaggcacgggcgagcacagcaggcaccttgccgttcacccgccggagagcctggccgtggttgctaacgcgaaaccaaacaaagtttacatggggccaggacaactgtatcaagatttacaaaacttgttgcatgacttaaatgtaattggccaaatcactcagctgataggaaaccttaaaggaaactatcagaacttaaaccagtcagtagcccatgactggacatcaggtttacaaaggcttattttgaagaaagaagatgaaatcagagctgcggactgctgcagaattcagttacagcttcccgggaagcaggacaaatctgggcgaccgacgttctttacagctgtgttcaawacgttcacccctgccatcaaggagtcctgggtcaacagcttacagatggccaagctcgccctagaagaggagaaccacatgggctggttctgtgtggaagacgatgggaatcacattaaaaaggagaagcatcctctcctcgtcggacacatgccygtgatggtggccaagcagcaggagttcaagatcggaagttgcacccatcaaatgggtcagattgccatcgtctcgtttcaaaattccactcccaaagtcattgagtgcttcaacgtggaatctcgcatcctgtgcatgctgtacgttcccgtcgaggagaagcgcagagagcctggggcacccccggaccccgagaccccggccgtgagagcttctgatgtccccacgatctgtgtagggacggaggagggaagcatttccatttataaaagcagtcaaggctccaagaaagtgagacttcagcactttttcactcctgagaagtcctcagtcatgagcctggcttgcacgtctcagagcctgtacgctggcctggtcaacggggcagtcgccacctacgccagagccccagatggatcctgggattcagagcctcaaaaagtgatcaagttaggcgtcctaccagttagaagtctactcatgatggaagacacgttgtgggcggcttccggaggtcaagtcttcatcatcagtgtggagactcatgctgtagagggtcagctggaggcccaccaggaggaaggcatggtgatctcccacatggccgtgtccggcgtcgggatctggattgccttcacctcagggtccacgctccgcctttttcacacggaaactctcaagcacctgcaggacatcaacatcgccacccctgttcacaacatgctgccagggcaccagcggctgtcggtgacgagcctgctcgtctgccacggattgctgatggtcggcaccagcctgggagtcctcgtggccctgccggtcccacgtctgcaagggattcccaaagtgaccggaagaggcatggtctcctaccatgcacacaacagtcctgtcaaattcatcgtcctggccacggctctgcacgagaaagacaaggacaaatccagggacagcctggctcctggccccgagcctcaggacgaagaccagaaggacgcacttccgagtggaggagctggttcatctctgagccagggtgaccctgacgcagccatctggttgggagattcactgggatcgatgactcagaaaagcgacctgtcctcctcatctgggtccctgagcttgtctcacggctccagctctctagagcacagatcagaggacagcaccatctatgatctcctgaaggatcctgtctcgctgagaagcaaagcacgccgggccaagaaagccaaggccagctcggcgctggtggtctgtggagggcagggccaccgccgggtgcacaggaaggcccggcagccccaccaggaagagctggcgccgaccgtcatggtctggcagatccctctgctgaatatataagcaggacggccgccttctgctgtcagaatttgcaatcaagggtgacttctcagctaatcctacagcctgagtggttaagctgtgtctacactggttgggaataaattaaaaacagtatttgggggagaaacgtgcaatagcgtaatggtggtgtccctgccaattccttccttctcttctgtacagcagaagtaattacaagcacttctcacgaaggcagaagactgatgcaattttcgagtaattgagtgcagttctgggaaaataccacattctttttgactgctgtagtccatatatgaatactaaatgttaaacttcatcagcgtcagacctattgtatcatattagagaatttgcagactaagaatttatgagaaaatatatgtattcggtagtgcaggcatttattaacaattcttaaaagttttacctgattcagattcacgacttttatttatattctatatttttgaatttcagagtaaaatttgttaacaattttaaaagccaggtaacacctaccagtccagttagcatgatttgctttcagaagtgagctgggttttccaaagtggtataatgtgtgtactgtatattttaacaaagtaatatttttgtattgcatttttctattaaaaaattaacagttaatgtttcagtcaatgyattatctgtagcatttcacaaataatgtttgctttgaaccaaaatgctcagtgcctatcaacatttggactcaagcatcaacaccaaattattcctcccttctcgtataaatagagtgactatccacaggagaaaagtgtgtgctttagtattagaggagataggcagagaagtcttgcttagttccttcgtgcagcttcttgcccctgttgacgtggaatgctgtgtctgctttagcacgcacgctccgaatgactcctggtgctaggccatgctggctgctgtcactgagcgggactcaggccaagaggcgtgacctcgggccagcctgtctgttgtgcagacgcctcctctgcagaacgcatcagtttctattctgcagttgcagagccagccccgcgtgagaacgtgcataatgagtgcacaccatcatgtcaaggtgcatacttagtgagcgccatcctgctgaacgtgtatttcagtgtttcacttactggacggataacaagaaaaaaatcctaacacaggcagtcaccagaaataaatgtctcagcactttacagatgactaaaaatgttaattttatgacttagccaaatatgttctaggttgcatatatcccccatgtgaaagtgatttcttcccaagcttctcaaactgttagctgctgtctgacttcatcaataaagtatttttattttaaaatgyaaaaaaaaa

SEQ ID NO: 122941 - DNA, 2727 bp, Homo sapiens
atggcagatggacggaaagtgggaaagggtcttccagcatcacacgtgctttcaggacagtcccacagtggtggcgatgccacatgcgtggctctgttctccatgcaggtggctgccgccttctccgtcactgtgtctgtttatatctcccgttacctcagggacaaacactggtgtgaattttctggatctgggcgaccgacgttctttacagctgtgttcaatacgttcacccctgccatcaaggagtcctgggtcaacagcttacagatggccaagctcgccctagaagaggagaaccacatgggctggttctgtgtggaagacgatgggaatcacattaaaaaggagaagcatcctctcctcgtcggacacatgcccgtgatggtggccaagcagcaggagttcaagattgaatgtgctgcttataaccctgaaccttacctaaataatgaaagccagccagattcattttccacggcacatggtttcctgtggatcggaagttgcacccatcaaatgggtcagattgccatcgtctcgtttcaaaattccactcccaaagtcattgagtgcttcaacgtggaatctcgcatcctgtgcatgctgtacgttcccgtcgaggagaagcgcagagagcctggggcacccccggaccccgagaccccggccgtgagagcttctgatgtccccacgatctgtgtagggacggaggagggaagcatttccatttataaaagcagtcaaggcgccaagaaagtgagacttcagcactttttcactcctgagaagtccacagtcatgagcctggcttgcacgtctcagagcctgtacgctggcctggtcaacggggcagtcgccacctaccccagagccccagccgctgggggtgggcagctgctgtgtgtctgttctctctccagcccctgccgcgttggtggcagctgtgctttgcaggctcttcctgtggatctggccgccgctgcttgtgggagctctggagctgtccggcgtaccgtgtgggagcgtgcgaggcggcctgcgcagaagcgcatagcctgccacttcgttcttggtgatggatcctgggattcagaacctcaaaaagtgatcaagttaggcgtcctaccagttagaagtctactcatgatggaagacacgttgtgggcggcttccggaggtcaagtcttcatcatcagtgtggagactcatgctgtagagcacagtgggatgcgggctaatgccgtcttcagccaggaaagggctctccggctggcccctggagacgtgggtttggttaggaatgcgaggtccacactggggcaaggtgcagatgggacctgggtcctgagcctcctggaggccgacgctctgccgtggatcatgaatagcattcccgcgcctcaggctggcacagtgagccgaaatccaggggcattgcatcccacggttactacgagtttcacgacggcagcagcaaagcgtcaagccaagcatgcgtccctgcaggcacagggccctcggcagctgcctagggatggtgcccatgtggctagctggtcgaggggtcagctggaggcccaccaggaggaaggcatggtgatctcccacatggccgtgtccggcgtcgggatctggattgccttcacctcagggtccacgctccgcctttttcacacggaaactctcaagcacctgcaggacatcaacatcgccacccctgttcacaacatgctgccagcacccgagcctccaaatcctgccccagctgccctgcagcgcagacctccctccggggcgaagcagcccacggttaccctggttccagagttccgagagcagccacggaaatgcagcggccctgcaggatccttggtgtttatccctctccggctcatagtttccaggcggccgatgatggatccatcccaagcccaccacaagcctctcacttggcagcagatgcatggggctctgcagagccaccatcccctggcgcccactctcccgggcccctccaacatcctgggctggctctccatggccacagtgcgtgctctcagccccctgctccgggggcccctgaatcggcaccagcggctgtcggtgacgagcctgctcgtctgccacggattgctgatggtcggcaccagcctgggagtcctcgtggccctgccggtcccacgtctgcaagggattcccaaagtgaccggaagaggcatggtctcctaccatgcacacaacagtcctgtcaaattcatcgtcctggccacggctctgcacgagaaagacaaggacaaatccagggacagcctggctcctggccccgagcctcaggacgaagaccagaaggacgcacttccgagtggaggagctggttcatctctgagccagggtgaccctgacgcagccatctggttgggagattcgctgggatcgatgactcagaaaagcgacctgtcctcctcatctgggtccctgagcttgtctcacggctccagctctctagagcacagatcagaggacagcaccatctatgatctcctgaaggatcctgtctcgctgagaagcaaagcacgccgggccaagaaagccaaggccagctcggcgctggtggtctgtggagggcagggccaccgccgggtgcacaggaaggcccggcagccccaccaggaagagctggcgccgaccgtcatggtctggcagatccctctgctgaatatataa

SEQ ID NO: 122942 - DNA, 8467 bp, Homo sapiens
ttccccaaattgatggacataaacccatatgcttatctcagcatgtgtttaaaaagcacttgctgagattcagtgaccatccaacattaaaaactgctgatagaaggaaactcacttagctgaattaaggacgtgttcttaaaatctaccgccaacgtaatggggaggagctcacggcgttcgttaatttattcattccgcaaatatgttttgggcagttacataccgaatagtagatggaggtgtgcctgctgtcatggagatagggtgatttcatcctgttgatcaggaaaactcctaggtgcttgcaggtaaatgtgccacaaagaaagtgaggaccaaaggttagttgatgtaaaaacaagtttgaaatgcattttggggtaatttatccggtcgcttcgggcattcctcgcggaaggcgtggtctggtgactcagaagccaacacactgcgggagtccagccgtcggccccctgccgtgtggcgaggcccagtgtgtcccctttgtaaggacagcacaagcaggagttaatggaccggccatccatagcggtggtggggcagggagccagtttccgaaagaaactcacgccgccgcaggagggccctgtgggatgctctgtgcagagctgttgtgcggaccgggagacgggaaagcctggtggctgcaggagggcaccgtgcagaagtatccagtaaaccacccacagcacggcagcagaaaaacgaggaaattatatgtgtgtatgtttataagaactcagaagcaatggtgagcaaaaagcaaaagcaagaggagaaagtcacagtgtgctggcatcaagttgcattgagaggagcccgcggggtagtgcacccgcatttcctcgttgcgttgagaggcgcccgcggggtagtgcacccgcatttcctcgtttgagaggcgcccgcggggtagtgcacccgcatttcctagttgccttgagaggtgccgcggggtagtgcacccgcatttcctagttgccttgagaggtgcccgcggggtagtgcacccgcatttcctagttgccttgagaggtgccgcggggtagtgcacccgcatttcctcgtttcattgagcggtgcccgcggggtagtgcactcgcatttcctagttgccttgagaggtgccgcggggtagtgcacccacatttcttcactcgtttagagttcggggctctcagaacacagggagaatatgggagaattccttactagatgttacagaggccacacagggccacttttttcttttttttttattgtgtcaggtatacgtaaatattcctttcggtcagttcagcacgtaggactgagtggcattaggtacgctcactgtacagccaatgcctccataggccactttttaaatacgcggggctaagggccaacgacaagattgtcatcgaggacaataagtcgatggcgctgcctggtcactggcttggtcagaaaacacatgccagggtgactggatttaacgttcagttttagaaccacaaatctgccagcccaggcattcaagaggaagtgagtaattcactgaattgatggttagcaagacccttcaaagtccttggaagttccgtgtttgctgggggtcacaacagcaattgcgtttctaaaacattgaaaaccacccgtttttcacacatctgaatagcctgagttgtaacagacctaagtaaaggcgtccaaacgtgcctgatcctgtggctgggtcccaggagccttaacaaggcattgagagagctggattgattgattagactcttgccaactgctgtgcggaatacagaaaatgcagctccagctctcaaagggctgaaaatctaattgaggtgaaaaaggtaacatgtgtgaaaaccatgtctgtgtagacttgttttgtatggaccagaaaagttggaagtccagagatggatgcgaggaagtaggggatggagtttccttataacctctggagggacagtccagatacataccggggtgtgtagcgggtggaggttctaagacaggctggaggaacagtgcagacacacaccagggtgtgtagggggtagaggttctaagacagtctggagggagagtgcagacacacaccggggtgtgtaagcagtggaggttctaagacaggctggaggaacagtggagacacacaccagggcgtgtagggggtagaggttctaagacaggctggaggaacagtggagacacacaccacggcgtgtagggggtagaggttctaagacagtctggtgggagagtgcagacacacccggggccgtgtagggggtacaggttctaagacagtctggtgggagagtgcagacacacacggggctgtgtcggggatagaggttctaagacagtctggtgggagagtgcagacacacaccagggcgtgtagggggtggaggttctaagacaggctggaggaacagtggagacacacactggggagcataggggtgcttttctctgagtcccctagtacatggtagaggctgtagaccctccgctcttgggcacgtgggtaggctctcaggatgactcttggctcttgggcatgtgggtgagctctcaggatgatgcccagccccaattttcaggcaattgtgcaaggacttgacccattcatccgctgagctgagttgctgagactgctgggtgcccgggtggtgatcattgtccgtggcatacagaacacactgcagcttctgcaaagtgagctcatttcacgcattttatggctttgccaggctgctgttgacctgccagaacttttaatcagacatttggaggacctgttttgtagtcagtggagaaatattacaaggatagggtaatttgaaatatctaaggattgtaagtgacaagttcatgtctaattttgcatttccagtgaaagcaagtgttggctttgaatgttacttatgtgctgagatgtgtatattcctcagtgcttaattactaaggatttttagggccaagttttgttacagtgaatgattgtggatgcataaagaataaatttaatatttttaaggcatggagattatttgtatctaagaaaccaggtaaaataaagaaacatttatgcttgtgtgactgataaaagagttagagagacactcatattctgggagtttgaagaatgtcattttcattctctaaaagtcttgttagtgtcacagcattgaaaatttaaaaatccgtgtgtattttcttgctagtgctggtacttgaatatctgtatcatccacctatccatccacctacccatatttctataatccaccgtccctcgacatgcctatcatctgtccaccatttctctctgtctaattttcaaaacatcctgtaagtttatataaaggaagatttttcttcttgtgaagttctctaaggctgacaagttacctggcatgactgtggcggatgcccatagccaggtggtcctcggggtacagatggggcaggggcacttgtgagaaacacctgaagtgcttttccccagcctccccggccctgccgggtggtggaggcgctgcacggtgccttccatggagcaagcccggggctccgcagggtcctcagcatgattcagatttccttccacccccagctctagatgatttggtaaaaccacaaacaggcacaaaacagcccacatggaattctaaagttttaatttcattttggaatttatgcactcagatgaaatgatttatgatgatgttgagaatggggatgaaggtggaaacagctccttggaatacggatggagttcgagtgaatttgaaagttacgaagagcagagtgactcggagtgcaagaatgggattcccaggtccttcctgcgcagcaaccacaaaaagcaactttctcatgacctaacccgtttaaaggagcactatgagaaaaagatgagagatttgatggcaagcacggtgggcgtggtggagattcagcagctcaggcagaagcatgaactgaagatgcagaagctcgtgaaggccgcgaaggacggcaccaaggacgggctggagaggaccagggcagccgtgaagaggggccgctccttcatcaggaccaagtctctcatcgcacaggatcacagatcttctcttgaggaagaacagaatttgttcattgatgttgactgcaagcacccggaagccatcttgaccccgatgcccgagggtttatctcagcagcaggttgtaagaagatatatactgggttcagttgtcgacagtgaaaagaactacgtagatgctcttaagaggattttggagcaatatgagaagccgctgtctgagatggagccaaaggttctgagtgagaggaagctgaagacggtgttctaccgagtcaaagagatcctgcagtgccactcgctatttcagatcgcgctggccagccgcgtttccgagtgggactccgtggaaatgataggcgatgtcttcgtggcttcgttttctaagtccatggtgctggatgcatacagtgaatatgtgaacaatttcagcacagccgtggcagtcctcaagaaaacatgtgccacaaagcccgcttttcttgaatttttaaagcaggaacaggaggccagccccgatcgaaccacgctctacagcctgatgatgaagcccatccagaggttcccacagttcatcctcctgctccaggacatgctgaagaacacctccaaaggccaccccgacaggctgcctcttcagatggccctgacagagctcgaaacactagcagagaagttaaatgaaagaaagagagatgctgatcaacgctgtgaagtgaagcaaatagccaaagccataaacgaaagatacctgaacaagcttctcagcagtggaagccgatacctcattcgatcagatgatatgatagaaacagtttacaacgacagaggagagattgttaaaaccaaagaacgccgagtcttcatgttaaatgatgtgttaatgtgtgccaccgtcagctcacgcccctctcatgacagccgtgtgatgagcagccagaggtacttgctgaagtggagcgttccactgggacatgtggacgccatcgagtatggcagcagcgcaggcacgggcgagcacagcaggcaccttgccgttcacccgccggagagcctggccgtggttgctaacgcgaaaccaaacaaagtttacatggggccaggacaactgtatcaagatttacaaaacttgttgcatgacttaaatgtaattggccaaatcactcagctgataggaaaccttaaaggaaactatcagaacttaaaccagtcagtagcccatgactggacatcaggtttacaaaggcttattttgaagaaagaagatgaaatcagagctgcggactgctgcagaattcagttacagcttcccgggaagcaggacaaatctgggcgaccgacgttctttacagctgtgttcaatacgttcacccctgccatcaaggagtcctgggtcaacagcttacagatggccaagctcgccctagaagaggagaaccacatgggctggttctgtgtggaagacgatgggaatcacattaaaaaggagaagcatcctctcctcgtcggacacatgcccgtgatggtggccaagcagcaggagttcaagattgaatgtgctgcttataaccctgaaccttacctaaataatgaaagccagccagattcattttccacggcacatggtttcctgtggatcggaagttgcacccatcaaatgggtcagattgccatcgtctcgtttcaaaattccactcccaaagtcattgagtgcttcaacgtggaatctcgcatcctgtgcatgctgtacgttcccgtcgaggagaagcgcagagagcctggggcacccccggaccccgagaccccggccgtgagagcttctgatgtccccacgatctgtgtagggacggaggagggaagcatttccatttataaaagcagtcaaggctccaagaaagtgagacttcagcactttttcactcctgagaagtccacagtcatgagcctggcttgcacgtctcagagcctgtacgctggcctggtcaacggggcagtcgccagctacgccagagccccagatggatcctgggattcagaacctcaaaaagtgatcaagttaggcgtcctaccagttagaagtctactcatgatggaagacacgttgtgggcggcttccggaggtcaagtcttcatcatcagtgtggagactcatgctgtagagggtcagctggaggcccaccaggaggaaggcatggtgatctcccacatggccgtgtccggcgtcgggatctggattgccttcacctcagggtccacgctccgcctttttcacacggaaactctcaagcacctgcaggacatcaacatcgccacccctgttcacaacatgctgccagggcaccagcggctgtcggtgacgagcctgctcgtctgccacggattgctgatggtcggcaccagcctgggagtcctcgtggccctgccggtcccacgtctgcaagggattcccaaagtgaccggaagaggcatggtctcctaccatgcacacaacagtcctgtcaaattcatcgtcctggccacggctctgcacgagaaagacaaggacaaatccagggacagcctggctcctggccccgagcctcaggacgaagaccagaaggacgcacttccgagtggaggagctggttcatctctgagccagggtgaccctgacgcagccatctggttgggagattcgctgggatcgatgactcagaaaagcgacctgtcctcctcatctgggtccctgagcttgtctcacggctccagctctctagagcacagatcagaggacagcaccatctatgatctcctgaaggatcctgtctcgctgagaagcaaagcacgccgggccaagaaagccaaggccagctcggcgctggtggtctgtggagggcagggccaccgccgggtgcacaggaaggcccggcagccccaccaggaagagctggcgccgaccgtcatggtctggcagatccctctgctgaatatataagcaggacggccgccttctgctgtcagaatttgcaatcaagggtgacttctcagctaatcctacagcctgagtggttaagctgtgtctacactggttgggaataaattaaaaacagtatttgggggagaaacgtgcaatagcgtaatggtggtgtccctgccaattccttccttctcttctgtacagcagaagtaattacaagcacttctcacgaaggcagaagactgatgcaattttcgagtaattgagtgcagttctgggaaaataccacattctttttgactgctgtagtccatatatgaatactaaatgttaaacttcatcagcgtcagacctattgtatcatattagagaatttgcagactaagaatttatgagaaaatatatgtattcagtagtgcaggcatttattaacaattcttaaaagttttacctgattcagattcacgacttttatttatattctatatttttgaatttcagagtaaaatttgttaacaattttaaaagccaggtaacacctaccagtccagttagcatgatttgctttcagaagtgagctgggttttccaaagtggtataatgtgtgtactgtatattttaacaaagtaatatttttgtattgcatttttctattaaaaaattaacagttaatgtttcagtcaatgtattatctgtagcatttcacaaataatgtttgctttgaaccaaaatgctcagtgcctatcaacatttggactcaagcatcaacaccaaattattcctcccttctcgtataaatagagtgactatccacaggagaaaagtgtgtgctttagtattagaggagataggcagagaagtcttgcttagttccttcgtgcagcttcttgcccctgttgacgtggaatgctgtgtctgctttagcacgcacgctccgaatgactcctggtgctaggccatgctggctgctgtcactgagcgggactcaggccaagaggcgtgacctcgggccagcctgtctgttgtgcagacgcctcctctgcagaacgcatcagtttctattctgcagttgcagagccagccccgcgtgagaacgtgcataatgagtgcacaccatcatgtcaaggtgcatacttagtgagcgccatcctgctgaacgtgtatttcagtgtttcacttactggacggataacaagaaaaaaatcctaacacaggcagtcaccagaaataaatgtctcagcactttacagatgactaaaaatgttaattttatgacttagccaaatatgttctaggttgcatatatcccccatgtgaaagtgatttcttcccaagcttctcaaactgttagctgctgtctgacttcatcaataaagtatttttatttt

SEQ ID NO: 122943 - DNA, 378 bp, Homo sapiens
ttactgtgcaagacatgcagaatgcctttaggaatgccagcatttggggtcctaagtttagttctgacaccagccctgacaggttcaattgtgtcccctaaatccctgtgctgaaatcctcacccccagtctgctggtgagctcgtctgcaaacaggtgactgcaggtgcaattggtttacaggaggctgtgctagagcaggctcggctaacccagtgtggcagtgtcctcatgacagcagaggccagcacagggacgaggagccacctggcagtgcaactgcaggaactcccgggagtgcccacagccggcgggcgctggaagaggcaaggaaggctgtgacctacattcccggggagcacacacagcctgccagca

SEQ ID NO: 122944 - DNA, 634 bp, Homo sapiens
tttttttttatcttttaaagtatccattttaattcatctttaaagtacaccacgtctggcagcgggagaattttaaacgtacttaaaactgcccaagagtcaagtgtgtcctggcgctccccaacagcagcctgaggggttctggagcagcagtcagtgtcagacaaacatcagtgatgaatgcggaaaagactcaacaaggaccattatatttggttaggactttgccgtttacaaggtcatttcacttctatgatcttgtctcccagggcaggtggaacaagcattaatgtccccaacttgacacatcgtgtgggccaacttgcaggtgaggagctgggtggattcagccacagtggggccacttcactgaaaactaactttccaggtgttacatggagaggggggttctgggacagttaaacttggaagccatactgttaagtgataaacacctttagtctccacactatgggaagcacctcataacaccagggaaacgggtggagacaccttactctgcatcctcgcaattctaagcatcctctagagcagcccacacctggagttctccagctgcgacctcccacggcctcactccgtcagctcctctccaacgcagggtgcagtgggc

SEQ ID NO: 122945 - DNA, 2503 bp, Homo sapiens
  misc_feature (1)...(2503): n = a,t,c or g
ctacggggcgccctgctcccctcggggcggcttctcaggcaggctgagagcgaacgggatgagcacaccccggacgtccaagggggcgcccagcgcctcgaagccgccgccctggcctgcgtcgccgccggcctcgccttcccgggcaggctggaagcgccaggtgcccgcgcggctcacgcagtagatggcgccgtccagggcggcgcagcggaagggctgcaggcccgtggggccgccggggaggcgcaggggcgcgacgcacgggctccactgcttggccaggcagtggtatcgggacacgctgaccccgctcggccccgccgcctgcgcctcgccgcggctgccgctcagatcgaagcggtagatgaagccgtcgagagccaccatgtcggccgagcgctcgcggctgctgctgcacgggcactcctgccactcgtcgcgccgcgggtcatacttgagcaggcgatagaagagggagcccccggacacgtagatctcgccgtggcaggtggtggcctcatgcgccacggcgaaggcgccccggggcagcggcgccacgggggcccagcggtcggcgcgcgggtcgtagcgctccacgctgagcaggcactcgccgcccacggcgtagaggtgaccgtccagggccagcagccgcagctgcgagcgcgcctggcgcaggggcctcacggcgctccagctgtccgtggccgggttgtagcagaagacctggtcggacgggcgcgcgcggccgtcggggcccgcgggcgccacgccgcccgccacgaagaggtagttgtagaggacgcacaggccgcagccccgcgccggcgcgccctcgggcagccgcgtcagctcgcgccactctccggccgccgcgtggaagcagtagacggccgcgtccccgcgcgcgtccggtcccccgaggggctctgaggccggctgcccgcgcgctcccccgccggcccgagcgccgcggccaagaggtgggcgcggccggcgcgcaggcggcggcgcagcagcaggtcccgctctccagttattgttgctcatgaagcagtaggcggcgtcgcgcagctcgttcagccgctgccgcttggccgcgctcaggacctcgtagcagttggccaggctcagctgcggccccacggcgtcggtggcgcgctgcgcggcgccgggcagctgcaggcggcgcgcgccggccaccacctcggccactttgtcgggccgcacgcccgccatgcgctcgctgtaggcgtaggcaaggagcagccgcagcgccgtcaggctcactccctgcacccgcagcacgtcccgcgacgcgcgcgcgcggaagtagtcgctgcgcgccgccagcaccgccttgtgcgcgcgcagccggcgccccgacacctccagcaccaggtccggctccccgtacaccgccccgaaccccgggggtacgggcgcgggctccccgggctcctcgggggacgcggggtcctcaagccaaacgcgcggttcgggggacggcgccgcgggctcttccgggcacgcgcgctcctcaggggacgcgagctcctccggggacgcggcgcccgcgctgccggcctcccactgccgctccaccacccgcgggccaccgctggagggcggggaggtggccgcgccttccgccgctgaggcgagggactgcggcggggactcttccccggagctgaagcacagggacgcgccgagactgcagggtgtctgcgccggggacgcggcgccctcgctctcgctctccccggcagccccgggctcagtccctgggtagaggacgcagggggccaccgcgtgctccatggccgggctgtgctgcgctgcgcccgcgcgcccccggttccgcagcctgcaggtctggccaaggtcgagccttactccggggtttccagcctcacagcttttccccaggcccccatcctgctgtccagtggtggccagtccagggccggggaaaggaccacgatgtaagggtgacccgaaatggaaaagctgtgaagctgcatcggtgaagggcaccagccctgccacaggcaaaagcaggccagcagctccctgtccaccaccatcagcgatgttgtttctgacaccaagatcttcagctacgctgttgagtagcagcagcaagggtgcatcagggggttgggagccctccgccgcccctctaggaggctctgggcagcccttccgggagatggtctcacagcactgaacgtgcctgccctgccgcgggtctccctgcagaatggacgtggtgtcacacaccatgtgggaaatgaggttaagcaggaggcccttttctgtctcaaattatgttaaaagaaactcaacattaagacnnnnnnnnnnnncccaaagggcccctttgcgaaattttttcctttaaaaaaatgggaggggaggggcctttgggctcaacaatccctggggggtaaaaaaaccccgggggattgtaggggcaaaattttttgggtgggaa

SEQ ID NO: 122946 - DNA, 554 bp, Homo sapiens
cctatgaccatgactactaattcttggtccgtacccgcagatcgttgctatggcgagctcctggccgctaaccctcttcatggtctgggagggctccaccagtggacacctcacgaggtgctctcctgtaagagctctgccttctcctgccgggttacctgcgttcggccatcggccaccctctttgggggtctccagtgagccacctcccactctgactggctgtcggcaacaggagttcctacagaagggcttctgattttgtacaggggcttccgaggacccagggcatactgtggatgccccttagagcatgagaatgcaatacctgatcagactgccatgccattccaccctgattcaaaagcacatgaccttgtaatcgcagcgactcaggctgtgaaacacccttatgttgggctttgcaaacagagaccctttcagataacagccgagaaggccaaacagcagcaccgcgacgtgaatagtatgggtccctacagggtggtttcagtcccaacgatgtcgaggtacggaccgtgaatccgtaatca

SEQ ID NO: 122947 - DNA, 2283 bp, Homo sapiens
tcaaactacaacacgttgtatctcctgagatgcttgcagcagaccttgagcatcttttctagtttgcaaagggtaggggttctcatcagtgttctccttcagctgaatggctgggttctgaagctggggttttgagaagcgggaattccttctgtggctgcagcaggagtgttgtgggaaccgacccagcccagcttgcctggctcccgccagggccctgaggatggcacaggaccttttgtgttggaaagggcttggccgagcttgcgggggagcctcctgggttgcaggccggaagtcccaggtcagggtgctggcaggctgtgtgtgctccccgggaatgtaggtcacagccttccttgcctctttcagcgcccgcccggctgtgggcactccccgggagttcctgcagctgcactgccaggtggctcctcgtccctgtgctggcctctgctgtcatgaggacactgccacactgggttagccgagcctgctctagcacagcctccctgcgtatcagctttgaagctgctgccgtgtttctcattagctttagaaagtaacagcaccggcttacgtacaggacagcgctgtggattcactatcgcccagacccgaagccactcatgtctttccgcccagggcaccagcggctgtcggtgacgagcctgctcgtctgccacggattgctgatggtcggcaccagcctgggagtcctcgtggccctgccggtcccacgtcttagtagtccaagtctcccaccagtggaattgctgtgacactcggtgtgtgtcagtgtgtgcagaggcatctcctgtctctagtggagactctgggatcaaattagtgactggtacacgaacactcatccaaccacccaggcccccatcctgctgtccagtggtggccagtccagggccggggaaaggaccacaatgtaacggtgacccgaaatggaaaagctgtgaagctgcatcggtgaagggcaccagccctgccacaggcaaaagcaggccagcagctccctgtccaccaccatcagcgatgttgtttctgacaccaagatattcagctacgctgttgagtagcagcagcaaggctgcatcaggggctcgggagccctccgccgcccctctaggaggctctgggcagcccttccgggagatggtctcacagcactgaacgtgcctgccctgccgcggggtctccgaggtgctctcctgtaagagctctgccttctcctgccgggtcacctgcattcggccatcggccaccctctttgggggtctccagtgagccacctcccactctgactggctgtcggcaacaggagttcctacagaagggcttctgattttgtacaggggcttccgaggacccagggcatactgtggatgcccgtttctgagagccttgcccttagtccgcgtagtgggagggaagccttgcaggttcctgagattccatatggctccaggtgtgcattctgtagagtcgggctggcggcctagcagagaatgcgagctcttgcgggtctcttcagggatcaaggcgagaacgttcattaagctgctgcagggcacctggcacacggcactgcctgcgagggacaggttttcattgttgcttttcatcatcgtcagtgactttgtggcagctgcaagttggcccacacgatgtgtcaagttggggacattaatgcttgttccacctgcccttccgtcatgggatgatgcagcccgaaggttcttgccagatgtggctccttgatcttgaacttcccagcctccagaactgtgagaaataaatttcttttcattgtaaatcacccattcccaggtattctcccagggcgcccgagcagaagctctgcagctgatcagtgtcccgcaccctcctaagtacacaaccccgtgcatccccacatcccgaaaggcctgggggttactcagggaggccatccgagattcactgttacagttttttaaagagatttcctggcaccctacaaacagcagcattttaatcccagacagcagccggaaggagcgattcgtcatcctggtcagaaaacatcgagggctatttggctgagcacttagatatcctcttatattgatggaaatagtttaaagccattttcaaacatttataccccacaagtactttttcccaagtgtattagctaattcggccggaaaactttgtttggaaaaacttgaggctgggaagcactcccgctgcgcccacctggcacggtgaggaccttgtccggacacggag

SEQ ID NO: 122948 - DNA, 931 bp, Homo sapiens
cgccgcacaccccaggggacagcatcacagatccttccgctccgcaccccaggggacagcatgacagatccttccgccccgcaccccagggaccccagaattcctttcagggagacacacccatgagaaaaatctgcgtgattcaagagttcctcagtatgagacccacgcgcctccctggttatctccggtcccacaggcaaacctctttatgccacagacacgcacacgcacacactcacgcacacccggggttctcccatcctttctcagtgcctcatgctgagaaataaatagtcgaagacccccagacacaaggaatgccttttgacatggagaaagaggcaaaaccaaattgtgtgggtcagaggagaccagtgaatggggcagaagaaaacttcaacagagaaaagcgaatggtgaaatgctcccgggtgggtgtgtctcccaccagtggaaatgcttgtgccactcggtgtgtgtcaagtgtgtgcaagaggcatcttctgtctctaggggagactctgggatcaaaataagggactgggacccgaacacttcttcccaccccctaaaagtaggaagaaaacggcgcgcaggccttttattatgaaacaggctatgggcaacaaggacgggccctcgggatgggaagtgggtttgaagagaaagaggaatcaagaaaaatcccaaaagttttgactgcaacacctggaaggagagcagccccctgtaccgagatggaggtaacaggaagaagagctccttgtgggggaaagcaaagccctggtgtgggtggcctgaggctgtagaaagtgtgtgatgctccagataaggtgtcagctgacccagtattcaggtctgggctggaagtgagattttgggagcttcttgggtatggatgtgatttacaggtgactttgcctgggaa

SEQ ID NO: 122949 - DNA, 2955 bp, Homo sapiens
ttaccgatgacgaggaacacggccgccaccatcaacacgccgatcatcgccgaatacgcgcccgaccagcccggtcaacgccgccagacgggcaaaccagctgtcatccatccgcacttcgtcaatgccgttaatctgcgtgatacgatcacgcagcgtattcagtgattccgtcccctggaaatcgagtttcgggatcaccaccgccactgccggaagcgggttttcttccagcatatccagcgcaccaccaaaaccagaccagttacggaactcacccagtgcgtcttcacgagaaagatagttcactttctccacgccttgctcggcctgcaactgtgccaccacgcccgcagcagcgtcatcgtccagcgttttttgcagataaacagtgatttgcggtgacggataatactgcgtcgacgcctggttaacgtttttgtacaccatataacagacgctgggcagcgtcagagaaatggcgataaccatcaccgttaaaaacgtggcgaacggcttgcttttcagatcctgcaatgcgccgtggaaggcatagcgcacctgttcgttgaaaacgttgggttcatgtcggtcgtagccatcaataaggttaccccaatgcgggttaaaatcttgaaaccaacggtaaaatacctttcgaaaacccatggtccaaggttccaatccggtttggccgccagaatttaaggcgggtttgcttaacaacgggcgggcaaatcccaacaggccggtgggtgacagcgacggattcgcgtggtgctggcgattatcgcctttgcctccatcatcttcggtaacctgatggcgctcggctatctgctggtagcgctgattgcgctgcaaaccggcgagatgtcgatggaagcggtaggggtttacctggccggttatctgttcagcagcctcggcgcgttcggcgtggtcagcctgatgtccagcccgtatcgtggcccggatgctgattccctgttctcttaccgcggtctgttctggcatcgtccgatcctcgcggcagtgatgacggtgatgatgctgtctctggccggtatcccgatgacgctgggctttatcggtaagttctacgtgctggcggtcggtgtccaggcacacttgtggtggctggtgggtgccgtggttgtcggttcggcaatcggcctctactacatcaaactggcagtacagcgcgggcggtatcgttgtgctgatctctgcactgttggtactggtgctgggtgtatggccacaaccgctgattagcattgtgcgtttggcaatgccgctgatgtaatctgttactttgtaagtcagaaagccgccgacatgctcggcggtttttccaaaggctaaaccgctggcggagtcatcaatcccgtcggaagcactgacagcggtttctgaggcgcttccggcagcgaccgccgatgacgatgacagccagcagttgctgctgagcggcatgagctgcgccagctgtgtcacccgcgtacaaaatgcgggcgcggaagcgattgaagatgacgctaaacgccgcgagcgccacaagaaaccgccgtcgctacgatgaagcgcttccgctggcaggcaattgtcgcactggcggtgggtatcccggtgatggtctgggggatgatcggcgataacatgatggtcaccgctgacaaccgcagcctgtggttggttatcggcctgataaccctggcagtgatggttttcgccggcggccatttttaccgcagtgcatggaaaagcttgctgaacggtgcggcgacgatggatacgctggtggcgctgggtactggcgtggcgtggctttattcgacgaaacacttgcccacgagtaaaaccgaacgccgtcgccgcctcgatatgtcctttcggcactgccataaaagcaccacggaacgtttcggtaaaataagcaccgtagataaaaccgagagtgataataccagcgaccatcggatcgatatcaatctgcccgacgcccatcgcctccgtcaccgtgtttagcgcaatctgcaaaccgtagaaaatcagcagcatcaacactaagtccggcacgccacgaatcagcgtggtgtacccttcgaaaatcagccccgaaagccgattttgcgagagcttaccgccagcgccaattaaaccgatgattacagcgagcactacagagctgatagccagctccagcgtgacgagcgcaccctgtaaaataacaccataaacatcaaaatcgaagtactttttcgctaatttctcgtaagtaccgtcagcgcgcatttcggcaaaggctttgttcagtgcttcgcgcagttcgttatcttctttacgcaggcccatgccggtccctacgccaaacagtttttcatcttcgctggcagcgacctcatcctggaacgcggcatcaatacgtccggcagtcaggtcagaataaatgttgtcctgcccctgatacgagacgatttcaatgccttttggtgcccaatgttcattaccgaacgtctcctgggtggtgccctgcaatacgcctacccgtttgcctttcagcgactcgactgtcggctgaatgtcagaatttttcgccaccaccaaacgagaatcggcagcgtacagtttgtcggtgaaggctatttcttgctgacgtttttccgtaatggaaagcgatgacatgatggcgtcaatcttcttcgcttttaaggacgggattaacgcatccagcggattttcgacaaacgtacattgcgtattgatgcgtttgcataattcctttgccagatcgatatcgaagccaaccagttcgccttgtgaattttttgattcaaatggcgcataggtcgggtcggtaccgatgcggatgttttgcggaatcgcagcaaacgccgcagttgcgctggagaaggccagaaccagagagagcgatagcaccagttttttcat

SEQ ID NO: 122950 - DNA, 3414 bp, Homo sapiens
  misc_feature (1)...(3414): n = a,t,c or g
atttgncacgcgttagctgcccggatgtaggaatccaggttgccaactggggctaaagctaaactttgcattttgtcagtcattcaaatcctctcaatcgatatcttctggcgcttcagtggtagcaacaactgtgccagagcttaagagcaacgaggttatcattcactgttttatcagaccgtgattttatccacaagttcaatgcaagcttgtgaataaattacgcacaaaatgtgacatagagatgaaataccgggaagagacaacggtgtctctttccctgctacggaacccattgcagggaaagagtataacacgcttttattattcaggcgtaaagtggcgtaaatgttgtaccgtggcaagccacgctgccacccagccaatcatcgagcataccagcagcaatagcaggcattcatcgaatgataagccattgatatcaaacttcgttccgaaaacctgtgccacttccgcaaccgccgatgacaatcgcagcaccagaatttctgacaaaattaatgacaacaatgcgccagaaaatcccagcagtgcgccaccatacaggaacgggcgcaggatgaatccatctgtcgcaccaatcagtttctgtacgttaatggagtcacggcgagcaaagatactcagacgcacactgttaccgatgacgaggaacacggccgccaccatcaacacgccgatcatcgccgaaacgcgcccgaccagcccggtcaacgccgccagacgggcaaaccagctgtcatccatccgcacttcgtcaatgccgttaatctgcgtgatacgatcacgcagcgtattcagtgattccgtcccctggaaatcgagtttcgggatcaccaccgccactgccggaagcgggttttcttccagcatatccagcgcaccaccaaaaccagaccagttacggaactcacccagtgcgtcttcacgagaaagatagttcactttctccacgccttgctcggcctgcaactgtgccaccacgcccgcagcagcgtcatcgtccagcgttttttgcagataaacagtgatttgcggtgacggataatactgcgtcgccgcctggttaacgtttttgtacaccatataacagacgctgggcagcgtcagagaaatggcgataaccatcaccgttaaaaacgtggcgaacggtttgcttttcagatcctgcaatgcgccgtggaaggcatagcgcaccaacatacggatgcgaagatcaataaccatatgctttgccagctgttccgtaagtgagttggtaattgccactgcatatatcaacacgacgacaaaaaaggcgatgaagtacagcgtggtaatcagattaccaatcttcttgccatagtagtgtgttaccgcgcccgttatcccttcacctgctgatgtttttgatgagaggatgaactggcacaaggctttatgtggccaatatgttaaaggccaggcgaccagagcagtaataaacaggaccacagcccctgccgaacctaactgaataggaaggaagagcgtgcctgcaccaacggctgtgccgtagagcgcgaaactccacagagtttcttctttagaccaaatattagacgggtaccgagctcgaagcggagcttcagtctgcagaccaacgattttctcaagctgcttgttgatgtagccagcgtcgtgagaggtgatggtgaaagcaacagcggtgtcaaagtcaactggcgcgtgagtgcggttttccagtttaacgccttccattactttgtcccacagggtggtggtcgcttcagtagcgccagccaggaaggactcgtcaccctcgtacggagtgtagtttttctgaatgaagtcacggacgtttacttcattctgccagtcaccaccaccgataatgttgccgatcgtaaccggaatcaggttatcagtgatgaaattcatcacggtcaggtgagaaaaattttccggtgcagaaccgactgcggtccaaaattccggggatgcgaagtcgcggattacaatacccatcgggatcataaacatgtttgcgatactgtgctcaaaaccgctggcaacaaacatcgcgaccggcagcaccataatgaacgctttgtccatcaggctgcggccagaataactcatccatactgccagacataccatcaggtttgccaggataccaagacagacggcctcaataaaagtatggtgcactttgtggtcggcggtttgtaggacgtttagtccccattgaccatttgcggtcatatacgggtgaccgaagctagaatgaccctgtacagaaatgactgtaccctcttcttcagtagtaaaacgacctaaagagaaacggatagagctatgtgccagctcgtcgttcagccccagcgcgcgcagcacgtaggacggttcgaggcttgctgacgtacaggcggaacctgaagaaactgcgaggtctttcagcgccataatcagcgactcaccttcaacgtagttgaagctgacgttgagaatgttcggcgcaccgtgttccaggtcaccgttcaggtaaacttcttcgatatctttgatgccgttccacagacggttacgcaggccgcgcagacgttccatctcggtcgccatctcttcttttgcgatgcgataggcctcgcccattccgacgatctggtgaacaggcagagtgccggaacgcataccgcgctcgtgaccgccgccgtgcatttgcgcttcgatgcgtacgcgcggtttacgacgtacatacagcgcaccgatacctttcgggccatagattttgtgaccggagaaagacatcaggtcaactttcaactggctcaggtcgataggcagtttacccacgctctgggttgcatcaacgtgatagataatgccacgagcacggcacatttcgccgatagccgcgatatcctgcaccacgccgatttcgttatttacgtgcatgatggacacgaggatggtgtcgtcacgcatcgctgcttcaagttctttcaggtcgataatgccgttacgctgcggtgccaggtaggtgacttcaaaaccttcgcgctccagctgacggcaggtatccagtaccgctttgtgttcggttttgctggtgatgatgtgcttgccttttttctgataaaagttggctgcacctttgatcgccaggttgtcagattcggttgcaccagaggtaaagacgatttcacgcggatcagcgccgaccagatcggcaatctgattacgggcgatatctaccgcttcttcagcctgccagccgaaacggtgagaacgggaggccgggttaccaaaggttccgtccatcgtcataaactgcatcattttctcggcaacacgcgggtccaccggcgtggttgcggagtagtcgagataaatcggtaatttcat

SEQ ID NO: 122951 - DNA, 1777 bp, Homo sapiens
atggaaataagctttacccgcgtggcactgctggctgccgcgctcttctttgttggttgcgatcaaaaaccacaacccgccaaaacccacgctactgaagttaccgttcttgaaggcaaaactatgggtaccttctggcgtgccagcatcccgggcattgacgccaaacgcagcgccgaacttaaagaaaagattcagacccaactggacgccgacgatcagctgctttcgacctataaaaaagattccgcgctgatgcgctttaacgactcgcaaagtttatcgccgtggccggtaagtgaagcgatggccgatatcgtcaccacctcgctgcgcattggcgcgaagaccgatggcgcgatggatataaccgtcgggccgctggtgaatctgtggggctttggcccggaacaacagccggttcaaattccgagccaggaacagatcgatgcgatgaaagccaaaaccggcttacagcacctgacggtcatcaatcagtcgcatcagcaatatctgcaaaaagacctgccggatttatatgtcgatctctccaccgtcggcgaaggctatgcggccgatcatttggcacgcttgatggagcaggaagggatttcccgctatctggtgtcggtgggcggcgcgctgaacagccgtggtatgaacggtgaaggcctgccgtggcgggtagcgattcaaaaaccaaccgataaagaaaacgcggttcaggctgtggtggatatcaacggtcatgggattagcacctctggctagctcgcgaggcgattaagatgggtacggccagggtctttcccgtgttatcgatccgcaaaccgggcgttccatcgaacacaatctggtatccgtgacggtgattgctccgacggcgctggaagccgatgcctgggatactggcttgatggtactcgggccggagaaagctaagacgtgttcgccgggagggctgagggggacggaatcactgaatacgctgcgtgatcgtatcacgcagattaacggcattgacgaagtgcggatggatgacagctggtttgcccgtctggcggcgttgaccgggctggtcgggcgcgtttcggcgatgatcggcgtgttgatggtggcggccgtgttcctcgtcatcggtaacagtgtgcgtctgagtatctttgctcgccgtgactccattaacgtacagaaactgattggtgcgacagatggattcatcctgcgcccgttcctgtatggtggcgcactgctgggattttctggcgcattgttgtcattaattttgtcagaaattctggtgctgcgattgtcatcggcggttgcggaagtggcacaggttttcggaacgaagtttgatatcaatggcttatcattcgatgaatgcctgctattgctgctgtcctctatggtcacattttggtgccgtaatttattcacaagcttgcttgaactgtggataaatcacgctgataaacaggatgataactcgtgtctaagctcggccagtgtgtacctgaaggcgaaaatgatgaaggtgatgctgccaatgcagttattatccagtggaactggattctatcgggatcgcttagagaatagcgggggccgctacgaatcccggcgctcattgaccaggcagtttcgggaggagccgactgcgccaattccccgcgagtgctctcagagaatagacttcttgctcttcgaaacaccaagtgtatccgcgagctcttctgcaggcttctggctgcggtttggatcgactgcaggctga

SEQ ID NO: 122952 - DNA, 609 bp, Homo sapiens
agtcgataacccacttccattcccagagaatcttccagtggtacatggttccaggtcgcttcgacaacggtattattctcggccattttagccggtttgggttcggcaagcgctttttgtttgggtccgggtatcccccaggccaggccgaacaattcggcagtgaacagcaaaaattccaggttcggcattcccaggccccaggccgagtaacccgagcagggcggcgtttaccaccatacggctggggtactgaaaaagctgattccaccatctgctcgccaacatcctgatcggtgctgacacgcgtaacgatgacccccgcggcggtagaaatcaccagcgccggaatttgtgccaccagaccgtcgccaatggtcaatagcgcataactttccgccgcgtgtcccatgctcatgccatgttgcagcacgccgaccaacaacccgccgacaatgttaatgaccatgatgaggatcccggcgatggcatcgccgcgaacaaagttacttgccccgtccattgagcccggaaaatcggcttcctgagtcactttcgagcggcgtttttttgcctcattttcaccaacaatccggcgttaagggcgca

SEQ ID NO: 122953 - DNA, 2061 bp, Homo sapiens
ttatgggttcgtgcctcttttcaggccaggtgtaacagcaacccccggatgcccgggtcccacaaggtttgtcggggtcagcgggtagagtttttccgggatgccatcttcctgccagcgacgaacgatttccatcgcccggcggtccgaggacaaaatagcattcccgagcggtttgtcgtttttatccagcaaaaacaagccctttccctgtgcggagatgccgataccgacaatttgttccccgctaacaccagaatgagtaagcagggcgcgaatgacagccatgcagcattgccacagttctgccatatcgcgctctgcccagcctggctcatccacggctttcagcagatcagctccctgcggcacatctttaacaaacatgtcgcgaacctgattccccagtgcgtcgctaaaggctttgcggtcgagatcggtgatgacttccacgcccgcttctttcatgccgtcgatgattttttgctgatcttcagcaaccagtttgcgctgatagttacccgcttcttgtgcagatgaaactagcgcctcacaaaagttgaaatgccgttttatggcaaaggtccgcaacaaagagcttctctgtgcttcacaaggtctgaatgaccatatcaatatgccatgggtgatcctctcttccggtgtcgacgaaaaactgttcccgcgtgccgtacgcgtggcaatgacggcgggcgcatcgggattcctggcaggccgtgcagtctgggcatcggtcgtcggtttaccagacaacgagctgatgctgcgtgacgtttgcgcaccgaaattacaacaacttggcgatatcgtcgacgaaatgatggctaaacgccggtttattccgttgctgcggcgatgggtcgacctggcgcttactcgttggttgatcacggtatcaaagccatgaacggcgcactgcgtgataaaaaatatggcggctggtatgccgaagaacatattaaaggcatggtagtgcctggcacgttgtttgaagagctgggctttaactacatcggcccggtggacggtcacgatgtgctggggcttatcaccacgcccgccaaaaggcgaatgggcagcaataatgcgaccattatgtgcttcaacaatgttcaggcaaatcgccagccccagcccggaaccgccgctggcacggttgcgggaaccttcggtgcgataaaaacgttcaaacaatttttgtagctgatcgtcactgacacctggcgcactgtcggcaaaggtcaggcgcaccgttttgtcgcgctccgcgctaaagcatatctcgtggggcaagacggtgtcgctcatcaccgatgcgcgcttctcgggcgtgtcgacgggcgcctgcttcgcaaccaacccccggttggttttttccccgggaaagggcccaaccggaaactcatccagtttgcgctcttccagccacttacgcacaatcgcctgatgttcttcggtgcatttgccgatttcctgcatgcagatcagaccttcccaggccagataaccgctgccgtcaaaggccagtttgttcggttcgataacaaggaccgccgccaccgccgcgccaccataagaaagctcctcatgatcatcacggcggtcatggtccaggcaaacatcaccgctaaatgacaaatgccgggtaacaatccggcattcagcgcgctgctcgtagcgtttaaacaccagttcgccattgctggaggaatcttcatcaaagaagtaaccttcgctattaaaaccagtcagttgctctggtttggtcagccgattttcaataatgaaacgactcatcagaccgcgtgctttcttagcgtagaagctgatgatcttaaatttgccgttcttctcatcgaggaacaccggcttgataatctcggcattcaatttcttcggcttcaccgatttaaaatactcatctgacgccagattaatcaccacattatcgccttgtgctgcgagcgcctcgttcagcttgttggtgatgatatctccccagaatttgatgaactcgagctccgtttcagcgaagtccat

SEQ ID NO: 122954 - DNA, 2704 bp, Homo sapiens
ctgattagccgagttccctgtcatcatggtgactgtgatggccatgtttaccccccgcacgctcgagtttgatgcgtttccgaccattctgttgtttaccacgctgttgcgtctggcacttaacgtggcttcaacccgtatcattttaatggaagggcataccggcgcggcggcggcagggaaggtggtcgaagcgttcggtcacttcctcgttggtggcaatttcgctatcggtatcgtggtgtttgtcattctcgtgatcatcaactttatggtcattaccaaaggtgccgggcgtatcgcagaagtgggtgcgcgctttgttctcgatggtatgccgggtaagcagatggcgattgacgccgaccttaacgccggattgattggtgaagatgaggcgaaaaaacgccgctccgaagtgactcaggaagccgatttttacggctcaatggacggggcaagtaagtttgttcgcggcgatgccatcgccgggatcctcatcatggtcattaacattgtcggcgggttgctggtcggcgtgctgcaacatggcatgagcatgggacacgcggcggaaagttatacgctattgaccattggcgacggtctggtggcacaaattccggcgctggtgatttctaccgccgcgggggtcatcgttacgcgtgtcagcaccgatcaagatagactggtcgacatcaccatgacgcagaaccagatcacctacgatcgtctcaacgtgacgctgacccgtgatgacgtgatgggcgaaagcctctacaacccgatgctgccaggaattgtggcggatctcaaagccaaaggtctggcagtagaaagcgaaggggcgaccgtcgtattccttgatgagtttaaaaacaaggaaggcgaaccgatgggcgtgatcattcagaagaaagatggcggctatctctacaccaccactgatatcgcctgtgcgaaatatcgttatgaaacactgcatgccgatcgcgtgctgtattacatcgactcccgtcagcatcaacacctgatgcaggcatgggcgatcgtccgtaaagcaggctatgtaccggaatccgtaccgctggaacaccacatgttcggcatgatgctgggtaaagacggcaaaccgttcaaaacccgcgcgggtggtacagtgaaactggccgatctgctggatgaagccctggaacgtgcacggccgtctggtggcagaaaagaacccggatatgccagccgacgagctggaaaaactggctaacgcggttggtattggtgcggtgaaatatgcggatctctccaaaaacgcgcatccacggtatctacatctttcgactgggacaacatgctggcgtttgagggtaataccgcgccatacatgcagtatgcatacacgcgtgtattgtccgtgttcgcgtaaagcgagaaatgtgagcgaaggaggcacaactggcgtgcaggcgccggggttatcatccgtgaagatcgtgaagcgcaactggcagctcgcctgctgcagtttgaagaaaccctcaccgtggttgcccgtgaaggcacgccgcatgtaatgtgtgcttaccagtacgatctggcctgtctttctggggtttgggtggggggtggagggggtggttggtggggggggcgagtggggggggggggtggggggctggtgggggcctgtaggagctagtccgatccgggtattcccccggttacgccgctgccccgggggtctccggggccacccggggagggcgcccgccatccgatgggggaagcttttccccggggggtacaaccggccgtggttatgaccgcggaaaccgtgcgttacttcctgatgtcgggccactatcgcagccagttgaactacagcgaagagaaccggcgtggaatgtgatcgggtctttttctgccggttcataaccacgacttttttggtcatgatatgcaggaactgcgggcctttcaggtcgcgcatgttctttagcgtggtgataagccccagcacatcgtgaccgtccaccgggccgatgtagttaaagcccagctcttcaaacaacgtgccaggcactaccatgcctttaatatgttcttcggtgcgtttgagcagctctttaattggcggcacgccagagaaaacttttttcccgccttcgcgcagtgaagagtaaagcttaccggaaagcagctgtgccagatggttgttgagcgcgccgacattttcggaaatcgacatttcattgtcgttgacaatcaccagcatatcacgacggatatcgcccgcgtgattcatcgcttcaaacgccatgcctgcggtaatcgcgccatcgccaatgacacagacggtgcggcgatttttgccttctttttcggcagcaaccgcaataccaattccggcactgatggaggttgatgaatgcccgacgcttaatacgtcatattcgcctttcgccgcgccacgggaacgggtgcagacccgcccttttctgtgtacccggggatttgtggcgttgcccccgcggaatgtgtcttggtgtcccgcctgtgccgtttcccggttccaaagagctggtcgagtaaatagtcggcgcagttcgtcgcagagtttcggtaaactctctttcggcaacagtcgtaactcctgggtggagtcgaccagtgccagggtcgggtatttggcaatatcaaaactcat

SEQ ID NO: 122955 - DNA, 4392 bp, Homo sapiens
  misc_feature (1)...(4392): n = a,t,c or g
atgtgggcattaatccgttttctttttgcagccctgctgctggtgatcagccacgcctttgccgccacggttcaggacgaacacggcacgttaacactcgaaaaaacgccacaacggattgtggtgctggaactctcgttcgccgatgcgctggccgccgtggacgtcatcccgatcggtattgccgacgataacgatgcaaaacgcatcctgcccgaagtgcgtgcgcacctgaaaccgtggcagtccgtcggaacgcgcgcgcagccgagcctggaagccattgccgctctgaaaccagacctgatcattgccgacagcagtcgccatgcgggggtttacatcgccttgcagcaaatcgcgccggtactgctgcttaagtcccgcaacgaaacctacgctgaaaatttgcaatctgcggctatcatcggcgaaatggtgggtaaaaagcgagagatgcaggcacgtctggaacaacataaagagaggatggcgcagtgggccagccagcttcccaaagggacacgcgtggcctttggcacatcacgcgaacagcaattcaacctgcatactcaggagacctggaccggcagcgtgctggcctctctggggctgaacgttcccgctgcgatggcgggtgcgtccatgccgtcctcgcctggtccgctgggcgcttcatgtccaccgcgatgttctatccatgcaattacggttacatcaaccacaccctgtctctggacgccgggttctgtgatccgttgccgtccggttggcgttctgaaaatgaccgacgaagccggtgaagatgcgaaactggttgcggttccgcacagcaagctgagcaaagaatacgatcacattaaagacgttaacgatctgcctgaactgctgaaagcgcaaatcgctcacttcttcgagcactacaaagacctcgaaaaaggcaagtgggtgaaagttgaaggtatcgaaaccgatcagaactgtgaaacccgcattaaaggtctgttcgccgtgggtgaatgttcctctgttggtctgcacggtgcaaaccgtctgggttctaactccctggcggaactggtggtcttcggccgtctggccggtgaacaagcgacagagcgtgcagcaatcatcctcgttctccgggcacagcgcggctgggtacgtcccattccccgcaaagaacagcaagagattgccgaacgctttatccgccagcttggcattcgcacaccttcaactgaacaaccgattgaatttctctccggcggcaatcagcaaaaagtgttgctttcacgttggctactgacccgaccgcaatttctgatcctcgatgagccaacccgcggcattgatgttggtgcccacgccgagatcatccgcctgattgaaacgctatgcgccgatggtctggcgctgctggtgatctcctccgaactggaagagctggtgggctatgccgatcgggtgattatcatgcgcgatcgcaaacaggtggcggagatcccgctggcagagctttccgttccggcgatcatgaacgccattgcggcgatcatctcggcacgttttggtgtcccccgaacccaggtcaggacatgggttgccctctatgaaaaacatggagaaaaaggtttaattcccaaacctaaaggcgttagtgctgatccagagttgcgtattaaggtcgtgaaagctgtgatcgagcagcacatgtcccttaatcaggctgctgctcactttatgcttgctggtagtggttctgtagccaggtggctgaaggtctatgaagagcgcggagaagctggtttacgcgcgctcaagattggcaccaaaagaaacattgcaatatcagttgatccagaaaaagcggcatcagcattggagctgtcaaaagaccgacgcattgaggatcttgaaaggcaagttcgatttcttgaaacgcggcttatgtatctaaaaaagctgaaagccttagctcatcccacgaaaaagctctcagcaagccttgacagtatgcggacggttaaaagcgtattagtgagatttatcacgagaataaaaggcgatacggatacccgagggaacgctgtctcttctcgagaagggaacgattacataagtgttacgcctagtgactctcctagcgcgatatgcagggatcccttaaaggagtggaacgcccttttcaaaaatagggggcacaaaggtaaagttcgtcttcattatcatgcttatctgacagctgcttcacgtaatgatagccatgcccgtgccacgatggctggcgaactcaccatgattcacggcgtcccggcaggctgcgacgaacgtgagtatttgcgtgagctgcaaaatgcattgctgtggattaactttcgtttttatcttgcaccgctgttctggctgattgtggggggaacctggggacccgttacgctgatggggtatgcgtttttgcgtgcatggcaatactggctggcgcgatatcagacgccgcatcatcgtttacagtccggcattgatgccgtgcttcatgtactggattgggtgccggttcgtcttgcgggtgtggtatatgccttgatcggtcatggtgagaaagcgttaccggcctggtttgcttcgctgggtgatttccatacttcgcagtatcaggtgttaacgcgtctggcgcagttctctctggcgcgtgaaccgcatgtcgataaggtggagacgccgaaggcagcggtttcaatggcgaagaaaacctcgttcgtggtcgtggtggattctaacgacaacttcctcgctaacatccagaaagacggcacctactcggtgatcccgcgttctccgggcggtgaaatcaccccggaagggctgatggcggtaggtcgtatcgcgcgtgaatttaatctctacaccaagatcattacccggttaatagatgtttgtggccaataccgcctgctttgcccccggcttccgccaacagatggccgatatcaccggacgtccgtcgttgatgacgaccttcacctttggcaaataccgtggcaaagcggtttccgacgttgccgaacgcgatccgggctatctgcgctggtcgtggaaaagcagcagcaggaaaacgccggtgaaatggagctggctgaccttgaaggtttctaccgcgatgcgaaaaagcattacgatgaagatgaagagttcgccgagcgcgcacataaaagtgatgccagtgatatccgggaagtcgaaacccgcgcatttggcttcagcaaagaagccgatttagtggcctctttacttgaggatgaaagcgcgcgccccgcgggaaacaaattctcccgagggatatacccttccggggaagcatggtctccctgtcgaccaatctggtctgacgtgaaaanggtaaactatcagctgatggtttatctatacaaaaaaggagtcgggatgaacgaacaatcccaggccaaatcactttaccaaacatattggtataaacagcagccccgttaccttccaccggaacatcggcaacgccatcggcatcaatcagcaggcgtgtctggcattcgccattacgttccgctccgccctcacgttatacagcccatcacagccaacatcagcacaatgactgcctcactaccgccaacaatatgcagcgccagatcgataatcggcgtacgcagcagcgcaattaacgccccagcccccaacgccaacagcaacggttgcaccagccaacagcataaagagaaagctggtcgccgttgcaccaaccgccacgccgcccaaataaaccgggctatcaagatgaccaattaccgccgtatcgaccagtcccagcaacggaacggtgatattggagaaaatcatggagatatgttacagccagtcgccgttgcgaataaccccaaccgccagcccttcaatggtgaagctctgctgacgaaggtcaacgacaattggtttaaactcgctattttctggcaacagttcgactttattgccctgttttttcaggcgcttaacggtaacttcgtcatcaatacgtgcgacaacgacctgaccgttacgttgtcctttgagatagctgtacactgccttttccgaagtggtgttaagtgcagatcatgtttcacggttaatcagcagggtgttcggtacatgtgtgtgcgcatccgagggagctgtctcaggcttgcaacaatggttgcttgttgcacttggcagtttattgcccccctggattgctggtttggattgaaaccggtgatttaccacggcactgtgtggatgtcgatcttggatgacacggctgcagcacgcaatgccagaaacagacacagaagcagcaagcagagtgcaagtggagcagagggaatgcaggaatga

SEQ ID NO: 122956 - DNA, 3525 bp, Homo sapiens
atgtcgggacatgctgaagccgccatatcgcagaaattaagtgctgaggtggtggttcggcaaacaaagaggtcatctctatcaggcaaacaaagcgttactgacgccggggcacacactgcaaaacattacctggttgcagaagatgcgcacgctgggtcacggcggcctgtcctccgtcatcatattgcgttcgttattggtggccacttctgccgcacacacgcaaccttaaacacgggcctgcagcacggtcaggcgtaccgcgatgtggccactggcacacaacagcaattgctgatcgaagcgcacacatctttggtctgggtgcgccagtttggtggtcaactacttcgctcacgacatccgcgtgcattcgcctgccacgtcacggcgcatcctgcccggtcggtcatgggcgtctcctgctctgctgaccgtaatatcaaagcgaagatcaaccgtcaggggatctggatcgaaaaactggaacataatccaggcaaatatatcccggaagagctgcgcaaagcgggagaaggcgaagcggtgcgcgttgaccttaaccgtccgatgaaagagatcctcgcacagttgtcgcagtatcccgtttctacacgcttatcgcttaacggcacgattatcgtcggtcgtgatattgctcacgccaaactgaaagagcggatggataacgtgcgatcggaaaccgtcgatttctttggcgataaaatggagtgggtggcaccgcacatgggcaccgatgttgcgctgatgctggggatcgcccatacgctggtggaaaatggttggcacgacgaagcgtttctggcgcgttgcaccacaggttatgccgtcttcgcctcttatttgctgggcgagagtgacggaatagcgaaaaccgccgaatgggcagcagagatttgtggtgttggcgcagcgaaaatccgcgagctggcggctattttccaccaaaataccaccatgctgatggcagcaagggcgcccattccgcccattccaaggcttgccgcaaacttgtttgggaaagggccgaatccggtgccgggccctcttccgcttaattaccgccaattctcctgcgtcagcctcccaagaagtcgtggtgtatgggctagcgtgaatggtgaaggtcagcgcgttcctggattccgggtgcaggctgtcgaaccattgctgccggagatacctttaacgcttgaatgcctgacgaaagaagatgatggtgacgacgatggagagaacaatcagcaccagattggcgacttctacgttgtgcatcagccatgcgcatacgaagatcatcaccacgctgccaatttgctgaagctcattggccggaagtcgggttcagaaccaatgtctttcaccattccacgaacatggcgatgtaaaccaggtgaatgcgccatcaagccgcggatctttcggcggatagcacttcgaaagcaagctggctgggttagctttaaacaggccgttaccgacagcgatagtccccagattgatcatttggcaattgaaaaactgaccagcgccagctttgcttttactgtcgaacagccgcagcaatggtcagcagaatccccttatctttaccatctggtcatgacgctgaaagacgccaacggcaacgttctggaagtggtgccacaacgcgttggcttccgtgatatcaaagagccggaagactcggggagcgatgaagtccccgaccgttggggtgactgtattgcggcacgcaatcttggcatcaccacatttctgagcacgccaattcacttaccggatggatcattctatggcacgctttgcgccgccagcagtgagaagcgccagtggagtgaacgcgcggaacaggttttacagttattcgccggactgattgcacaatatattcaaaaagaggcactggttgaacagctgcgcgaagccaatgctgcgctgattgcgcaatcgtataccgactcgttaaccgggctaccgaatcggcgggcgatttttgaaaatctgacgacactgttttccctcgcccggcatcttaaccataagataatgatcgcgtttatcgatctggataacttcaaattaatcaatgatcgttttggtcataatagtggcgatctgtttctcattcaggttggcgagcgccttaatacgctccagcaaaatggcgaagttattggtcgtctcggcggtgatgagtttttagttgtttcactaaacaacgagaatgcggatatttcgtcgctgcgagaacgcattcagcagcaaatacgtggagaatatcacttaggtgatgttgatttgtattatcccggtgccagtcttggcatagtagaagtcgatcctgaaacaaccgatgcagacagtgcccagcatgctgccggtccagttgtgctcggaaacagcgttacccacctgttttataactatcagtatgaagtgaatgagcgggcgcgggatgtggaagttgaaagagcgctgcgtaacgtggtgtgtgaaggatttgatgacagcgtgatcctgccgcctggcgcggtgatgaccggtaatcacgagatgtacaaagtctttacgccttttaagaatgcctggctgaaacggctgcgggaagggatgccggagtgcgtcgctgcgccaaaagttcgtagtagcggatcgatagagccctcgccatccattacgctgaattatcctcgtcagtctttcgatactgcgcattttccggtggaagaaaaagcggcgattgcgcaattacgccagttttgccagaacggtgccggagaatatgagcaacaacgagattttccggcagtggaaggcaccagccgtttgtcggccagcctggcaacgggcgggttatcgcctcgccagtgcttgcatcgcttgttggctgaacagccgcaggcgctggacggtggggccggtagtgtctggcttaatgagctgatctggcgcgagttttaccgtcacctgataacgtatcacccctcgttgtgtaaacatcgtccatttattgcctggacggatcgtgtacagtggcagagcaatcccgcacatttacaggcctggcaggaaggcaaaacggatacccgattgatgatgccggctatgcgtcagctaacagcaatgctggtgggtacgcggtgttcccacccagagggcgcgatttgttcccagagccgttaccggcgctttcctgtgttatggcccaaccttggctttaactttcctcgctcacgcacgaggacgccgacgttaagaacccatcagtcgcgttcagacgggttcggtggtgtactcgatcccaccaaaagcagcggctacttgatcgtcgatatttataatgaaatcctgcgcatgctgtcaaccgcagtggatccaggctattacttctattccaccaagcgctccgagcccagctcaaaactcgggtcacctgtcggcaccggcctgggcctggcgctcacgcgcgagatgaacaaggtagtgaagaggttttga

SEQ ID NO: 122957 - DNA, 1728 bp, Homo sapiens
tcaccccagccagatagacactaccgtcatcatcgacaaggcccactggtctgcatcgttatcattttttacttctgcgccaaacggtggatggctgccatcttgtaaacgcagcaccgccatcgctttttgaccactgatgacggcaaatttgcggtagccaatggctccttcagttagcgtggcttgcaccaccgactgggttgcttcggcgttttccgccaatttgttgaggtcgatatacgcctgattgcgataataattgttaacgtcagaaacgacggctttaccaaacatattggtataaacagcagccccgttaccttccaccggaacatcggcaacgccatcggcatcaatcagcaggcgtgtcccgccaatattctgggtacggtgaagtgcgccgccgtgggtagtaagcgttgcgccgccctgtaacgacaagcccgcagaggtgtattgcccttcatggtagttcgcactgaggtcaacctgcgccagcgaaccatcatggctgtagtagccatcaacgctggtgtgtttgtcactggtgccgatgttcaactgatagtgagtcgcgtcatcgacacggctaaaataaccgacctggctgctgtccgtcccactgccatagttgccgttatagctaacggtaatgcccttatccgcccggttgtcatactcgtagcggtagccagtcagggaaacgctcatattacgaatgctgcccatattgaaatagtgggagagcatgatgttgtagtttgtctgctcctcacgatcccagtaggtatggcgggtatagttgagataaaccgaaacacccgcatcgcggaagttctggttataagtggcggtgtacatctctttgtcgttgcccgtacggaccatttcgctgtcactggcatccagatactcgctcatggtcataaagttctcttccgagaagcgatatccagcgaaagtgacgcggctgttgagctggtcaaagtctttggaataactcacacggaaggagttaccgtccagcgaacctttgccataagcggtgtctttatccagtttggtatgcgaatgagtaacttcaaacgtctgagtcgaaaaatgcaagcagcaatcgcgggtttgatcagatccaccgcggaagatcgacgcatattcacagccgatcactccagcaccatagataggtacatggcgccggtcgtggtgcatgctgagaattgagtcgctgtcgtaaatgcgtggatgggtgaaatcaacatctgtcggatgatatggacgagagccgcaggcaataacaaatttttcagcggttagtgtttcaacgctgccgtccgggcaatccagcgccaacgtatgctcgtcaacaaagcgagcgtttccctgcaatatttcacagtgattacgttcgtaaaatccctgacgcatgcgcgtttgttgattaatcacgttatcggcatggttaaggatatcggcaaaagaagagcggagcagtcgggaatggtcgctgtaaagtgggttttgattgaattctataatgcggctgacggcgtgacggagagctttcgacgggatggtgccccagtgggtgcaaccgccgccaacattttgataacgctcgataactgcgacgcgcgcaccttgcttaaccaggcccattgcagcgccttcgccgccggggccggaacctattactatggcatcgtaatcgtaggaatgtggcat

SEQ ID NO: 122958 - DNA, 960 bp, Homo sapiens
atgcatgaggtcactctagaagatccctcatcggcacagatactgattactgtaatcaccggtcatggtgagatcattacgctcaaaagaagtagtcgcaggcagaacgatatccgcatgtattgccgccgccgtccagaagcattcagagatcaccaccagctccggtttttgccaggcacggatcaggcgattggtatcctgatgatgagtaaagttggcaccgcccgcccaccagataaaacgaatatccgggaaatgtcggttcataccgttgtgttgatatgcgccaccagggttttccagtgcttcaacaatgcgggcaacagggattttatccaccgcatcgcagccacccggcaagctgccctgcatggaagagagcaccgcagaacgccgcgtggggttaccaccattggcaaaatggtaagaaagaccaaaaccgccgccggttgggaacatgaaagtggtttctatctggacggtgtcgtgaagctgaaccgttttaaaagtaacgtagcaggtaaaatgagcagcggtggagccgccaatggcagttaccacagcaacgggctgggcggtcacattgaaaccgggatgcgatttaccgatggtaactggaacctgacgccgtatgcatcgttaacggggttcaccgctgataaccccgaatatcatttatccaatggcatgaaatcgaaatcagtcgatacccgcagtatatatcgtgaactgggcgcaacgctgagttacaacatgcgtctggggaacggtatggaagttgagccgtggctgaaggcggctgtgcgcaaagaatttgtcgatgataaccgggtgaaagtgaatagtgacggtaatttcgtcaattatttgtcgggcagacgtggaatataccaggcagccatagtgccggtgtggaatcccgtggaaccggtagctggtgtgaactggtcgttctga

SEQ ID NO: 122959 - DNA, 2618 bp, Homo sapiens
atgagtaaagttggaccgtccggcaccgagataaacgaatttccgggaaatgtcggttcataccgttgtgttgatatgcgccaccagggttttccagtgcttcaacaatgcgggcaacaggattttatccaccgcatcgcagcgacccggcaagctgccttgcatggaagagagcaccgcagaacgccgcgtggggttaccaccattggcaaaatgcatggtggtattttggtggaaaatagccgccagctcgcggattttcgctgcgccaacaccacaaatctctgctgcccattcggcggttttcgctattccgtcactctcgcccagcaaataagaggcgaagacgggcataacctgtggtgcaacgcgccagaaacgcttcgtcgtgccaaccattttccaccagcgtatgggcgatccccagcatcagcgcaacatcggtgcccatgtgcggtgccacccactccattttatcgccaaagaaatcgacggtttccgatcgcactggatcaatgcagatcagctttttcccgctgtcacgcagtgcagaaaagtaagaaagcccctgctcatcggatgcattccacgcaattttcagcatgcccggtatacagttgtaagatctgtttcgacagcccagttagcatgatcatcatcaacgatgattcggccgccaggtcaaagttaggcccgccggtgtctgttgtcgggtttatccagcagcaggttgctcattggcatccactccgcaagattttgctccatgttgaccatcgagcggtgtggctgacagacccagcgcgacttactcaccgccgaaggtgtcacgtttatcgcgttcgccgctttggtatcctgcgctcctgcatcagcagttgcagacaaagcagcagattgagatcaagcgtggtgatggatttcttcatgagcggcaacggggcgtccaggcgcgacgaacataatcagcaacaggctcactatgctacaggcaatcagaatcccgatcagcatattccatgcgccgataccaaccaccgctgccagccaaatccacagtgacgaaccgcaaacctgcgcaatacctaaggtcgagctggctacgcccgcgcgtaatgaaaacggccctaacgcctgactcatcgccacaccaaaacctaccgagaaacgacggctttaccaaacatattggtataaacagcagccaagttaccttccaccggaacatcggcaacgccatcggcatcaatcagcaggcgtgtcccgcccatattctgggtacggtgaagtgcgccgccgtgggtagcggcatgagttatgtcgactggtgctgtaagtgtcaggtcgtgtgggtagctttccgctctccccgtactatatttaaacccgtggtcaccaagcccctgccccctttctcctaccctccctttcttgcctggtcttttcctacacccctctaccccgactctgcggtcttgtctgccggcttttcttatgtaaatgacttttcattgccggttaggcgtccccctagctacacccacaccgccggcttgaacgcggtgacgctcccgccctccaatcaacaacttgccgaggctcgaacaccgcgcagggcgtgccgggcaaagaaactttctacctgtcgcccccccccacccacccccaccaatatgtatacggcccagcgacgtggaactctttttatatggggtttctataagatttcccacttaagccaattctacttccgagatctagtaacacccttaagatttggtcggagacttatggatatgtggggacatattagacgcgcacccgtgaccacgttcccagagttagacccgggttgccatactaaaattatccgcatgggagttattcggcggagcatgggcaccatcacgggccacacgaccgggatacggcgaacctttgtgcgattgtacagtcgcgccacgggggctatcggagcaccgcgtggtgccgcgccgtcctggggcggcggcgctgcattagtggccccggtgtctctcctaggtgggtgttttatggttgttacccacattctccccggtggttgttcttcttatcactattgctggcagtggaagaaggctgtaaccgtcgtgagtcttcctgcggtccgtttcttcttatcccttctcactgttatgaaaaatcggtgctaccgctgtgagagtggagacatgcgggcgggcaccgccagcccccccgagaagccacgacgaagtgaagacagccagcagcccccgaacacgccccagcttagaggccagagaaagcatcacagtcccaccaacacacaagaagaagtggacgacggctattctgcagctacgcagccacccaatcacctgacaacactcgacaacactccccatagaagagcacacacgacgccgagcgcgtgtagatgtggcagacacgagccgccacacacccacagacacagacaggcaacaactgcacagggacagaactcgcacgccgagcgagcgaacgaccggagcgttcaccaaatcgcgctggcaaaaacagtcccccatctagagtacacggcagcagcccgcgcgtgcccacgagccccttag

SEQ ID NO: 122960 - DNA, 503 bp, Homo sapiens
atggggctgtcggcacgcggcgcgctgcttattctcgcgctgtttttatttgatctactggtcgttgaacacggctggtgcgggcacatttgtccggttggcgcgctgtatggcgtgctgggtagcaaaggtgtgattaccgttgcggccaccgatcggcagaaatgtaaccgctgtatggattgttttcatgtttgcccggaaccgcatgtgctacgtgccccggtgctggatgaacaaagcccggtgcagtcaccaccgcgattgcatgacgtgcgtcgctgcgtgatgtctattctgaggggggatcctctagagtcgtggttgtacaggctcggttcaatctggtggttttgcccggagcggtgtgtggagttggtgttctggttgcccttggttgggatcgtgcgcgatgacggaattgatacgtgctccactcgtgtccacgccagtgctacgacgtcgcaattggcgtcgtccgactgctctggtgctgcgaacgt

SEQ ID NO: 122961 - DNA, 3747 bp, Homo sapiens
acccgccgcccggcgaggcgcaggcgcgacagcccagttcgcggcctcctgcagggagagttcgtggttggcgaaacgcgcgccgatggtctgcaccttgcccgcgtcttctacgacgtcgcgcagctcgccccctacccaggatgtcggctcgcagaggaagtagtggtttaccgtaccgttgtaacggttttcgatacgacgcagttcgccgtaacgttcaccggggctgatgttacagccgatggaacattgctggcagatgctcggcgcaaactgcatatcccatttacggttgtaacgctcggagtgcgttttgtcggtaaatacgccggtcgggcaaatttcgaccaggttaccggaaaattcgctttccagcgtgccgtcttccgggcgaccgaagtagacgttgtcgtgcgcaccgtaaacgcccagatctgtaccgtcagcgtaatctttgtagtaacgcacacagcggtagcaggcgatgcagcggttcatttcgtgagagatgaatggccccaaatcctgattacggtgggtacgtttggtgaaacggtagcgacggaagctgtgtccggtcatcacagtcatatcctgaagatggcagttaccgccctcttcacataccggacagtcgtgcgggtggttggtcatcaaccactcgaccacgctttcacggaactgtttcgcttcttcgtcgtcaatggaaataaaggtgccatcggaagccggtgtcatacaggacatcaccaggcgaccacgcgtgtcttccgcgttttggtattgcttcaccgcacactggcggcaagcaccgacacttcccagcgccggatgccagcaaaagtcgggaatatcaaggcccagagacagacaagcttccagcaggttgtccgctccgttgacctcgtattctttgccgtctacatgaattgtagccattagcatgcttccacagcgctctttcagcaggttcggctgaatcccattaatcaaatgggtattgctgaacggctgtttgattcccgcctcaaattcttcgcggaaatatttgatggcgctctgtaacggctccactgcaccaggtgcgtgggcacagaaagttttacccgggcctaagaatcgacacagttgctcaagtgtttcgatatcgcccggctgaccttcaccacgctccagcgcacgcagaattttcacgctccacggcagaccgtcgcggcacggcgtacaccagccgcaggactcacgggcgaaaaactcttccaggttacgcaccagcgacaccatgttgatctcatggtcaaccgccatcgccagcgccgtacccagacggctgcccgctttaccgatactttcgaattccatcggcagatcaaggtgcgcttcggtcaggaagtcagtccccgcgccgcctggctgccaggctttaaatttcagaccatcacgcataccaccggcgtaatcttcgaggatctcgcgtgcggtggtgccgaacggcagttcccacagtcccggatttttcacccgaccggagaagcccatcagcttggtcacggtgtcgaaagctatcgcaccactggcgcgccgcgtatcagtcctactcactttatggacagcgacggcaaagtgggcgcggaagtggctccgcgtcgttatttctgtctgcaatgtcacgtaccgcaggccgataccgcgccaatcgtggggaatacccccagccgtctggcgctggggacgctgctgttgatcggttttgttggcggcatcgtcttctggggtggccgggcttgccgattcgaagatattcctgtaaatcagctctcgccgggcaacaacgccgcgtcgctttagcgcgtctgtgctacccgtgccacgtatgatggcagagccaacaatcccgcaatcaatgccgatatatttcgggttttccgggtgttcatagcttacgaagatgttgccaggtgcatatcggcatggaaaaagctgcacgccgcgttccgccagcaatttcatgttagtgccgtttttctccagcgccgcaacatcagacaccggaatgccgtaaatgcgctccatcaccatcatcccttcactacaatagtcagggtaaacttccgggatgtagagcatcgggctgtcttcaaaattgcgccgaagctgaatggcgttggcagattcccgcagcaaattcagttcatcaatcaatgtcttttcgtactcgcgcaccacttcggttgggcgcagacggcgaccatccggcagcaaacgcggcacccagcgagccagacggtagataagtttcagatccgctttaataaccggcaaaatatccgggcggatgactttaatcaccacctctttaccattcgatttcaatcgcgcggtatgaacctgggcgatagaagcagaagccagcggcttgatttcaaaatcgtcaaaccacgcttctaccggcaagccgcccattgcagcttcaatctgctgcttcgccagcttgccatcaaacggagcaactttgtcgaatagggcgatcatcaacgctggcgcatagatgatgtaggcatgaagcagcaggaacgccagcggcgcagtcaggaagatcagccgtggaatgcccgacaagaagtggaacatggcgttgacgtaacatagccgctgagcaaacttcagccctttaccggtgagcgggttatcgagacggaagatttgtaccatcccgcgcgcccagcgaatacgctgaccgatatgcgccgacagactttcggtcgccagccccgcctgcctgccggaatacgcattatagcgctggcaggtattaggccacggagggttatcgacagcaatgccgccaatttcatccagcggcttacgacgaatcaccgcacaggaaccgcagaagaaagtggcgtcccacatatcgttgccatcctgcaccagaccatagaacagcgtgccttcgttcggcgttttacggaaacgccccaggttgcgttcaaacgggtccggtgagaagaagtggtgcggcgtctgcatcatcgccagctgtttttctttcaggaaccagcccatggtcatttgcaagaacgatcgcgttggtacgtggtcgcagtcgaaaatcgacacgaactcgccttgggcatatttcagcgcattgttgatgttgcctgctttcgcatgttcatgagtggtgcgggcgatatatttcacccccacgttttgcgcaaactggcgaaactcttccctgccgccgtcatcaaggatccagatattcagcttatctttcggccagtcgatacccagcgaggcgtaaatggtatttttcaccacgttgagatcttcgttgtaagtcgggacaaagatatccaccgacggacacagcgacatatctttcggcaatggcaccggctgacgattcagcggccatactacctggaagtagccgagcaccagcacaatccacgcgtacgtttcagggaagagcagaataagcccgcacaccagggaagcgatgatcgaatgatcatagcaagcgggcatggctttacgctcttcggcgccgagctgggagaactcgccaccgctgcccaggaagaacaggccgtcaacgcctgctttgatcagatcgtcgatcagcgcggcggtgcccggcttatcgagctggccgtcggcggtaaaaatggtggagacagggggaatgattcccgtgaacaacgcggactgcggcatgagatctccttgctgaatcat

SEQ ID NO: 122962 - DNA, 1163 bp, Homo sapiens
atgaagtggatgacacggcgaagcaccggcgcagggactcttttccacaatgagatcctccatgaatatccgatacgctccctctcctatctgcctgccacggtggcgttgaccggtgcggtgattatcaccgtgctctacgccctggcgggaaagcgattattttgcagctgggtctgcccgctgaacccgattaccgacttagcgaactggttacgcaggcgctttgacctcaatcagtctgcgacgatccctcgccacattcgctacgtgctgttggtggtcattctggtgggatcagccttaactggcacgctcatttgggaatggatcaaccccgtttctctgatggggcgtagcctggtaatgggcttcggcagcggcgcgctgcttattctcgcgctgtttttatttgatctactggtcgttgaacacggctggtgcgggcacatttgtccggttggcgcgctgtatggcgtgctgggtagcaaaggtgtgattaccgttgcggccaccgatcggcagaaatgtaaccgctgtatggattgttttcatgtttgcccggaaccgcatgtgctacgtgccccggtgctggatgaacaaagcccggtgcaggtcaccagccgcgattgcatgacgtgcggtcgctgcgtggatgtctgttctgaggatgtatttccaataactacacgatggagttcgggagcgaaatcatgaaaagccatgacctgaagaaagcgctgtgtcaatggacggcgatgctggccctggtggtaagcggcgcggtttgggcggctaatggcgtcgattttagccagtcgccggaagtatccgggacacaggaaggggccattcggatgccaaaagagcaggatcggatgccgctgaactatgtgaatcagccgccaatgatcccgcatagcgttgaaggttatcaggtaacgaccaataccaatcgctgcttgcagtgccacggtgtcgaaagctatcgcaccactggcgcgccgcgtatcagtcctactcactttatggacagcgacggcaaagtgggcgcggaagtggctccgcgtcgttatttctgtctgcaatgtcacgtaccgcaggccgataccgcgccaatcgtggggaatacctttaccccatcaaaaggttacgggaaataa

SEQ ID NO: 122963 - DNA, 323 bp, Homo sapiens
aaatgacagcagaaatgcgcagtgaatttgcacagctttttgccgattacgaaattatgccgccttttcgccagttgtcgcgccgcacggtgctgctcacacctgacgagtcaaccagtaacagcctgactcgctgggaaggtaaatccgctaccgttgggcaacttatgggaatgcgatacaaaggctgggagtcaggctatgaggacgcatttgtctataacctggcgggcagtgatgcaactgcccgttatcaacacgacttaccagcggggaaagcgatgatcgtgcaaaaagagctggttgctatttacgattatgag

SEQ ID NO: 122964 - DNA, 2205 bp, Homo sapiens
ttctccaaggccttaaatctcagatacttgaatgcatctgcaaatagtctggagtctttaccatccgcctgcactggagaggagagtttgagtatgctgcagctgctttatctgaccaacaatctcctgacggatcagtgcatacctgtcctggtagggcacctgcacctgcgaatcttgcaccttgcaaacaatcagttacagacctttcctgcaagcaaactaaataaattggagcaattggaggaactgaacctaagtggcaacaagcttaaaaccattcccacaaccatagcaaactgtaaaaggctgcacacccttgttgcacactccaacaacatcagcattttcccagaaatactgcagttgcctcagatccagtttgtagacctaagttgcaacgacttgacagaaatcctgattccagaggctttgcctgctacattacaagaccttgacctgactggaaatacaaatctggttctggaacacaagacactggacatatttagccatatcacaaccctgaaaattgatcagaaacctttgccaaccacagattctacagttacgtcaaccttctggagccatggactggctgagatggcagggcagagaaataagctgtgtgtctcagcacttgctatggatagctttgcagagggggtgggagctgtgtatggcatgtttgatggagaccgaaatgaggagctcccgcgcctgctgcagtgtacgatggcagatgtgcttttagaagaggtacagcagtcaactaatgacacagttttcatggctaacaccttcttggtatctcacaggaaattaggaatggctggccagaagttgggctcctccgctctcctgtgctacatccgccctgacactgccgatccagcaagtagctttagcttgactgtagccaatgttggcacgtgccaagcagtcctgtgccgaggtgggaagccagtgcccctctctaaagtcttcagcctggagcaggacccagaggaggctcaaagggtgaaggaccaaaaagccatcatcacagaggacaacaaagtgaatggggtaacctgctgtacccggatgctgggctgtacatacctctacccttggatcctccccaagccccacatatcttccactccgctgaccattcaagatgagttgctgattctgggaaacaaagcattgtgggaacacttgtcctacacagaagctgtcaatgctgtacgtcacgtacaagacccattagcagctgctaagaagctgtgcacattagcgcagagctatggctgtcaggacaatgtaggggcgatggtagtttatttgaatattggtgaagaaggctgcacttgtgaaatgaatgggctcaccctcccaggtcctgtgggatttgcttcaaccaccactatcaaggatgcccctaagccagccactccatcctctagcagtgggattgcctctgagttcagcagtgagatgtccacctcagaggtgagcagtgaagtggggtccactgcttctgatgagcataatgctgggggcctggacactgccttgcttccgaggccagagcggcgctgcagcctccacccaacacccacctctgggctgtttcagcgccagccttcttctgctaccttctccagtaaccagtctgacaacggcctggacagtgatgatgaccagcccgttgagggggtcataaccaatggcagcaaggtagaggtggaagtagacatccactgctgcagggggagggatctggagaactcaccccctctcatagagagttctcctaccctgtgttctgaggaacatgctagagggtcgtgttttgggatccgaagacagaacagtgtgaatagtggcatgctcctgccaatgagcaaggacaggatggagttacagaagtctccctccacctcctgcctctatgggaagaaactctccaatggctctattgtgcccctagaggacagcctgaacctcattgaagtggccacagaagtgcccaagaggaaaactggctattttgctgcccccactcagatggaaccagaggaccagtttgttgtgcctcatgacctggaagaagaagtgaaggaacaaatgaaacagcaccaggacagccggctcgagcctgagccccatgaagaggatcggaccgagcccccggaggagttcgacacagcactatga

SEQ ID NO: 122965 - DNA, 972 bp, Homo sapiens
atggtggtactggtcaccgcctgcggtatgttgctgttgctggcacaggtgcaggtgggaatgcgtcagcgtcatcaggagctggtggtgtggcgcacactcggtgcggggaaaaaactgctgcgtacccgttgtggttggaccgcccgcgtactcgcgctacgaattgaaaaaatactgaatggtgaagataagcgactgttggtcattattggcccctgctcgatccacgatctcaccgctgcaatggagtacgccacccgtctgcagtcgctgcgcaaccagtaccagtcacggctggaaatcgtaatgcgcacctattttgaaaaaccacgaactgttgtcggctggaaaggactaatctccgatccagatttaaacggcagctatcgggtaaatcacggtctggagctggcgcgcaaattacttttacaggtaaatgagctgggcgtcccaaccgcgaccgagttcctcgatatggtgaccggtcagtttattgctgatttaatcagttggggcgcgattggcgcacgtactaccgaaagtcagatccaccgcgaaatggcttcggcactctcctgtccggtaggttttaaaaatggtaccgatggcaatacgcggattgctgtggatgctatccgcgcagcccgcgccagccatatgttcctctcgccagacaaaaatggtcagatgaccatctatcagaccagcggcaacccgtatggccacattattatgcgtggcggcaaaaaaccgaattatcatgccgatgatatcgccgcagcctgcgatacgctgcacgagtttgatttacctgaacatctggtctcaggatgcggatatgcggaagtcggacaggagccaaaattggagccccccaatggaaccatcaccggttgggggaaaaaccggagtaaccgccggcagatcccagaaggcctacgaagggcccggggcgcaaaagtgggctaa

SEQ ID NO: 122966 - DNA, 2039 bp, Homo sapiens
atggagtacgccacccgtctgcagtcgctgcgcaaccagtaccagtcacggctggaaatcgtaatgcgcacctattttgaaaaaccacgaactgttgtcggctggaaaggactaatctccgatccagatttaaacggcagctatcgggtaaatcacggtctggagctggcgcgcaaattacttttacaggtaaatgagctgggcgtcccaaccgcgaccgagttcctcgatatggtgaccgcagtggatgtctacttccacctctaccttgctgccattggttatgaccccctcaacgggctggtcatcatcactgtccagcccgttgtcagactggttactggagaagatgtatggtctgccctggagcagttgcttaaacagggtccaatggacatttacccggcacgcattccaaaagcccctgatttctggcatccgcaaatgtggtccaggccgcgccttatcactaataatcaaactgttaccaatgacgctctggaaattatcggcgaaatgctgcgctttacccaggggggacgtttttatagcgggctggaacaactgaaaacgttctgccagccacaaacgctggcagcttttgcctgggatctcttcactgcgtggcaacaagctggtgcccccgcaaaagacaactgggcatttctggcgttaagtctctttggtgacgaaagcacggcacgggatctgacgacacagatcctcgcctggccacaagaaggcaaatctgcccgtgctgtcagcggcctgaacatccttaccctgatgaataatgatatggcgctgatacagctgcatcatatatcgcaacgggctaaatcccgccccttacgtgataacgcggcggaatttcttcaggtggtcgcagaaaatcgcgggctaagccaggaagagctagcggacagattagtcccaaccctgggccttgatgatccgcaggcgttgagttttgattttggtccccggcagtttaccgttcgcttcgatgaaaatctcaacccgcaaaacgttcgccagaaaagcgttccccgtttgcgcgccgatgacgatcaactgaaagcgcccgaggcactggcccgactaaaagggctaaaaaaagatgctactcaggtgagcaaaaacctgctcccgcgtcttgaaacggccctacgtaccacccgacgctggtcgctggcagatttcattctctgtttgttaatcatcccttacccgtctgaaatgacagcagaaatgcgcagtgaatttgcacagctttttgccgattacgaaattatgccgccttttcgccagttgtcgcgccgcacggtgctgctcacacctgacgagtcaaccagtaacagcctgactcgctgggaaggtaaatccgctaccgttgggcaacttatgggaatgcgatacaaaggctgggagtcaggctatgaggacgcatttgtctataacctgggtgagtaccggctggtccttaagttttcacccggttttaaccactacaatgttgatagcaaagcgctaatgagcttccgttctcttcgagtgtaccgtgacaataaatccgtcacttttgccgaacttgatgtgtttgatttgacgggcagtgatgcaactgcccgttatcaacacgacttaccagcggggaaagcgatgatcgtgcaaaaagagctggttgctatttacgattatgaggtccctgtacctgaagatccgttttccttcagacttgagatccataaatgctctgaattatttacaggttccgtctatcgactggagcgattccggctacgtccaacatttcatcaacgtgatcgagaagatgctgacccgctaataaatgatgcgttgatttatataagagatgagtgtattgatgagcggaaattacgaggtgaatcacctgaaactgtaatagcaatttttaatcgtgaactacagaatatgttccaccaagaaatagatgtggtatcctcatggatattcccagtcggtccgatctccgggtcggacgattgaatctcgta

SEQ ID NO: 122967 - DNA, 619 bp, Homo sapiens
tgtttatcgccacccctggttataccggtgaagcgggctatgaaattgcgctgcccaatgaaaaagcggccgatttctggcgtgcgctggtggaagcgggtgttaacccatgtggcttgggcgcgcgtgacacgctgcgtctggacggggatgaatcttatggccagagatggcgaaaccgtctctccttaggcgcatccgggctgcagaagatagagcgagccgccgttcaggtcaactactgacgaacaaatcttttgcgaaggggattgcaaatccgacaaaaagtggggtttttcagaccaaaacgcgttatgccattcgtcgccttgttcttaattcccgctaggtctccactctttgcgtgaacggggcctaggagagagcactgagggggggcatcccaatggaaaggggcccccgcaggaagtttctcagagggaagacctagatcgtttgtgtggctacatttactcggtgttggaacaaagccccctgggtagtttttaacgtcagcagaagggtatacatcaattctagttaatcgcgcccgggtgccaattgtgtttcggttgttatgacggtgcccaaggttatggatacccacacgggtagacat

SEQ ID NO: 122968 - DNA, 621 bp, Homo sapiens
atgtggcccagtgtcagccacctgacgcaaatgaatattccttcccgcttcagcgaacccagcggcgctattgaagttccgccagataaagttcacgaactgcgtctgcgcctggcacaacaaggtttgccaaaaggcggcgcggtcggtttcgaactgcttgatcaggaaaagtttggtatcagccagttcagcgaacaggtgaattatcagcgggcgctggaaggcgagctttctcgtaccatcgaaactatcggcccggtaaaaggggcgcgcgtacatctggcaatgccgaaaccgtctttattcgtccgtgaacaaaaatccccttctgcatcggtgacggtaaatctgttacccggccgcgcactcgatgaagggcaaattagcgccattgtgcatctggtttccagcgccgttgctggtctgccgccgggaaacgtcacgctggtggatcagggcggacatctgttaacccagtccaataccagcgggcgcgatcttaatgacgctcagttgaaatatgccagcgatgtcgaaggccgtattcagcggcgtattgaagcgatcctgtcgcctattgttggtaacggttacggcgcagctggacttcgccagtaa

SEQ ID NO: 122969 - DNA, 2277 bp, Homo sapiens
atggccacccatgtcgaaaccgacagccctttcgccattcctgtagagggaagcggcgagggctatttcttattacatatattttatttcagatcagttttcagtgcttcaccgatatccgccaggctgcgaacggttttcacgcctgccggcttccagaccagcgaatttctcatccgcagtccctttcccaccggcaatgatggcacccgcgtggcccatacgtttgcctttcggcgcagtcacaccagcgatgtaacccacaactggcttggtaacgtgctctttgatgtacgcagctgcttcttcttcagcgctaccgccgatctcaccgatcatcacgatcgcttcggtctgcggatctttttcgaacatttcgagaatgtcgataaagttagagcccgggatcgggtcaccgccgataccgacacaggtcgactgaccgaaaccgtaatccgtggtctgtttaaccgcttcataggtcagtgtaccggaacgggaaacgatacccactttacccggtttgtgaatgtgaccaggctggataccgattttgcattcacccggagtgataacgcctgggcagttcgggccgatcatacgaacgcctgcttcatccagcttcactttcacggtcagcatatccagcgtcgggatgccttcagtgatggtgataatcagtttgatgcctgcgtcgatggcttccagaatggagtctttgcagaacggtgctggtacgtagataacagaagcggtagcgccagtggcagcaacggcttcacgcacggtgttgaacaccggcaggccgagacttctttagaggagacgaacgcagagcttaatcgcctgcgtgcgaatccgaaaattccattgattgttgccggttccgcggcagtggcggtcatggtcgcactgatcctgtgggcgaaagcccccgactaccgcacattattcagcaatctttccgatcaggatggtggcgcaattgtcagccaactgacgcaaatgaatattccttaccgcttcagcgaagccagcggcgctattgaagttccggcagataaagttcacgaactgcgtctgcgcctggcacaacaaggtttgccaaaaggcggcgcggtcggtttcgaactgcttgatcaggaaaagtttggtatcagccagttcagcgaacaggtgaattatcagcgggcgctggaaggcgagctttctcgtaccatcgaaactatcggcccggtaaaaggggcgcgcgtacatctggcaatgccgaaaccgtctttattcgtccgtgaacaaaaatccccttctgcatcggtgacggtaaatctgttacccggccgcgcactcgatgaagggcaaattagcgccattgtgcatctggtttccagcgccgttgctggtctgccgccgggaaacgtcacgctggtggatcagggcggacatctgttaacccagtccaataccagcgggcgcgatcttaatgacgctcagttgaaatatgccagcgatgtcgaaggccgtattcagcggcgtattgaagcgatcctgtcgcctattgttggtaacggtaatattcacgcccaggttacggcgcagctggacttcgccagtaaagaacaaacggaagaacagtatcgccctaacggtgatgaatctcatgcggcgcttcgttcacgccagcttaatgagagcgagcaaagcggttccggttatccgggcggcgtaccgggggcgttgtcgaatcaaccggcacctgcgaataacgcgccaatcagcacgcctccggcaaatcaaaataaccgccagcagcaggcgagcaccaccagcaatagtgggccgcgtagcacacagcggaatgaaaccagtaactacgaagtcgatcgcaccattcttagagcacagggcgtgatacccgccttgcgacgtctgaccatcgccacctgcgtgatcgcgtcgctccatcataaacgcctgatttgccgcccgcaggttattaagataaccgccaactttggcattcaacaccggctgataccagtcgttgttatcttccaccagcgtgtagtcatacgctcccatattgacgtagccgctgcctgccagactgaactgcgcattgttttgaaactgcgtgggatcagctgcgaaatcaaccactttaatgcctgtcgatgtcggctcaccaatccctgtaatggagttaaccaccacagttgtgttgccagcagtattaccgttcatcaccaattgatcgcttaccgagtcatcgccgtttaa

SEQ ID NO: 122970 - DNA, 1067 bp, Homo sapiens; identical to SEQ ID NO: 121840

SEQ ID NO: 122971 - DNA, 1245 bp, Homo sapiens
atggatgggttaaatacagataaaggttctagtgtcttccacaccccaacagaccgccttgtaatatgttgtcccgtggatgctgatgaacggatgacaactcctcctaggctgtgggaccacgagccaagtaaacctcttttctttacaaattacccagtctcagcgccgtttgttggtctgcgccggggaaacgtccccagggggggttcagggcgggtaatctgtaaaccagttccaaaaccatcgggcgcgatctgaatgacgctcagttgaaatatgccagcgatgtcgaaaggccgtattcaccggcgtattgaagcattcctgtcgcctattgttggtagcggtaatattcccgcccaggttcgggcgcagctggacttcgccagtaaagaccaaccggaagaacagtatcgccctaacggtgatgaatctcatgcggcgcttcgttcacgccagcttaatgagagcgagcaaagcggttccggttatccgggcggcgtaccgggggcgttgtcgaatcaaccggcacctgcgaataacgcgccaatcagcacgcctccggcaaatcaaaataaccgccagcagcaggcgagcacccccagcaatagtgggccgcgtagcacacagcggaatgaaaccagtaactacgaagtcgatcgcaccattcgtcataccaaaatgaacgtgggcgatgtgcaacgaaaattggggattattggacaagggaagaatgaaaaacctttgaaacaattggaaagggtagaggagaaacccaatggggagggctgggaaaaaaaatggcaagggaaggaagtttggaaaaaggaagatgggaccatctacttgcagaaaaacaagctcagggctcccactgattctacattatggtttgccaagaatgggagggttgcaaaaatcgccaaagctctggttgaaccggcaaacaactttaacccgggtgtggatgaagatgacactgagaagctcctagaggtggttcctgaggaattaactaatgagaagttggacctggagcagaaatgcatacacatctatgatgacaaaaggaaacaaaccaagcaaaccccccaggacgtgtttctgaaaagagtgacatctcctcaagagcctcagccaggtccttcaggagggattccagaagaagggattgttatcataggagaggacagctccgtgcaagttcttgcccctgaagatcttccagtggaaaagttgtga

SEQ ID NO: 122972 - DNA, 1511 bp, Homo sapiens
tcacccatctgatgccccagggatgccaaggcacttaggagacccaagagagtgtgtaatccgacatgacagctcaacgttatatgcagcatgacgaatatccgccggcagtggcgcaaaatcctgtgaataggctggctgcccacccgcactgacagtaaacagcgtgcgaccatgaaacgcatttttgaacgccacgatgccgctcttatggctgccgtagcggtcgtgagcgaatttacgcgccagttttagcgccgcttcgttggcttccgcaccggagttacaaaagaagacgcgatcggcaaacgtggcgtcgatcaattttttcgccagtcgcagtaccggctcgttggtgtaaccgttgccggtatgccagaacttactcgcctgttcgttcagcgcttcacgcagttccggatgcgcatggcccagcgcgttcaccgcaatgccacccgcgaagtcgatatactctttcccctgctgatcccacaagcgcgaaccttcgccacgtaccggtataaagggtgccggagcgtaaacaggtatcatccattcatcaaagttttcacgcgtaattggcgtgaagctgacctgtcgctcaagcgagtgtgaacgctgctcaacgacacaggctatcaggaagtgatcacctacagcttcgttgatccgaaagtgcagcagatgatccatccaggcgttgaagccttactgctgccaagcccgatctctgttgaaatgtcagcaatgcgtctttctctgtggactggcctgctggcaaccgtggtgtacaaccagaaccgtcagcagaaccgtgtgcgcattttcgaaagcggtctgcgtttcgtaccagatactcaggcaccgttgggcattcgtcaggatctgatgttagccggtgtgatttgcggtaaccgttacgaagagcactggaacctggcaaaagagaccgttgatttctatgatttgaaaggcgatcttgaatccgttctcgacctgaccggtaaactgaatgaggttgagttccgtgcagaagcgaatccggcactgcatccggggcaatccgcagcgatttatctgaaaggtgaacgtattggttttgttggggttgttcatcctgaactggaacgtaaactggatcttaacggtcgcactctggtgttcgaactggagtggaacaagctcgcagaccgcgtggtgcctcaggcgcgcgagatttctcgcttcccggcgaaccgtcgtgacatcgcggtggtggtcgcagaaaacgttcccgcagcggatattttatccgaatgtaagaaagttggcgtaaatcaggtagttggcggtaaacttatttgacatgtaccgcggtaagggtgttgcggaggggtataagagcctcgccataagcctgatcctgcaaggataccagccgtacacctcgaagaagaggagattgccggctaccggtcgccaaatgtgtagaggcattaaaagagcgatcccaggcatcattgaggaattga

SEQ ID NO: 122973 - DNA, 312 bp, Homo sapiens
cgccatcgctgaggtattaaatctgtggcccgatgccgatcgtcagcaactgcgtactgtgatccgcaacgcgaagaaagagaaagaagggaataagccgccgaaatccgcacgccagattttccagtatctgcgcgagttagcggagaacgaagggtaattttcgttgttgatgtgagtatggtttgccggatacggtgcacctgtaggcctgataagacgcatcaagcgtcgcatcaggcactatgctcaaatgccggatgcggcgtgaacgccttatccggcctacgcatactatatccggctaaggcc

SEQ ID NO: 122974 - DNA, 993 bp, Homo sapiens
ataccaggcatcgccttcctcttcggtcgaatcacatcctgcgcttacatcacgctacgcttaacaccatgtgttgccagtgttacttaccgttcctgtcaccttgtcgaaggaccatttaagaaattctcatgctcaatggcttcaccgccgagcatgatgacaaacgtttttccccgggtggcgcatttggcatcgacgcatgactgccggatgcggcgtaaacgccttatccggcctacggttcaggcacaggtttgtaggcctgataagacgcgtaagcgtcgcatcaggcaatggtgctcggatgccggatgcggcgcacaaattccggcgctggtgatttctaccgccgcgggggtcatcgttacgcgtgtcagcaccgatcaggatgttggcgagcagatggtgaatcagcttttcagtaacccaagcgttatgttgttaagcgccgccgtgctcggtttactcggcctggtgcctggaatgccgaacctgccattgcccaaacagcattgttcattgattctggtgttcagcgaacgccaggttgatgtactgggcgaatgggcaggcgatgctgactgcaccgttatcgcctacgccagtgtgttgccgaaacttcgcgatcgccagcagctatttactcgacagcacccggagctgcccgcggctgggaaaggggaggaggccgaaggggtggagttggggagggtccctcgcgggccccctcgccgcgccccctgcagggcgcacccccggcgggagcgcaaggagctggggcgctcgggacaagggcgcacggaacagccacaatgttatgacactaccacactgccgccgtacgtcgcggcgcaccaaactgcctgctgctggctgacctgccgtttatggcgtatgccacgccggaacaagccttcgaaaacgccgcaacggttatgcgtgccggtgctacggcacaagtctatttcggaaaaacggtcgaccaactga

SEQ ID NO: 122975 - DNA, 858 bp, Homo sapiens
atgcggcgtaaacgccttatccggcctacggttcaggcacaggtttgtaggcctgataagacgcgtaagcgtcgcatcaggcaatggtgctcggatgccggatgcggcgtaaacgccttatccggcctattaagtatgcaaataggcaggccgaaacagcctagggacttgatgccctgcatctcagctgctccagccatggctaaaaggggccaacatagagctcaggccatggcttcagagggtgtaagccccaagccttggaagcttccatgtggtgttgagccttcagtagccagacttgcatataactgcaatctggaccaactgcgctggggcagacggcaggttatgctgtcattcgggacgctctatcacgcatatcctacgactacactagcacctcgactagcgactcgatgtcgtaccaggctcgccgtgcgcagcgtgctcatcacgcatcaactacacaacggccgtcggcgcatacagcgacagtgcaccacacacatagtcgaggccaaacagagcccagacacaaaagggaccagcgacaccgtcaaccacaggcccgccgctagctcggacgtacaaaaccaatcagggctaccgaacaccactggacagagccatcaacacaacaactcgaacgactcaacgatcaagaaggctggccgaaaaacaccgaacacggcacaactcacagcataccacagccgtaaacacactggaagagcaacccacagtgacgactctcacagctaccggaaccatgcccgcacaaccggcatacccagtccggcaagaaaacacacagaggaaaccgtggcggcagctgctgctgtatgtcgactctag

SEQ ID NO: 122976 - DNA, 816 bp, Homo sapiens
atggggccacgttcacccctgcgggagcacattaagaactggctttgcattcttgtcagccttgaattagggtcttacacggcaaacagtctggctgatgacacacgttacatgtgtaggagtactggaaggttccctcatggccctgtgcgctgtgtcgccgacggcgcctcgagccccggggtgacctcccacccatcgagcccggttaagccacgactacacggacccttgccgacacgaaaacacaagactgacagaaagaggaacgtgattatcatggggctttttgatgaagttgtcggtgcctttctgaaaggcgatgcggggaaatatcaggctattttaagttgggttgaggagcagggcggcattcaggtgctgctggaaaaactgcaaagtggcggcttaggggccattctctcaacctggctgagtaatcaacagggcaatcaatcgcggattgcgttcattggccaacgcttccagaacttcacgcggcggtgtttcaacgtgcagcaacgggcgttttttatcacgctgcgtgcgtgcaagttgcttttcgatggtcgtttcaagataaacgacaacgccacgagcggaaagacgaaagtggggatggtgcatgcaattaacgttgctttaacggcaccgtacttccatcgcggtgacgtgccgacgctggacggggcggtgaaactgatgctgcgctatcaggtaggcaaagagctgccgcaggaggatgtggatgatatcgtagctttcctgcacagtctgaacggggtgtacacgccgtatatgcaggataaacaataa

SEQ ID NO: 122977 - DNA, 1179 bp, Homo sapiens
atgtctgaaggctggaacattgccgtcctgggcgcaactggcgctgtgggcgaagccctgcttgaaacgctggctgaacgtcagttcccggttggggaaatttatgcactggcacgtaacgaaagcgcaggcgaacaactgcgctttggtggtaagacaatcaccgtgcaggatgccgctgaattcgactggacgcaggcgcagctggcatttttggcaaagaagctaccgctgactgaggttgaagaagcgaccaacatcagagttgcctgggtgagtcgaacacagcaggtgggaattggtaatgggatcatccggaagcccggaacggccctggaaatctccaggcccttccggaccccaagaggggcaagaaaaacgccggatcgaactgccggattagaccgggcgccagacactggcgcacaactaggcgtccacagggacacataccagcaatggaaggaaccaaaggaacgactagaataccggggcccagtccagccgggccggttccaaccaaatgccgacccgaacttctacagtaaaagccgcgaagctgaacatcaggcttttcttgactggctgctggagacagcacaaacccatcaggtggatgcgattattgttgccggtgatgttttcgataccggctcgccgcccagttacgcccgcacgttatacaaccgttttgttgtcaatttacagcaaactggctgtcatctggtggtactggcaggaaaccatgactcggtcgccacgctgaatgaatcgcgcgatatcatggcgttcctcaatactaccgtggtcgccagcgccggacatgcgccgcaaatcttgcctcgtcgcgacgggacgccaggcgcagtgctgtgccccattccgtttttacgtccgcgtgacattattaccagccaggcggggcttaacggtattgaaaaacagcagcatttactggcagcgattaccgattattaccaacaacactatgccgatgcctgcaaactgcgcggcgatcagcctctgcccatcatcgccacgggacatttaacgaccgtgggggccagtaaaagtgacgccgtaggcaaagagctgccgcaggaggatgtggatgatatcgtagctttcctgcacagtctgaacggggtgtacacgccgtatatgcaggataaacaataa

SEQ ID NO: 122978 - DNA, 621 bp, Homo sapiens
aggctggtggaccgccgttgaacccgattgaaatggcgtagaaatccgtgggacgaaattattgttaagctggaaaaagatccgcagcttaaaacgcagttcctcgaagtctatccgcaaggtttcagtggcgaaaatattactgatgccattgctgaatttgagaaaacattaattacgccggattccccatttgataaatggttgcgcggagatgaaaatgcgctgacggcgcaacagaaaaaaggctatcaattatttaaagataataaatgtgcaacttgtcatggtggtattattctcggcggacgttcctttgaaccgttggggctgaaaaaagactttaactttggggaaattacggcggcggatattggtcgtatgaatgtgactaaagaagagcgtgataaattgcgtcagaaagtacccggtttacgtaacgttgctttaacggcaccgtacttccatcgcggtgacgtgccgacgctggacggggcggttgaactgatgctgcgctatcaggtaggcaaagagctgccgcaggaggatgtggatgatatcgtagctttcctgcacagtctgaacggggtgtacacgccgtatatgcgggataaacaataa

SEQ ID NO: 122979 - DNA, 915 bp, Homo sapiens
tcagtatcctggtctggatctccacggcgctaaagggctgggtgatgggctcgcgggaaaaagataccgacagcttttagtttcctgcctgtcatgttctgtatcgccatcccgctgggcctggcacgcgaaaataaaggcgtagcggcattcgctggcttcatcggttatgcggtaatgaacctcgcggtaaacttctggttgaccaataaaggcattctgccaaccacggatgccgcggttctgaaagccaataacatccagagcattcttgggatccagtcgatcgataccgggatcctcggtgcggtgatcgccggtattatcgtctggatgctgcatgagcgtttccataatatccgcctgccggatgcgctggcattcttcggcggtacgcgcttcgtaccaattatctcctcgctggtgatgggccttgtcggcgcaggcggcacgcaggaagtctgcggtcaaaccgtcagcggcgcactgaccatcttccagcatcgacacctcgatcgcaccggcgttgttcatctcttcacgcacgatgttttcgacttttttcagaacgcgcacgccggtcggcagccaggtatataacccggaggccagcttgcggatcatcccggcgcgcagcatcagctgatggctgatcacctcggcgtcggcaggtgtctccttgagagtggagagcaggtattggctagtacgcatgttgttacggttccagttggaaggtagaacaggcttacctttcttcgcaataagcacgccattagcgtcatagagatcttccagcgcgtagccgttgttctctttagccacttcgtcagattgcggttcgtgcggctgcttgtagttccagctcatcttcatcagcggttctacgcctttaccaccttcggactggtacag

SEQ ID NO: 122980 - DNA, 913 bp, Homo sapiens
atggaccagaagctgttaacggatttccgctcagaactactcgattcacgttttggcgcaaaggccatttctactatcgcggagtcaaaacgatttccgctgcacgaaatgcgcgatgatgtcgcatttcagattatcaatgatgaattatatcttgatggcaacgctcgtcagaacctggccactttctgccagacctgggacgacgaaaacgtccataaattgatggatttgtcgatcaataaaaactggatcgacaaagaagaatatccgcaatccgcagccatcgacctgcgttgcgtaaatatggttgccgatctgtggcatgcgcctgcgccgaaaaatggtcaggccgttggcaccaacaccattggttcttccgaggcctgtatgctcggcgggatggcgatgaaatggcgttggcgcaagcgtatggaagctgcaggcaaaccaacggataaaccaaactggtgtgagcgagctggagcgtattggcgacgtggcggacaaaatctgccgtactgcgctggagaaattctcccagcagcatcagccgttgctggtaagtctggagtcgctgggccgtcataccatccagatgctgcacgacgtgctggacgcgttcgcgcggatggacattgacgaagcggtacgtatttatcgtgaagataaaaaagtcgatcaggaatacgaaggtattgttcgtcaactgatgacctacatgatggaagattcgcgtaccattccgagcgtacttactgcgctgttctgcgcgcgttctatcgaacgtattggcgaccgctgccagaatatttgtgagtttatcttctactacgtgaaggggcaggatttccgtcacgtcggtggcgatgagctggataaactgctggcggggaaagatagcgacaaataa

SEQ ID NO: 122981 - DNA, 1041 bp, Homo sapiens
atgagcagtttccagttcgagcaaataggcgttattcgctcgccctataaagaaaagttcgccgttccgcgccagccaggtctggtaaaaagcgccaacggcgaactgcatctcattgctccctacaaccaggccgacgccgttcgcggcctggaagcgttcagccatttatggatccttttcgtctttcatcaaacgatggaaggcggctggcgtccgactgtgcgtccaccgcgcctcggcggtaacgccagaatgggggttttcgcaacacgctctactttccgccctaacccaattggcatgtcgctggtagagctgaaagaggttgtttgccataaagacagcgtgattctgaagctcggcagtctggatctggtcgatggtacgccggtagtggatatcaaaccgtatctcccctttgccgaatcgcttcccgatgccagtgccagctatgcgcaaagtgcgccagctgcagagatggcggtgagttttaccgcagaggtcgaaaagcagcttttgacgctggagaagcgttatccgcagttaacgctgtttatccgcgaagtactggcgcaggacccgcgcccggcctatcgtaaaggtgaggaaacgggcaaaacctatgccgtctggctacatgattttaacgttcgctggcgcgctcgccttgagcctgttctaccttccaactggaaccgtaacaacatgcgtactagccaatacctgctctgcactctcaaaatagaacctgcaggaatgcactttgcaaagaatagcaacgacgaaaatgtccaggaaaaatcctggagtcagattcagggttattcgttagtggcaggattacgaagcgtggggcacaggagatacatctccaatcaaaagattgcggggcaaagagccagttttccattgctgcatttcgtgcagcggaaatcgtttgactccgcgatagtagaaatggccttgcgccaaaacgtgaatcgagtagttctgagcggaaatccgttaacagcttctggtccatttcgaactccttaa

SEQ ID NO: 122982 - DNA, 502 bp, Homo sapiens
atgcccagagaggaggaatctagagaggcagtctggctacagcaggtttgcgaagctttggtgggctccacccaattcgaacttcccagcagttttgtttacactgtgaggggaaaaccgcctactcaagcctcagtaatggtggatgcccctcactccaccaagctcaagcatctcaggtcaatttcagattgctgcactggcagcaagaatttcaaacccgtggatcttagcttgctgggctccatgggggtgggatccactgagctagaccacttggctccctggcttcaggccccctttccaggggagtgaacagttctgtctcgctggcgttccaggtgccactggggtatgaaaaaaacctcctgcggctagctcagtgcctgcccaaatggctgcccagttttgtgcttgaaaccctggccccttgtggggtaggcctccaagggaatctcccagtctgcagcttgtgaagaccatgggaaaagtgtaatatgtg

SEQ ID NO: 122983 - DNA, 2376 bp, Homo sapiens
tcaaacctgtaatcccagcactttgggagccgagtgggtgataccctgcaacggaatggttttcagcaccgcttccgcatcttcagaacggttcagcgcaatcagcgtttctgccagcagcaggccgatctccccgttctgattcgacaactgccaggcgtctttcagcaatggcagggcatcggtgtaattgctttcctgcatcagttgcatcgcctgctgcgctttcagctcttcttcgcgcggcagcactttatccagcagggcgcggatcgcctcttccggttgcggcccctggaagccatctaccggttgcccgttctggaacagatacacggtcggaatcgcacgcagaccaaactgcgcggcaatcatctgctccgcgtcgcagtccagcttcgccagaataaattgcccgttgtactgcgccgcgaggctttccagaattggggttaactgcaaacagtgctggctacgttcagaccaaaaatagaacagcaccggagtggtcatcgactgttcaagaacatggagtcgctctctgttgtcgatattttctttgacatgggccgccatcggacggtcgttgatggagtcaaagcctacatccggccccagcagtttgaactgacgcaggttgttattacgcagcgcgccaatgtggtactgctgtacccagccgcgacgtgcatattcggcaccaaggaacaccagtaccgcagttttgaactgcgccacttcgtgctcgctcaggggtttcgccagccagacggcgcgccagaatgctgtccagttccgcttcgttcgcgccctcttcaataatgtgtacgatttgcgcgaataaactgttcggatcggcgatcgcgttgttttgcaggctttaaccatgtcctgaacaaagcgctcggagtgcatataaaccactttggcattcggcttgcgcgccataatgccgttacccaccgcatgcagcaggtgagttttacccagacccgtgccgccataaaggaacaacgggttataggcaccgccagggttatccgccacctggcgagccgccgccgcgcgccagttggttagatttacgttagaacgataggtcggttctgccggggccgggacgttatcccaacctgagcgcgtagaaggcgcagcacgttgcggctgcgtttgcgccacctgtgcaggggccgcgacgttgctcgtcactgccgcttgtggcgtttgcgtcaccggtttggtgccgacttcaaaacgcagctgtggggcatccgctccgcagaaactggttagcagtccattgatattattaaggtacttgtcccgtacccaatcgaggacaaaacggtttggcgcgtacagggccagcgtgttatcgctcagttccgcgtcacgcagtaacagcgacgcgaccggaacttcagtaatggcagcgataaacgacaggatgaataccaccgccagaatcggtactgacagcggcaacaggacaaggcggaaggcctgccacggtgtcgcaccatccagcgcagcagcttcttccagcgaactgtcgatggtttcgaaatagcctttgatggtccagacatgcagcgcaatcccacccagatacgcgaaaattacgccgccgtgagtattcaggccaatgaatggaatgtactcacccagacgatcaaacaacgcatacaacgcgaccagtgaaagtactgccgggaacatctggaaaatcagcattcctttcagcagcgtcgctttgcctggaaagcgcatacgggcgaaagcgtaggcgcaggtggtggagagcgccacaatgccaatcgcggaaatcccggcgacctttaccgagttccacagccacagcagtaccgggaatggcggtggcgtaatgcgaccatcagcctgttcaacgctaaaacctaacgccagtttccagtgatcccaggagatttgctccgggatcaggctgccggtcgcaaagtttccctgacgcagcgagatagcgacgaccatcagcagcgggaacataatcgccaccagcaggaagatcagcgtggcaattgctgccgccagaccgaagtcctgacccccgccgccttcaaaagcgatgcggtaggtgtagttaacaagcaggtcggtataaccggctggcgtggtcgtgccaagacgatccgggccgccgttggttaacagttgaatcagcacgaagttgttaaagttaaaggcgaagctggcgatcatcagcggcgtcagcggtttaatcagcagcggcagcgtaatcttaaagaagttctggaacggacctgcgccatccattgctgaggcttcatacaaatcgtccggaatcgctttcagcaagcccatgcagaggatcatcat

SEQ ID NO: 122984 - DNA, 969 bp, Homo sapiens
atgaacgacgcgcactttgtcaacaatctgacgttagcatcagaagtgggtgtttacgctcatataccacgtatacgccccggcaccggcgatatagttggcccctgccaaatcgcccgtggtctgggcattacccgcacgccacaaacgtttgtcgaacagattgtccacgccgccggtcagactgacatacttcgtcacatcccaggtcgcgctcaggccaacaatgctgtgaaggtcgttagcatcgacaaatcttcccgtggctgccagctcagcgttgagtcaacgtatatccgggatgatgaaaaaggtcgccgtggtttggttccctcttcaaatatagtgaagtatggccaaacacgggtcgtaacggtagttaagacacgcagtgctgctgaccgaaggctttactataaacctcacgcattcgcgctgggctttgttgaagcgccacgcggtgaagacgtgcactggagcatgctcggtgataaccaaaaattgttccgctggcgctgccgtgccgccacctacgccaactggccggtgttgcgttacatgctgcgcggcaataccgtttctgacgcaccgctgattatcggtagccttgatccctgctactcctgtaccgaccgtgtgacgctggtagatgtgcgcaagcgccagtcaaaaaccgtgccgtataaagagatcgaacgctacggcattgatcgtaaccgttcgccgctgaaccgatctctatacccgcgcgaagttccatctacaacgttgcagccgttgcgaacgccccgttgccccggaaaaaacctcgcactggctgtgaatgttagcacaggaacaaatgggcagaaaccggaaagttgtgggccaggacgttgccgaatgaaaaagggcgagtataagagaacaatttcggggggtaggaccataatccgggttcacattgcccgccttctgagaaccttctga

SEQ ID NO: 122985 - DNA, 2196 bp, Homo sapiens
ttagcccggttgttgtccaccccgctgatggctgaacaacgccagcaccggcgcaacgcccagttccagcagcgcgaaaaaggaaagagacaattcatcgacgttacccaattgtaccagcgcgggttcaccaggtttaatgccctgacggcgtaaactacacgcgaggttatccgccgcctgattcagctcccgataactcaactgtcgctcgccgtcgataaccgcgatgctgtcactcgcagcatgtcgcgtcagaatgtcagtcagcggcaaatcctgccagtagcctttttcccgatagcgacgggcaaactcttccggccagcgggtgaatggaatgctcatcctcgctcccaacggtgacgacgcaggcacaatccccgctccggcaaacagacgcacctgattttcccgcagcttcgcgcagcggatggtcaccacccattcgccgttaccttcgctgtcacaccaacccacaatgccgccaaacagttcgcggtcgaacggttccagttcaaccactctagaggatcccctgggagatatgcagcgcctgaactcttgatttgttcggtggcttacagtgtgctggaacagccggatgaagatgaaggacgggacgagtattaatattgtgaatcctgtaggcctgataagacgcgtcaagcgtcgcatcaggcatgtgatccagttaccttccggtagaccaataatcgtcagttctggcgcgacgaccagcagttcgcgaatacgctgctcacgggtttcacctttatggccttccggcagcgcgttggtgaagtgcgggttgatttgcagcgggaacagatttagcgcatcgaaaccttgcggatcgacaatcggcatatcgttggtggtacgaatagttgggcaagcaaggttagcgcctgcgctccagccaatatacagagcgccacgtttaaccacgtcagtaattggtgccagcagcccgcgctcgcggcactggaagtgactatccgtactcggacccagcatcaagctcagcagcgtgaagtcggtttgaactccagcggtaaactggttatcacttcccgtaatactgaactgaaactgatcgacgaattcggtcgtactaaagaaagctacaaagtaccttacggtgcggtactggcgaaaggcgatggcgaacaggttgctggcggcgaaaccgttgcaaactgggacccgcacaccatgccggttatcaccgaagtaagcggttttgtacgctttactgacatgatcgacggccagaccattacgcgtcagaccgacgaactgaccggtctgtcttcgctggtggttctggattccgcagaacgtaccgcaggtggtaaagatctgcgtccggcactgaaaatcgttgatgctcagggtaacgacgttctgatcccaggtaccgatatgccagcgcagtacttcctgccgggtaaagcgattgttcagctggaagatggcgtacagatcagctctggtgacaccctggcgcgtattccgcaggaatccggcggtaccaaggacatcaccggtggtctttaccggcggcgatgttttctcccgcgtgatggtccgtgtcaaagagacgttgattcgctggcaatgctggaatttgccctcgacaacatgccggataccccactgctgaccgaaggctttagctataaacctcacgcattcgcgctgggctttgttgaagcgccacgcggtgaagacgtgcactggagcatgctcggtgataaccaaaaattgttccgctggcgctgccgtgccgccacctacgccaactggccggtgttgcgttacatgctgcgcggcaataccgtttctgacgcaccgctgattatcggtagccttgatccctgctactcctgtaccgaccgtgtgacgctgatgcccagccaatgtattgcctgcggtgcctgcgcctgtgcttgtccggcaaatgcgctgactatccagaccgacgaccagcaaaattcgcgcacctggcagctctatctggggcgttgtatttactgtccctcgtctaccaacaacaatggtcctgtcatcagtttcaattagagtcctaaagtcagcagtttcaatgaaagcattactcaacatctttttatcattttctgctgtcggatcaccaaacggattagactttgaagtaatattcaattccat

SEQ ID NO: 122986 - DNA, 1129 bp, Homo sapiens
atgaaaaagcggaaaaccgtgaagaagcgttacgttactgcgctggtgatagtcatcgccggactgatgacgttatggagaattcgtaacgcacccgtgccgacttatcagacgctgattgtgcgccccggtgatttacagcatagcgtgctggcgcccggaaagctagcacgcactagcaaaaattttgcccagtgttatcagggtgcggtattccgcattctcccttgccggcgaaaaaaaaaaacggtaatagcctcgggtgcatggcgtccagaacgcttcaagcggccgatatcggggaaccggatgtcggcttggcagcgattctcggaagaagctggtagaaattcttgcttgctaccgccgaatatggaacaacgcactcagggcattggcattctcgacccacaaatcgcccgtgatttgcgctttgatcacccatacgccgaatacgacaatattccaaaaaacactgtttacctttaccgccgccgatgttttctcacgcgtgatggtccgtgtcaaagagacgtttgattcgctggcaatgctggaatttgccctcgacaacatgccggataccccactgctgaccgaaggctttagctataaacctcacgcattcgcgctgggctttgttgaagcgccacgcggtgaagacgtgcactggagcatgctcggtgataaccaaaaattgttccgctggcgctgccgtgccgccacttacgccaactggccggtgttgcgttacatgctgcgcggcaataccgtttctgacgcaccgctgattatcggtagccttgatccctgctactcctgtaccgaccgtgtgacgctggtagatgtgcgcaagcgccagtcaaaaaccgtgccgtataaagagatcgaacgctacggcattgatcgtaaccgttcgccgctgaaccggaggtgcacaggggaagggtggaccagggcctggattacgctgccgctgctgattaaaccgctgacgccgctgatgatcgccagcttcgcctttaactttaacaacttcgtgctgattcaactgttaaccaacggcggcccggatcgtcttggcacgaccacgccagccggttataccgacctgcttgttaatatttaa

SEQ ID NO: 122987 - DNA, 2469 bp, Homo sapiens
atgctgcgcggcgtaaacgtactggcagatgcagtgaaagttaccctcggtcccaaaggccgtaacgtagttctggataaatctttcggtgcaccgaccatcaccaaagatggtgtttccgttgctcgtgaaatcgaactggaagacaagttcgaaaatatgggtgcgcagatggtgaaagaagttgcctctaaagccaacgacgctgcaggcgacggtaccaccactgcaaccgtactggctcaggctatcatcactgaaggtctgaaagctgttgctgcgggcatgaacccgatggacctgaaacgcgccagccgtagccgcaaaggttatggacctgcgcgtattcgccaggaactgaatcagaaaggtatttcccgcgaagcgacagaaaaagcgatgcgtgaatgtgacatcgactggtgcgcactggcgcgcgatcaggcgacgcgaaaatatggcgaacctttgccaactgtcttttcagaaaaatcaagaaaacttatcgccggagtcaaacgggcttttacgcaccaggcggtgaacgccggtttctgtacgcagccagccgtaagcgtaatcgccggagattttgatcgtcacggatttaatacccgccacttcaccttccgactcttcgatgatttcagttttgaaaccacgcgattctgcccagcgcagatacatacgctcaagcatgctcgcccagtcctgtgcttccgtaccgccagaccccgcctgaatatcgaggtagcagtcggcgctgtcatattcgccagagaacatacggcggaactcaagctgcgccagtttttccagggcgccccgcaaaaagcggttatttctattcctgtggtcccacaggtgactggtgtggtgattgaagtgacggataagaaaaatacgctgattaaaaaaggtgaggtgctatttcgactggacccgacgcgttatcaggcgcgggtggatcggctgatggcggatatcgttaccgcagaacataaacagcgggcgttgggcgcagagttagatgagatggcggcgaatactcagcaggcaaaggccacgcgggataaattcgctaaagagtatcagcgttacgcacgtggcagccaggcgaaagtaaacccgttttcagaacgcgatatcgatgtggcgcggcaaaattatctggcgcaggaagcctccgtgaagtcatcggcggcggaacaaaaacagatccagagccagctggatagcctggtgttgggtgaacattctcaaatcgccagcctgaaagcacagctcgcggaagcaaaatataaccttgagcagacgatagtgcgtgcgccgagcgatggttatgtgacccaggtactgattcgtccgggtacctatgccgcgtcgctgccgctacgtccggtgatggtgtttatccgatcagaaacgtcactacgcacacactgcccggggcacgccgactatgttaaaaacatgatcaccggtgctgctcagatggacggcgcgatcctggtagttgctgcgactgacggcccgatgccgcagactcgtgagcacatcctgctgggtcgtcaggtaggcgttccgtacatcatcgtgttcctgaacaaatgcgacatggttgatgacgaagagctgctggaactggttgaaatggaagttcgtgaacttctgtctcagtacgacttcccgggcgacgacactccgatcgttcgtggttctgctctgaaagcgctggaaggcgacgcagagtgggaagcgaaaatcctggaactggctggcttcctggattcttatattccggaaccagagcgtgcgattgacaagccgttcctgctgccgatcgaagacgtattctccatctccggtcgtggtaccgttgttaccggtcgtgtagaacgcggtatcatcaaagttggtgaagaagttgaaatcgttggtatccaagagactcagaagtctacctgtactggcgttgaaatgttccgccaactgctggacgaaggccgtgctggtgagaacgtaggtgttctgctgcgtggtatcaaacgtgaagaaatcgaacgtggtcaggtactggctaagccgcgctacgccgattatcttccgtttaaagacgccgacggcagcgtgctcgatcaggggattgcgctatggttctctaaccgtaaggccgagcactacttcctcaacggtaaactcgctgctgtgcgtatggatgagttcaagtatcacgtcctgattcagcaaccttacgcttatacccagagcggatatcagggtggattcaccggcacagtaatgcaaacggcgggatcgtcggtgtttaacctctacaccgatccgcaggaaagcgactccatcggcgtgcgccatattccgatgggtgtaccgctacagaccgaaatgcacgcgtatatggagatcctgaaaaaatatccaccacgcgcgcagattaaatctgactaa

SEQ ID NO: 122988 - DNA, 2907 bp, Homo sapiens
atgctcgataagctcgacgccgccttacgttttcaacaagaggcgctcaatctgcgcgcccagcgtcaggaagtgctggcagcaaacatcgccaatgccgatacccctggttatcaggcgcgcgatatcgattttgccagtgaacttaaaaaagtcatgcaacgtggacgggatgcaaccagtgtggttgcactgacgatgacctcaacgcaacacattccggcgcaggcgctgacgcctcctaccgcagaactgcaataccgtattccggaccagccttcgcttgacggtaataccgtcgatatggatcgcgaacgcacccagtttgccgataacagcctgcaataccagatgagccttagcgcgttgagcgggcaaatcaaaggcatgatgaactcccagcgcctgaacgtggcggccagtaatctggcgaatgctgatagcgtgaccggtcccgatggacagccatatcgggcaaaacagtggagtggtcaggaagtggaaacgaaacgctttgataaagtcagcaaccgaatgcgtcttcaggggatgaaaatggtttcagcctcttccatctctgatccgatcattcagctgatcgcctctttggcgctggcgtttgttctgtatgcggcgagcttcccaagtgtcatggatagcctgactgccggtacgattaccgttgttttctcttcaatgattgcactgatgcgtccgctgaaatcgctgaccaacgttaacgcccagttccagcgcggtatggcggcttgtcagacgctgtttaccattctggacacagccacggagaaacgagtgaagggacatatgttcgtggactattttgcactgggagtgcttattttcgtatttctgctgatcttctatgggatcattatcttacatgatattccctacctgattgccaagagacgtaatcatcctcatgccgacgccattcatgttgctgcttggcagaaatacattcgtggcctgttctgcggcggcacgctgtgcgacgaaaccatggttacgcccggggctcgaaacttggggataaaaaaaaaccccaattgggggcccgggacttggttgcctaaccacgcaaacattcagcccgatccggaattccgcctgaaagatatcaaccgcagcatcaaacacaccttcctcgactttggcgatgacgacttcaccaatggcaagccgcacccgatgattgaccccaccaaccgcatcagtcgcttgatcgaagaggcgcgcgatccagaagtggcggtgatcgtgatggattttgtgctcggatttggatcgcatgaagatccggtcggctccaccatcgagacgatcaaagaagcgaaagcgatcgccgctgccgaaggacgcgagttgatcattctcgcctatgtgctgggtaccgatcttgatacgccatcgttagaacaacaaagccagatgctgcttgatgccggagtgattctggcgagcagcagcaccaataccggattgctggcgcagtggagccgtgaaaaagcagcatgtagaagtgactcaactcgactggacgccgccgggcaggcaatatgcaggccctataccgtgttctcgtcgcggctattgcccgttgccccgttcgggcagtgttcgatgggccgatctctccctccggcgcggatctgccggccatcctggacgaaagtggcgaatttagtgccgaaaaccacctttatcgatggtgtggaccagacatccttcttcctgggaacaaatggtcagtctaaccgtaaggccgagcactacttcctcaacggtaaactcgctgctgtgcgtatggatgagttcaagtatcacgtcctgattcagcaaccttacgcttatacccagagcggatatcagggtggattcaccggcacagtaatgcaaacggcgggatcgtcggtgtttaacctctacaccgatccgcaggaaagcgactccatcggcgtgcgccatattccgatgggtgtaccgctacagaccgaaatgcacgctcccggtttgccgctggcatcgagcatgaagcggtggattcggcgtgcgaccggctttatattcggcaaggaacagttcgaagacgttgtcccagtactcggcagcaaagttaacggtgtgcagttcaatgccgagcttgtcgcagacagcctgggcatcagccagatccgctgccgctgtgcaatattcctcaccgtcgtcttcttcccagttcttcataaacaggccttcgacctgatatccctgttgttgcaacagccaggcagaaacggaggaatcgacaccgccggacatgccgacgattactttttttgcggtttcagacattggatcactcacgacattgaacttcaaggcggcgcacgccagaaggatgccgcagaccattatctggcgggagatatcgaatccctgccgttagcgactgcgacgttcgatcttgcatggagcaatctcgcagtgcagtggtgcggtaatttatccacggcactccgcgagctgtatcgggtggtgcgccccaaaggcgtggtcgcgtttaccacgctggtgcagggatcgttacccgaactgcatcaggcgtggcaggcggtggacgagcgtccgcatgctaatcgctttttaccgccagatgaaatcgaacagtcgctgaacggcgtgcattatcaacatcatattcagcccatcacgctgtggtttgatgatgcgctcagtgccatgcgttcgctgaaaggcatcggtgccacgcatcttcatgaagggcgcgacccgcgaatattaacgcgttcgcagttgcagcgattgcaactggcctggccgcaacagcaggggcgatatcctctgacgtatcatctttttttgggagtgattgctcgtgagtaa

SEQ ID NO: 122989 - DNA, 922 bp, Homo sapiens
atggcacgggccgacacagtttctgtcccaatgttcatgggactggcggcgaagccttgttggagggacacggagccgaatacgggttatcgtggccctcatgtccgcaatattcaactgacccacgaccctcggctagattacagatcgatccgattgatatcaacgatatcggccagaccttccacgaacggctgcaccccgacgcctgccgtttccaatgccatcctggttcacaataaaaaaggtggcccgctggcagacggtatcgtgattacaccgtcccataacccgccggaagatggtggaatcaaatacaatccgccaaatggtggcccggctgataccaacgtcactaaagtggtggaagacagggccaacgcactgctggccgatggcctgaaaggcgtgaagcgtatttcccttgacgaaagcgatggcatccggtcaaaaaacgatgtcatcgacactagtgacgatgacatgtgatgacaatgtttatcgcgaaggagcaatgaggcatcctggagcgaaagtggcgaatttagtgccgaaaaccacctttatcgatggtgtggaccagacatccttcttcctgggaacaaatggtcagtctaaccgtaaggccgagcactacttcctcaacggtaaactcgctgctgtgcgtatggatgagttcaagtatcacgtcctgattcagcaaccttacgcttatacccagagcggatatcagggtggattcaccggcacagtaatgcaaacggcgggatcgtcggtgtttaacctctacaccgatccgcaggaaagcgactccatcggcgtgcgccatattccgatgggtgtaccgctacagaccgaaatgcacgcgtatatggagatcctgaaaaaatatccaccacgcgcgcagattaaatctgactaa

SEQ ID NO: 122990 - DNA, 1584 bp, Homo sapiens
atggtgcctaaagccattaacagtgtgatttggcgtattggcctgttttacgtcggctccgtggtgttgctggttatgttattgccgtggagcgcgtatcaggcggggcaaagtccgttcgtgacgtttttctctaaactgggtgtgccatatatcggcagcattatgaacattgtggtgctgaccgctgccctctccagcctgaattcaggtctgtactgcaccggacgtattctgcgctcaatggcgatgggcggttccgcaccgagttttatggcgaaaatgagtcgtcagcatgtgccgtatgccgggattctggcgacactagttgtgtatgtcgtcggcgtattcctcaactatctggtgccgtcgcgcgtatttgagattgtgttgaacttcgcgtcgctgggaatcatcgcttcatgggcgtttatcatcgtgtgccagatgcgcctgcgtaaagcgattaaagaaggcaaagcagcggatgcccactttacgccctaccacgcgacgcccctgcgcaacgtcatgttgcacatttatgtgctgaatggcgtaagccgcttcagcgttatcgataccaatcagatcgcgcagcggtgcaatcgcttcgccctgctctgcggcgcggcggcgtgcgaggaaattcagcaccagttgattgaaagcgtcggcatgttcccactgcgcccagtgaccacagtcgcggaagatatgcagttcagaaccggcaatgccggacagcagacgcagacccgcatccatcggcacaaagcggtcgttgcgcccccagacaatcagggtttgcgctttgatttccgccagacgtgggccaaaatccgggaactgtttcggattagcttccaggctcttaacgaagttttccaggtgatcgcggcgcgacagcatattattcaggcgcgcttcaaacagggcgtcggtcaaatcgctgggttctcaaacgccacgctggcagaacgggatgaagagctggctatcctccaaaaaggccgcgacatacttcgcgaagcgcctgaaatgaagtatgtctttattgaaaaacatcaggctgagttcagcatcaaagcaatgtgccgcgtgctccgggtggcccgcagcggctggtatacgtggtgtcagcggcggacaaggataagcacgcgtcagcagttccgccaacactgcgacagcgttgtcctcgcggcttttacccggtcaaaacagcgttacggtgccccacgcctgacggatgaactgcgtgctcagggttacccctttaacgtaaaaaccgtggcggcaagcctgcgccgtcagggactgagggcaaaggcctcccggaagttcagcccggtcagctaccgcgcacacggcctgcctgtgtcagaaaatctgttggagcaggatttttacgccagtggcccgaaccagaagtgggcaggagacatcacgtacttacgtccagatgaaggctggctgtatctggcagtggtcattgacctgtggtcacgtgccgttattggctggtcaatgtcgccacgcatgacggcgcaactggcctgcgatgcctcttgcgatggttga

SEQ ID NO: 122991 - DNA, 1236 bp, Homo sapiens
atggcgcatatcgttaccgcagaacataaacagcgggcgttgggcgcagagttagatgagatggcggcgaatactcagcaggcaaaggccacgcgggataaattcgctaaagagtatcagcgttacgcacgtggcagccaggcgaaagtaaacccgttttcagaacgcgatatcgatgtggcgcggcaaaattatctggcgcaggaagcctccgtgaagtcatcggcggcggaacaaaaacagatccagagccagctggatagcctggtgttgggtgaacattctcaaatcgccagcctgaaagcacagctcgcggaagcaaaatataaccttgagcagacgatagtgcgtgcgccgagcgatggttatgtgacccaggtactgattcgtccgggtacctatgccgcgtcgctgccgctacgtccggtgatggtgtttatacccgatcagaaacgacaaatcgtggcgcagttccgtcagaactccttgctgcgactggctcctggcgacgatgcggaagtggtgtttaatgctctgccagttcttcagctggcctacgcagtcatccatccacgccccgccgcgcttgttttcacgggcatacagatcgaggtagaagctaccgcgcagttcgttattttcgtcatacagttcgaccgcatcccacggcacaccgctgataccggaaacaccagcggtttcgatgcgggtcagcatatggtgcaggccgtgaccgaactcgtggaagagggtgatcacttcgtcgtgagtgaacagcgccggtttaccatttaccgggcggttgaaatgtattgctggtgtgaaggtctggcggtattactgcatctgaacccacaccttcaatgggaagttcacgggctggaagggttaagtaagaagaactggtatctgcttatttgtaaccaccgtagttgggcagatattgtcgtactgtgcgtgctgtgtattcgccccagaatttctccgcatcaaataccggctgtttttccagacgaccaaaatagaggccacagcgacgagcgctgtcgactttattcaataaaactaaaggaaggaaggttcccttccacaaagccagagctgacaaagcatggcaagataaatggtacaggttcctacaacatttttaggagcagctcaggttctggggtgagcctgaaagctcagggaaatagttacattagctcctgccagcagcagctgctgctgctgtag

SEQ ID NO: 122992 - DNA, 1548 bp, Homo sapiens
atgtttctgaaaaatctgccggaaatagccaacgtcattaaaccgtattgcatggagcaggccgacaacgtcgagtcactgcataacctgttgctgcccgccgatgcgccatttacgacatttgaagggcaaggattgttcagccataagatcctgattcagacgcaagttcccgggtatgacagagcaatccagagcaacaacctttgtggcattacgacggggcaccagcgcaccgacatccaccggttaaactctcatttcggcaaattgcagtgctgcaggtcagctttacgacgtggcggccaggcggctgtatacccgagatcagaacgcgataccgatgtggcgcggcaaaattatctggcgcaggaagcctccgtgaagtcatcggcggcggaacaaaaacagatccagagccagctggatagcctggtgttgggtgaacattctcaaatcgccagcctgaaagcacagctcgcggaagcaaaatataaccttgagcagacgatagtgcgtgcgccgagcgatggttatgtgacccaggtactgattcgtccgggtacctatgccgcgtcgctgccgctacgtccggtgatggtgtttatacccgatcagaaacgacaaatcgtggcgcagttccgtcagaactccttgctgcgactggctcctggcgacgatgcggaagtggtgtttaatgctctgccaggcctgcaggttcgcgtaaggtatgtaatcacctacctggtacctcagcgagacggcattatcgacctgaaagaactagaagcagcgatgcgtgacgacaccatcctcgtgtccatcatgcacgtaaataacgaaatcggcgtggtgcaggatatcgcggctatcggcgaaatgtgccgtgctcgtggcattatctatcacgttgatgcaacccagagcgtgggtaaactgcctatcgacctgagccagttgaaagttgacctgatgtctttctccggtcacaaaatctatggcccgaaaggtatcggtgcgctgtatgtacgtcgtaaaccgcgcgtacgcatcgaagcgcaaatgcacggcggcggtcacgagcgcggtatgcgttccggcactctgcctgttcaccagatcgtcggaatgggcgaggcctatcgcatcgcaaaagaagagatggcgaccgagatggaacgtctgcgcggcctgcgtaaccgtctgtggaacggcatcaaagatatcgaagaagtttacctgaacggtgacctggaacacggtgcgccgaacattctcaacgtcagcttcaactacgttgaaggtgagtcgctgattatggcgctgaaagacctcgcagtttcttcaggttccgcctgtacgtcagcaagcctcgaaccgtcctatcgttgcgcgcgctgggtacggcagttttgggatgaacccgacgagagactgatacgtagtccccggggtaccgagtctgagaatcgagacattcccgtcgtgcctcgcgcgggtcgtacgtgcgcgctggtgccgcatgccgagcgtgagaagtggaagtag

SEQ ID NO: 122993 - DNA, 1263 bp, Homo sapiens; identical to SEQ ID NO: 121202

SEQ ID NO: 122994 - DNA, 1468 bp, Homo sapiens
atggtttataccaacggtagcccagtgaataccggctttactgagaacgccgatctgtttggctggtttggtattggtcgtccgctgggcgaaccgacgccagtctggatcatggggattgtcttcctcgcggcctggtacatgctgcatcacacgcgtctggggcgttacatctacgcgctgggcggcaacgaagcggcaacgcgtctttctggtatcaacgtcaataaaatcaaaatcatcgtctattctctgtgtggtctgctggcatcgctggccgggatcattgaaatggcgcgtctctcctccgcacaacccacggcggggactggctatgagctggaaaaatggcttcgtagcttcctggctgtctgtcacattcggaatataaaccagaacgttcatgactgcttacagcatctcgccgttcagtatcgcgatatcccgctgctgtctcgtacccacggtcagccagccacgccgtcaaccatcggtaaagagatggcaaacgtcgcctaccgtatggagcgccagtaccgccagcttaaccaggtggagatcctcggcaaaatcaacggcgcgttgactggcatcagtttcagcgaagagttcgtcacctcgctgggtattcagtggaacccgtacaccacccagatcgaaccgcacgactacattgccgaactgtttgattgcgtagcgcgcttcaacactattctgatcgactttgaccgtgacgtctggggttatatcgcccttaaccacttcaaacagaaaaccattgctggtgagattggttcttccaccatgccgcataaagttaacccgatcgacttcgaaaactccgaagggaatctgggcctttccaacgcggtattgcagcatctggcaagcaaactgccggtttccgtggttcatcagaaccgctgtataccggacagcctgcccgccgtggaatggctgacctacggcagcggctggctgtcaggcatgaaactcggcgacacaccgctggtggagtacacccgcgaccgcctgcaccgggaaacgctgcgcagcttcggccgttatgaactcaccaccgcttatacccctgccgggcagttacagagccagcacctgaacagcctgctgtctgaccgcgattacacctggaacgacaacggcgaactcatccgcatcagcagcccgcgccagacccggagttacagctacagcaccaccggcaggctgaccggcgttcacaccaccgcagcgaatctggatatccgcatcccgtataccacagacccggcaggctccaaaaaggcgggtaaacgcctgggtcgtggtatcggttctggcctcggtaaaaccggtggtcgtggtcacaaaggtcagaagtctcgttctggcggtggcgtacgtcgcggtttcgagggtggtcagatgcctctgtaccgtcgtctgccgaaattcggcttcacttctc

SEQ ID NO: 122995 - DNA, 2469 bp, Homo sapiens; identical to SEQ ID NO: 122987

SEQ ID NO: 122996 - DNA, 1359 bp, Homo sapiens
atgtctacccggtctgaagctggtgcggctgctgtacaggctggaggaacgaaatgcgcggcgcacgagcgcggcggtggatgccacgtgaagagccggggcgtggcttgcgcagtgcgggctgacggtggagcaactggccagacacggtggacgccggatatgacaacacgcgctcatctttatcactgcgaccaccggggactgccgctggcgcttatcagcgaagacggcaatacggcgtggagcgcggaatatgatgaatggggcaaccagcttaatgaggagaacccgcatcatgtgtatcagccgtaccgtctgccagggcagcagcatgatgaggaatcagggctgtactataaccgtcaccggtactacgatccgttgcaggggcggtatattactcaggacccgatggggttgaaagggggatggaatttatatcagtatcctttaaatccactacaacaaattgaccctatgggattattgcagacttgggatgatgccagatctggagcattgacctggtacggctgggacggcgaccggctgaccacgatacagaacgacaggagccgcatccagacgatttatcagccggggagcttcacgccactcatcagggtcgaaactgccaccggtgagctggcgaaaacgcagcgccgcagcctggcggatgcccttcagcagtccggcggcgaagacggtggcagtgtggtgttcccgccggtgctggtgcagatgctcgaccggctggaaagtgaaatcctggctgaccggaagagagcagcaaccacatggtcgcataaccactatgcaaataagaaggagggaatcaaagccaccggatatagactggcacagactttaggtttcaaatgtgaagaatcttcggtgttccgtgtcaccagaaagtcacattctagttttgtgtggttggataaggcggttacgccgcatccgacatccaacgtccgagccggttgcctgatgcgacgctggcgcgtcttatcaggcctacaccgctgtgaagtgctccacccccatacgccacatccggcataccatgccggatgtggcgtatcattacaacgcaatatccgccacttctttttgaacgggttgcggtttcaactgcggtttcggcgtactatctgctgcctgcggcttgtcgtagttcaaccccagcacttcgctggtgtactgcaactcgcgttctgttgccgctacatcaccgttcagcttgcgtccataagacggaacgatcgctttcaacgtagcctgccattgcgggctggaaacacgatcgccaaatactttttccagcagattcaacataatcggcgcggcggttga

SEQ ID NO: 122997 - DNA, 1179 bp, Homo sapiens
atgggccggcgcgtgctcacgcctgaatcccagcagtcattcacccgcgaatttagcaacttattcgactgctctccccgtgaataccgccaccgtgattattgggatctcgcaaatatcttcccgtcgtgtttaatacgtcaacagcaaaagacggagttggtctgcctgctgtgtccccattggccaaaacgtaaacagccggcaaactccaaactgggcgatccattggcactggtgaaagccgcgcacactttagtgctccagcattttgctatcgcaatgtgccagtcgggaacattctgctggacttcctgcaccgcaaccacttttacgcctgacgatcgaccgtgtactgatgaaaggcagtccagctttcgattcaatggacgcactgcagcgggcagtaacaatgctggggtcatggagatgattaacatcgacttactgacgacaatgctgcttgagccacaactgccgcaaatcagtagcgccagcttgacggtgaacaaccggcatttgctctatggtaatgggctgcctttgcttaatgcgcgcagccagcaatgtattggtgtagagattttgctgcgctggaacaatccgcgtcagggctggatttcaccggatgtgtttattcctatcgcggaagaacatcatttaattgtgccactgacccgctatgtgatggcagaaaccattcgtcagcgccatgttttcccgatgagtagtcagtttcatgttggcattaacgtcgcacccagccattttcgccgtggtgtgctgataaaagatctcaatcagtactggtttagcgctcacccgattcagcaactgatcctcgaaatcaccgaacgcgatgccttactggatgttgattatcggattgcccgcgagctgcatcgtaaaaacgtcaaactggcgattgatgacttcggcaccggcaacagctcgttttcctggcttgaaacattacgtcctgacgtgctgaaaattgataagtcatttaccgcagctataggttctgacgcggttaactcgacggtgaccgatatcatcatcgcgctggggcaaagactgaatattgaactggtggcggagggcgtggaaacgcaagaacaggcgaagtatttgcgccgtcatggcgtgaatttgcaaggtaatgaagaacgaacgtaa

SEQ ID NO: 122998 - DNA, 2847 bp, Homo sapiens
  misc_feature (1)...(2847): n = a,t,c or g
atggctgaaacccagcagcaatttaaaaaaagaatggcagcaagcgggctggaaacacgtttcgatgaagtggggaatttatacggtcgcctgaatggcaccgaatatccacaggaagtggttctgagcggttcgcatatcgataccgtggttaacggcggtaaccttgacgggcaattcggcgcgctggcggcgtggctggcaattgactggctgaaaacgcaatacggcgcgccgctacgtacggtcgaagtggtggcgatggcagaagaagaaggcagccgcttcccgtatgtcttctggggcagtaaaaatatttttgggctggcgaatcctgacgacgtgcggaatatctgtgatgccaaaggaaatagttttgtcgatgcgatgaaggcttgcggatttactcttccgaacgccccactaactccgcgtcaggatattaaagcctttgttgaactgcatattgaacagggctgtgtgctggaaagaattaccgcctgggataaacctgattgccatcaccctgcaccatcatgcagatctttcggggcatttccccgaagaaatcggacctttattgttcgcgggtttctcttccgcgtggcaaaacggcccatcggcattttcttggcaaaaacacggttcagcccagacatcgtccatcgcggttttgcacagaacaccacgacatgctggatgtcttgcgcaatgcgacttcactcgggcgtttttccagattatgctgaaaaattacctcaggaagaaaagatggaaaaagaagattcatttccccaacgcgtctggcaaatcgtcgccgctattcccgaaggctatgtcaccacttacggtgatgtggcgaaacttggcgggatcgcacccggccgcgcgccaggtgggcgcgtcagcgacaggcattactggcagaaggagctggaactgccgaagacggattcacctgagttggtgaagtcgaagatgctgcaagagatgggccgtgaaccgacgccgaaagaactggctgaacgtatgctgatgccggaagacaagatccgcaaagtgctgaagatcgccaaagagccaatctccatggaaacgccgatcggtgatgatgaagattcgcatctgggggatttcatcgaggataccaccctcgagctgccgctggattctgcgaccaccgaaagcctgcgtgcggcaacgcacgacgtgctggctggcctgaccgcgcgtgaagcaaaagttctgcgtatgcgtttcggtatcgatatgaacaccgactacacgctggaagaagtgggtaaacagttcgacgttacccgcgaacgtatccgtcagatcgaagcgaaggcgctgcgcaaactgcgtcacccgagccgttctgaagtgctgctaaacagcaaaatcagcagacgtcttctgaacgtgaactggagatgtctaccgagattgcacgtctcaaacgccagctggcagaacgggatgaagagctggctatcctccaaaaggccgcgacatacttcgcgaagccatgaaatgaagtatgtctttattgaaaaacatcaggctgagttcagcatcaaagcaatgtgccgcgtgctccgggtggcccgcagcggctggtatacgtggtgtcagcggcggacaaggataagcacgcgtcacagtttccgccaacactgcgacacgnttgtcctcgcggcttttacccggtcaaaacagcgttacggtgccccacgcctgacggatgaactgcgtgctcagggttacccctttaacgtaaaaaccgtggcggcaagcatgcgccgtcagggactgagggcaaaggcctcccggaagttcagcccggtcagctaccgcgcacacggcctgcctgtgtcagaaaatctgttggagcaggatttttacgccagtagcccgaaccagaagtgggcaggagacatcacgtacttacgtacagatgaaggctggctgtatctggcagtggtcattgacctgtggtcacgtgccatggcgctgttgcggcgtaagagccccgggaacgttatcgttcacacggaccgtggaggccagtactgttcagcagattatcaggcgcaactgaagcggcataatctgcgtggaagtatgagcgcaaaaggttgctgctacgataatgcctgcgtggaaagcttctttcattcgctgaaagtggaatgtatccatggagaacactttatcagccgggaaataatgcgggcaacggtgtttaattatatcgaatgtgattacaatcggtggcggcggcacagttgctgctcgaggaggagtcccgtgagcagtaaagtcgaacgtgaacgacgtaaggcgcaactgcttagccagatccagcaacaacggctggatctttccgccagtcgtcgtgaatggctggagacaacaggcgcttacgatcgtcgctggaatatgctgctaagtctgcgctcctgggcgctggttggcagtagcgtgatggcgatctggacgattcgccatcctaatatgctggtccgctgggccagacgcggttttggcgtatggagcgcctggcgtctggttaaaacgaccctcaagcagcaacacgttcgcgaataccggaggcctggtatgagcaaccaaggcgaataccccgaagataatcgggttgggaagcacgagccgcacgatttaagtttgacccgtcgcgatctgattaaagtgaggcgcaacagcgcgaccgccgtggtttatcctcattctaccgctggcggcaagcgttccggcagctacacccgcgccagagataatgcccctgacactgaaggtgaacggcaaaaccgagcagcttga

SEQ ID NO: 122999 - DNA, 1695 bp, Homo sapiens
atgcgctcggacccggatacttcagttaatgaaattgagacgaaactttctgccctactgggtagtgagaccactggtgaaatcctttttgacctcttgtgcgctaacggtccagagtggaaccgcttcgttacgctggaaatgaaatatggccggatcatgctggatacggccaaaattattgatgagcaggacgttccgacacatatcctgagcaaactgacttttactttacgtaatcatcctgaaggagtggtgatgaaaaattttgaagttctgcagccactacagaactccctttccggtctaccgctatgggtatctgaacgtatattgcagcagataaatcagttaacccactacgagccagtgatcggcatcatgggtaaaactggggcgggaaagagtagcctttgcaatgccctgtttgccggtgaagtatcgccggtcagcgatgtagcggcctgtacacgtgatcctttacgctttcgcctgcagattggagaacactttatgaccatcgtggatctgcccggcgtgggcgaaagtggcgttcgcgataccgagtatgctgcgctgtaccgcgaacaacttccccggctcgacctgattctgtggctgattaaggctgatgatcgggcactggcgactgatgagcatttttaccgtcaggtgattggcgaagcataccggcataagatgctgtttgttatcagccagtcagacaaagctgaacccaccagcggtggaaatatcctttccacagagcagaaacaaaatatcagccgcaaaatctgcctgctgcatgagctattccagcccgtgcatccggtgtgtgccgtgtcggttcgcctgcacccggtagtagcgctactgcaacaattccgcacggatgatgagcggactcaccggtaccattacgacagtcagcaccggctggtcgactacacgcggacacaatatgaagagccgctggtcgaaagtcgctatctttacgacccgctgggccgcagggtggcaaaacgggtgtggcggcgtgaacgggacctgacgggctggatgtcgctgtcacggaaaccgcaagtgacctggtacggctgggacggcgaccggctgaccacgatacagaacgacaggagccgcatccagacgatttatcagccggggagcttcacgccactcatcagggtcgaaactgccaccggtgagctggcgaaaacgcagcgccgcagcctggcggatgcccttcagcagtccggcggcgaagacggtggcagtgtggtgttcccgccggtgctggtgcagatgctcgaccggctggaaagtgaaatcctggctgaccgggtgagtgaggaaagccgccgctggctggcatcgtgcggcctgaccgtggagcagatgcaaaaccagatggacccgcacggaagggacaacagcgtggtaccagaatacgatgaatggggtaacctgctgaatgaagagaacccgcatcagctgcagcagcttatccgcctgccggggcagcagtatgatgaggagtccggcctgtattacaaccgccaccgctattatgacccgctgcaggggcgatatatcactcaggatccgattgggctgaaagggggatggaatttttatcagtatccgttgaatccgatctcagacatcgaccccctgggtttatctatgtgggag

SEQ ID NO: 123000 - DNA, 1398 bp, Homo sapiens
  misc_feature (1)...(1398): n = a,t,c or g
atgggcgcttacgctatcgatctgctgctggcaggttacggcggtcgttgtgtaggtatccagaacgaacagctggttcaccacgacatcatcgacgctatcgaaaacatgaagcgtccgttcaaaggcgtggctgcgaccagcaacccgccaatccaaccgtgcgccagcggactgccactgcggcccataatccgccagctgcgcgcactgtccaccgtgatgatgccagacggatacacaacagcggaaagaccgcgacaccggcccacgccgcacccacaccggcggcgaacccagcgcaatacagtccaggctaacggcacccccctgcggaacaccgacccccccgaccacgccaagacccggcacccgaccacagacaccctacatacaaatagtatcaccagtaaaaaccctgaagccctgaagcttgctgaacgcatcggtgttactgccgcagcccgtgaactcagcctgtatgaatcacaactctacaactggcgcagtaaacagcaaaatcagcagacgtcttctgaacgtgaactggagatgtctaccgagattgcacgccgcgacatacttcgcgaagcgcctgaaatgaagtatgtctttattgaaaaacatcaggctgagttcagcatcaaagcaatgtgccgcgtgctccgggtggcccgcagcggctggtatacgtggtgtcagcggcggacaaggataagcacgcgtcagcagttccgccaacactgcgacagcgttgtcctcgcggcttttacccggtcaaaacagcgttacggtgccccacgcctgacggatgaactgcgtgctcagggttacccctttaacgtaaaaaccgtggcggcaagcctgcgccgtcagggactgagggcaaaggcctcccggaagttcagcccggtcagctaccgcgcacacggcctgcctgtgtcagaaaatctgttggagcaggatttttacgccagtggcccgaaccagaagtgggcaggagacatcacgtacttacgtacagatgaaggctggctgtatctggcagtggtcattgacctgtggtcacgtgccgttattggctggtcaatgtcgccacgcatgacggcgcaactggctgcgggctgccntaagccgctttggggaacgccctctttcccggggcccgcttgtggcctggcaccctcttccgcgggggtgcttccccgaggctttgttcccgcggtgtggctcgactctgaggatcccgaggagtatgtgggcagcagtgatttcctgactaaaatgcaaagtatgaagaaagtggatttaaaaaaaaatagagccgccacagacgcagacgggcagttcagccccagatgctgcatgcctgagaaatatgcaggttcccacaactag

SEQ ID NO: 123001 - DNA, 1917 bp, Homo sapiens; identical to SEQ ID NO: 121205

SEQ ID NO: 123002 - DNA, 4770 bp, Homo sapiens; identical to SEQ ID NO: 118283

SEQ ID NO: 123003 - DNA, 2294 bp, Homo sapiens
atggggaaggtaccaggcctagaggagagagggcacagaaggggctcgtgtggcacgcagcagaggagctggcactcagtccttatagatcaggggaggtaccgagctcgaattgttcgtatgctgcaggtcgactctagaggatcccccgatgacttccaccatgttttgccatggcagaatctgctccatgcgggacaagaaaatctcttttctggtctgacggcgcttactgctgaattcactgtcggcgaagaaactagccatatgaaactcaccaacagaaaaaacatcaactctgtaactaaggatcctaaactgctgtcccacagtcaaaaggatggacagtattcccacttacttacctttctgctacaggatgacagacaccacatccggatggttataggcgatcgcatgtgcagtggcgtctgcagatggacgctgtcagccaagctgtgccatcaaggactggacctgtggggcacaggacagcttgcagctacactctatgccaagggcttcccagagaaggccgacccaggtggccaagggcagggcccaattgcccacccccagccaagtgccccagagaagaaggtggataacaagggccggaatttccttcatgtggcagttcagaactctgatattgaaagtgtgctgttcctgatcagtgtccacgctaatgtgaattcaagagtccaggatgcctccaagttgacccccctgcacctcgctgtccaagcaggctcagaaattattgtccgcaatttgagaaactgcccccagcgagaaaacatcctacttctagcttaccaagaacaaggctgtcacccaaacgcctccctcttctacccagcctccatcccatcattggggatctgtactccacaccttgtccctgccttcggcacttgttcctctcagtctaatgggacacacacagagcacatgctcaggagtgggctcactctagaggatccccctggtggagtacacccgcgaccgcctgcaccgggaaacgctgcgcagcttcggccgttatgaactcaccaccgcttatacccctgccgggcagttacagagccagcacctgaacagcctgctgtctgaccgcgattacacctggaacgacaacggcgaactcatccgcatcagcagcccgcgccagacccggagttacagctacagcaccaccggcaggctgaccggcgttcacaccaccgcagcgaatctggatatccgcatcccgtatgccacagacccggcaggtaaccgcctgcccgacccggagctgcacccggacagcaccctcagcatgtggccggataaccgtatcgcccgtgacgcgcactatctttaccggtatgaccgtcacggcaggctgacagagaaaaccgacctcatcccggaaggggttatccgcacggatgatgagcggactcaccggtaccattacgacagtcagcaccggctggtgcactacacgcggacacaatatgaagagccgctggtcgaaagtcgctatctttacgacccgctggggccgcagggtggcaaaacgggtgtggcggcgtgaacgggacctgacgggctggatgtcgctgtcacggaaaccgcaagtgacctggtacggctgggacggcgaccggctgaccacaatacagaacgacagaacccgcatccagacgatttatcagccggggagcttcacgccactcatcagaaggatccccgtattgggcggtggcgatacgacaatggattgtttgcggacttccatccgcctcaatgccgccagcgtgacctgcgcgtatcgtcgtgatcaaatcagtatgccgggctcgcgcaaagaggtggttaatgcgcgcgaggaaggtgtcgagtttcagttcaattttcaaccgcaatatatcgcttgtgacgaagatgggcgtttaactgcggtgggcctgattcgtaccgccatgggtgagccggggccggatggtcgccgtcgtcctcctccggtagcgggttcagagtttgaattgcccgccgatgttctgattatggcctttggtttccaggcgcatgcaatgccgtggttgcagggcagcggaattaaactcgataaatggggcctgattcaaaccggtgacgtcgggtatttacctacccagacgcatctgaaaaaagtctttgctggtggtgatgcagttcatggcgcggatctggttgtcactgcaatggccgcaggaaggcaggcggcgcgcgatatgttaactctgtttgatacgaaggcatcgtga

SEQ ID NO: 123004 - DNA, 3553 bp, Homo sapiens
ctgactactcatcgggaaaacatggcgctgacgaatggtttctgccatcacatagcgggtcagtggcacaattaaatgatgttcttccgcgataggaataaacacatccggtgaaatccagccctgacgcggattgttccagcgcagcaaaatctctacaccaatacattgctggctgcgcgcattaagcaaaggctgacagaacaattcgaactcatgttgcgccaggcccagattgatttcgcgggaaaagctcattcgctcactgaagcgcaggccaacaccacccaggtttcagcggagcgcgaccgtctgtttaaaaattatcaacgttacttgaaaggcagccaggcggcggtgaatccgttctcggaacgtgacatcgacgatgcgcggcaaaatttcctcgcgcaggatgcgctggcgcagatccagagccagctggatagcctggttaacggcgagcaatcgcagattgtgagcctgaaagcacagctcgcggaagcaaaatataaccttgagcagacgatagtgcgtgcgccgagcaatggttatgtgacccaggtactgattcgtccgggtacctatgccgcgtcgctgccgctacgtccggtgatggtgtttatacccgatcagaaacgacaaatcgtggcgcagttccgtcagaactccttgctgcgactggctcctggcgacgatgcggaagtggtgtttaatgctctgccaggtaaggtattcagcggtaagctggcagccattagtccagccgttcccggcggagcttatcagtcgaccggcaccttacagacgttaaacacagcgccgggttcagatggcgttatcgcgaccattgaactggatgagcacactgatttgagcgctttaccagacggtatttacgcccagaacccaaaaaatctgaaaattgttgaactgaaagccccgcaactgccgcgttctctggacgacgcgcaaatcgctctggcagttatcaataccacctatgccagccagattggcctgactccggcgaaagacggtatctttgttgaagataaagagtccccgtacgtaaacctgatcgtgacgcgtgaagataacaaagacgccgagaacgtgaagaaattcgtccaggcttatcagtctgacgaaatcccctgtcgaacccgttcaaagcactgcaccccagccgaaagcggagcctgcaaaaccgaaagcgccgcgcgccacgccggtccgaatttataccaatgcagaagaattagatcggcaaaccgttccgcgatctcggtgaagggctggcgaaccccctgtataccggacagcctgcccgccgtggaatggctgacctacggcagcggttacctggcaggcatgaaactcggcgacacaccgctggtggagtacacccgcgaccgcctgcaccgggaaacgctgcgcagcttcggccgttatgaactcaccaccgcttatacccctgccgggcagttacagagccagcacctgaacagcctgctgtctgaccgcgattacacctggaacgacaacggcgaactcatccgcatcagcagcccgcgccagacccggagttacagctacagcaccaccggcaggctgaccggcgttcacaccaccgcagcgaatctggatatccgcatcccgtatgccacagacccggcaggtaaccgcctgcccgacccggagctgcacccggacagcaccctcagcatgtggccggataaccgtatcgcccgtgacgacaactatctttaccggtaatgccggtcccggcagggtgacagagaaaaacgaccctcatcccgaaagggggttatccgcacggatgatgagcgcacccaccggtaccattacgacagtcagcaccggctggtgcactacacgcggacacaatatgcagagccgctggtcgaaagtcgctatctttacgacccgctgggccgcagggtggcaaaacgggtatggcggcgtgaacgggacctgacgggctggatgtcgctgtcacggaaaccgcaagtgacctggtacggctgggacggcgaccgcctgaccacgatacagaacgacagaacccgcatccagacgatttatcagccggggagcttcacgccactcatcagggttgaaaccgccaccggtgagctggcgaaaacgcagcgccgcagcctggcggatacccttcagcagtccagacggcgaagacggtggcagtgtggtgttcccgccggtgctggtgcagatgctcgaccggctggaaagtgaaatcctggctgaccgggtgagtgaggaaagccgccgctggctggcatcgtgcggcctgacggtggagcagatgcaaaaccagatggacccggtgtacacgccggcgcgaaaaatccacctgtaccactgcgaccatcgcggcctgccgctggcgctcatcagcacggaaggggcaacagcacctcgagggtcccgcgacgtgccggtacccgacagtcgcgagtcgagagcgagctgcgaacaacggttcccccgcccgactcgcggtagacacacttacagtgccgtgacactaaccgcaacgtttcggacggaactgagagtctaccgagatgcacgtctcaaacgccagctgcaagaacggaaggaagagctggctatcctccaaaagcccgcgaaatacttcgcgaagcgcgtctttattgaaaaacatcaggctgagttcagcatcaaagcaatgtgccgcgtgctccgggtggcccgcagcggctggtatacgtggtgtcagcggcggacaaggataagcacgcgtcagcagttccgccaacactgcgacagcgttgtcctcgcggcttttacccggtcaaaacagcgttacggtgccccacgcctgacggatgaactgcgtgctcagggttacccctttaacgtaaaaaccgtggcggcaagcctgcgccgtcagggactgagggcaaaggcctcccggaagttcagcccggtcagctaccgcgcacacggcctgcctgtgtcagaaaatctgttggagcaggatttttacgccagtggcccgaaccagaagtgggcaggagacatcacgtacttacgtacagatgaaggctggctgtatctggcagtggtcattgacctgtggtcacgtgccgttattggctggtcaatgtcgccacgcatgacggcgcaactggcctgcgatgccctgcagatggcgctgtggcggcgtaagaggccccggaacgttatcgttcacacggaccgtggaggccagtactgttcagcagattatcaggcgcaactgaagcggcataatctgcgtggaagtatgagcgcaaaaggttgctgctacgataatgcctgcgtggaaagcttctttcattcgctgaaagtggaatgtatccatggagaacactttatcagccgggaaataatgcgggcaacggtgtttaattatatcgaatgtgattacaatcggtggcggcggcacagttggtgtggcggcctcagtccggaacaatttgaaaacaagaacctcgcttag

SEQ ID NO: 123005 - DNA, 1419 bp, Homo sapiens
atgaagttctggcgacccggtattaccggcaaactgtttctggcgattttcgccacctgcattgtcttgctgatcagtatgcactgggcggtgcgtatcagttttgagcgtggctttattgattacatcaagcatggtaatgaacagcgattacaactgttaagtgatgcgcttggcgagcagtatgcgcagcatggcaactggcgcttcctgcgcaacaatgatcgctttgtctttcagatcctgcgttcatttgaacacgataattcggaagataaacccggcccgggtatgccaccgcacggctggcgtacccagttctgggtggttgatcaaaacaacaaagtgctggttggtccgcgagcgccgattccactgacggtacacggcgacccattctggtcaacgagaagcccgagggggggaaagggagggagcggcagggcggacggcgaaggggcggcaggggacaggcccgaaaagggctcgggaggggcctcaagcgcggaggggagagggagaagcgcgcgccaaagagcaggagccgaaaggaggcggaccagggggaacgaagcaaggcgagagcggcgggagggacccagcgaggcagagcgaaggggggagagggggaccgacagcgacgcgacggaacggggagagagccgaggaagcacgggagcaggggagcgcgaacaggagaacaggagggatcagaatagcccgccagcgccgagaaagcagcaggaggagaacgaccgcgggatgacgcaagcacagactcatcgcaccacgcctcaggaggagccggcggcgcaagcgcagtcccgctcggagaggaccctaggacaaaggagagatcggagggtgggcagcgcagacacaccggggcagccacgaacagggagcgcggagggtgccagaagaccgagacgcaagagcccggcggaaaaacgaagagccacgcggcacgaccgaggacgacaaacacaagaaacgggagcaggaaagggccagaaaggaaggggccgacggacgagggcacaaggcggaagcgggccgcaggaaaagacgaaagcgacagtgaaaagaggagatgcggaaaatccggcagcaggagagcgggggggaaaaaaaaagggggttgtgcggccgcccccccgggggggggaacaactgcatggagggacgggagagaagaggacggaaacgataaaagttcttccaatggccaataataccactggattcacccgaaaatatcaaagctgctggctattcctggaaaggtttacgcgctgcatggatcaacgaagcggcattccgtcaggaaggcgtagcggtattgttggcggtgccacctcccaggttcaagtgaccctctttcctcagccccccaaagtgctaggattacaggcatga

SEQ ID NO: 123006 - DNA, 1518 bp, Homo sapiens
ttatccatgacatatacacatactgacatacacactagaaccatcctgacctaggacgacatactgagctccagtcaactgtggtttaactacacacacaaagacaaatacaacgagagagcattcaaacagaccaacgtgcaccaaaacacacacatcagttagcacgaccaacacaccagtgcacccaagcccaacacacaagggccccaaagacccaaacccttcggtgcgataaaaacgttcaaacaatttttgtagctgatcgtcactgacacctggcgcactgtcggcaaaggtcaggcgcaccgttttgtcgcgctgcccggcagagatttgcaggctgccgccgctgtcagtgtagcgcaggctgttttccagtaagttattgaataactgcattaaacggtcgcgatcgccaaatacggtaatactgtctggcagggaaaattgcagtttcaggccacgactggcgaatcgttcgcgaaatgcgccgcccgccacttccagcagtgggatcaaatctaccggtgctttttgataggcgagagcgccttcatcagacatcgacaactgatggagatcgtcaaccagtttggtcagtgtaccgacctccgcctgtaaagacgccaccgtctccggcgtgaatttacgcacgccatcctgaatggcttccagttcaccgcgcagcaccgctaatggcgtacgcagttcgtgagaaatatcggccataaaatcgcgccgcatttgctggtttttctccagtgtgctggcaagctggttgaagtcttgcgccagtttgcccagttcatcttcactggtgggcgttacgcgggtagtgaaatcgcccgccgccagtttgtgcgtgccatcgacaagtcgttttaccggtgccagtaaaccgcgcgccagcagaaaagtggcaagtgccgcgagtaacgttgccagggcgacaatcaaccagctggtttgccgctgttgtttatcgaaattgatatcagtattgcgcgttaaccgctcaacgggggaggcgatcaccgcgccaacttccgcaccgttgaccagaatgggtcgccgtgtaccgtcaggtggaatcggcgctcgcggaccaaccagcactttgttgtttataccacccagaaatatcccttggagcttccctctctcgcctggccttggcttaacccgcatccatagcctctgagcactactcggcctccgccccttcgcggcttgcctcttggaagcgcatagcgtgaccttgcgccggaagtcgctgagttcttcctgattctgcggggcttgcgcttgggctcccgtaccctcaccccctctgctggtgttcttcttgggcttcccctctttgtcccctgggccgctttctaggggctcttcgttatccgtagggcctcgttgtccccgtagggttgctcggctagggctcggcggctcactgggtggtcgtccattcttctgacgggctattcccctccctcgcggtgtgttgttccgccccat

SEQ ID NO: 123007 - DNA, 1065 bp, Homo sapiens
atgattaggatcccaggctgcgaagacaaactgggggccgatcagcaaccggcatttgtgttgtatctggagatcgacccacatcaggtggacgtcaacgtgcaccccgccaaacacgaagtgcgtttccatcagtcgcgtctggtgcatgattttatctatcagggcgtgctgagcgtgctacaacagcaactggaaacgccgctaccgctggacgatgaaccccaacctgcaccgcgttccattccggaaaaccgcgtggcggcggggcgcaatcactttgcagaaccggcagctcgtgagccggtagctccgcgctacactcctgcgccagcatcaggcagtcgtccggctgccccctggccgaatgcgcagccaggctaccagaaacagcaaggtgaagtgtatcgccagcttttgcaaacgcccgcgccgatgcaaaaattaaaagcgccggaaccgcaggaacctgcacttgcggcgaacagtcagagttttggtcgggtactgactatcgtccattccgactgtgcgttgctggagcgcgacggcaacatttcacttttatccttgccacattactggaatctggtgttcggactgacattgatagccaatgataccgcgtttgttgataccggcatcggtccgctcatcgtcaatggtcgagtccgcaaagtgattgcttcacatatcggcaccaacccggaaacaggtcggcgcatgatatctggtgagatggacgtcgttctggtgccgcaaggtacgctaatcgagcaaattcgctgtggtggagctggacttggtggttttctcaccccaacgggtgtcggcaccgtcgtagaggaaggcaaacagacactgacactcgacggtaaaacctggctgctcgaacgcccactgcgcgccgacctggcgctaattcgcgctcatcgttgcgacacacttggcaacctgacctatcaacttagcgcccgcaactttaaccccctgatagcccttgcggctgatatcacgctggtagagccagatgaactggtcgaaaccgcgcgagctgcaacctga

SEQ ID NO: 123008 - DNA, 1890 bp, Homo sapiens
atggcgaggaaaaataatgcgtttgttgatgaatatcgcgcgccggaacaggtgatgcagttaattgagcatctgcgcgaacgtgcttcacatctctcttacaccgccgaacgccctctgcggattatggaagtgtgtggcggtcatacccacgctatctttaaattcggcctcgaccagttactgccggaaaacgttgagtttatccacggtccggggtgcccggtgtgcgtactgccgatgggtagaatcgacacctgcgtggagattgccagccatccggaagtcatcttctgtacctttggcgacgccatgcgcgtgccggggaaacagggatcgctgttgcaggcaaaagcacgcggtgccgatgtgcgcatcgtttactcgccgatggatgcgttgaaactggcgcaggagaatccaacccgcaaagtggtgttcttcggcttaggttttgaaaccactatgccgaccaccgctatcactctgcaacaggcgaaagcgcgtgatgtgcagaatttttacttcttctgccagcacattacgcttatcccgacgttgcgcagtttgctggaacagccggataacggtatcgatgcgttcctcgcgccgggtcacgtcagtatggttatcggcaccgacgcctataattttatcgccagcgattttcatcgtccgctggtggttgctggattcgaaccccttgatctactacaaggcgtggtcatgctggtgcagcagaaaatagcggcccacagcaaggtagagaatcagtatcgtcgagtggtaccggatgccggtaacctgctggcgcaacaggcgattgccgatgtgttctgtgtcaacggcgacagcgaatggcgcggcttaggcgtgattgaatcttctggcgtgcacctgacgccggattatcaacgattcgatgccgaagcacatttccgcccggcaccgcagcaggtctgcgatgacccgcgcgcgcgttgtggtgaggtattaacgggcaaatggcgtttgactggcccactgcgtcaggcacaattgacgccgggtgaagcgcccgtttgcgcccagccgctgctgattccgttgcggctaaaagtttctgccgaagaaaaatcggcattagaaaaagcgcagtctgccctggcggaattgggtattgatttccagtcagatgcacagcatgtgaccatcagggcagtgcctttacccttacgccaacaaaatttacaaatcttgattcctgaactgataggctacctggcgaagcagtccgtattcgaacctggcaatattgcgcagtggattgcacgaaatctgatgagcgaacatgcgcagtggtcaatggcacaggccataaccctgctggcggacgtggaacggttatgtccgcaacttgtgaaaacgccgccgggtggcgacgaaagctgggtgaaaacaccgatgcgccagaccccgttccccggcattgtgccggacgagagcgatcgcgcggcagaaacccggtcaacgctgacctcttccggtgcgatggcggcggtgattggcttccagtcgccgtataacgaccagcgcagcgtgattgcgctgttggcagatagcccacgcggttatgaaatgcttaacgatgcggtgaacgatagcggcaaacgcgccaccatgttcggttcggtcgcggtgatccgcgagtccggtatcaacagcctacgtgttggcgacgtttattacgtaggtcatctgccgtggttcgagcgcgtgtggtatgcgctggcaaaccatccgattctgctggcggtgctggcggctatcagtgtgatattgctggcatgggtactgtggcgtctgctgcgaattattagtcgtcgtcgtcttaaaccggataacgagtaa

SEQ ID NO: 123009 - DNA, 1375 bp, Homo sapiens
attgtagatgagtatgggcgtcactatcgccgggctgttgctgggactttttggttcacagcatgtcagcgtcgacagcggcaccacacaaaccgtctttatgtacacctggcttagcatggcgttgatcatcgcccttccggcgttcatctttgccagagtgccgaacgatacgcatcaaaatgtagctatttcgcggcgaaaaaggagcgcgcaatgaagttctggcgacccggtattaccggcaaactgtttctggcgattttcgccacctgcattgtcttgctgatcagtatgcactgggcggtgcgtatcagttttgagcggggctttattgattacatcaagcctgggaaatgaacaggggattacaactgttaagtgatgcgcttggcgagcagtatgcgcagcatggcaactggcgcttcctgcgcaacaatgatcgctttgtctttcagatcctgcgttcatttgaacacgataattcggaagataaacccggcccgggtatgccaccgcacggctggcgtacccagttttggggtggttgattcaaaccaacaaagtgttggtttggtccgcgagccgccgatttccacctgacggtacacggcgacccattttggtcaacggtgcgaaagttggcgcggtgatcgcctcccccgttgagcggttaacgcgcaatactgatatcaatttcgataaacaacagcggcaaaccagctggttgattgtcgccctggcaccgttactcgcggcacttgccacttttctgctggcgcgcggtttactggcaccggtaaaacgacttgtcgatggcacgcacaaactggcggcgggcgatttcactacccgcgtaacgcccaccagtgaagatgacctgggcaaactggcgcaagacttcacccagcttgccagcacactggagaaaaaccagcaaatgcggcgcgattttatggccgatatttctcacgaactgcgtacgccattagcggtgctgcgcggtgaactggaagccattcaggatggcgtgcgtaaattcacgccggagacggtggcgtctttacaggcggaggtcggtacaaagaacaaattggttgacgatctccatcagttgtcgatgtctgatgaaggcgctctcgcctatcaaaaagcaccggtagatttgatcccactgctggaagtggcgggcggcgcatttcgcgaacgattcgccagtcgtggcctgaaactgcaattttccctgccagacagtattaccgtattggcgatcgcgaccgttaatgcagtattcatacttgcccaaccaaaggccacccctggaatccggtttgaaacgggaaaccgggccaaaaacacgctgccgggaatctga

SEQ ID NO: 123010 - DNA, 3552 bp, Homo sapiens
atggccatctacaagcagtcacagcacatgacggaggttgtgaggcgctgcccccaccatgagcgctgctcagatagcgatggtctggcccctcctcagcatcttatccgagtggaaggaaatttgcgtgtggagtatttggatgacagaaacacttttcgacatagtgtggtggtgccctatgagccgcctgaggttggctctgactgtaccaccatccactacaactacatgtgtaacagttcctgcatgggcggcatgaaccggaggcccatcctcaccatcatcacactggaagactccagtggtaatctactgggacggaacagctttgaggtgcgtgtttgtgcctgtcctgggagagaccggcgcacagaggaagagaatctccgcaagaaaggggagcctcaccacgagctgcccccagggagcactaagcgagcactgcccaacaacaccagctcctctccccagccaaagaagaaaccactggatggagaatatttcacccttcagatccgtgggcgtgagcgcttcgagatgttccgagagctgaatgaggccttggaactcaaggatgcccaggctgggaaggagccagggggacagctcctccgccctgagtccacaggcgtggcgttccgtggccggttcttaaaggggggccttccgcaggcaccagctgtggccgcggccacaccatggttgtgcacccagggtgtcgctggggaaaccacgcccgccgtcaatgttaagtacaatgtacgcgtaagagtctctgagtatatatcaatgcacgtgcatcgtgaagtcacagcgcgtaacgtgtacgtcacacagacgcgtcgtcctatgaccaccttccctactctcgcatgggagaccccacactaccatcggcgctacggcgtttcacttctgagttcggcatgggttcaggtgggaccaccgcgctactgccgccagacaaatgctttgtctaatctgccgaactttaacctaaaaagtggtgctgatacccagagtcgaactggggacctcacccttaccaagggtgcgctctaccaactgagccatatcagcacgctaaatttgatgcctggcagttccctactctcgcatggggagaccccacactaccatcggcgctacggcgtttcacttctgagttcggcatgggccgtttggatggaggcatcgcgtgttgacggcaacagatcagagcggtcacacctagctttgcgaggcactttcgccaggttaagactacgtgcccggtcgtgcaggatgtcaaagacaccgttggtcatcaccactttttcaccatgtttacgcgctgccgctacggccagcttcagttcctcttcggtcatcacgctcaaagcctggtatcgtgcgacgtccacgctacagcgattttccagactcgatcggcgaaaccgtggaggttcccagtattggcgaccaccacgccaagtcgccagcatatgtctgaagaatgcagagcttcattccacgcggaattaccacgctgccagcggttgtcctgcagtgacgccatatcaccggctgcacctgttgggcgtagtcagaaagcaccagcgcgccaatcgaactcagcgcctgattaatccgctcgtgcagcggctgcggatcaacaccttcgaaaccttcttcaaaatccagacggatcagctgttggttgcgggaaaaacgaagtcgcatttgacgttgaacgtcaggcccaagaggactttaactcagcgcgcgcgctgcatcgtcaatgcccgtcaacccgaccaggcgtgcattagcaccgagagaagcgatattcatcgccacatacagcggcctgtaggtgaacgttcgaatgaactttcgctggcctggcggaccttcccgacgtatgccagtggcatgtcgccctttatgacaccggtttcctgcaaattggcctcgtttctcgccgtttcatgccggactgatgatgatcccgatggtgcttggcagcatgggaatgaagcgaattgtggtacaggtggtgaatcgctttggttatcgtcgggtactggtagcgaccacgctgggtctgtcgctggtcaccctgttgtttatgactaccgccctgctgggctggtactacgttttgccgttcgtcctgtttttacaagggatggtcaactcgacgcgtttctcctccatgaacaccctgacgctgaaagatctcccggacaatctggcgagcagcggcaacagcctgctgtcgatgattatgcaattgtcgatgagtatcggcgtcactatcgccgggctgttgctgggactttttggttcacagcatgtcagcgtcgacagcggcaccacacaaaccgtctttatagtgccgaacgatacgcatcaaaatgtagctatttcgcggcgaaaaaggagcgcgcaatgaagttctggcgacccggtattaccggcaaactgtttctggcgattttcgccacctgcattgtcttgctgatcagtatgcactgggcggtgcgtatcagttttgagcgtggctttattgattacatcaagcatggtaatgaacagcgattacaactgttaagtgatgcgcttggcgagcagtatgcgcagcatggcaactgcgcttcctgcgcaacagaagaacttcgaagtctgctgagtggcaatatatttccacgattggaacttggtgtacattcacagtacacatttctatccgtactgcagtctgtcgggccgtaccggttgatcaacacgctattagcggcgagcgttatgggaagtgaccatgaaagtcctgatatggcggctgcccgccagttggccattgaaaaagcggtcgctaaacatctgctgagtgaaaaagagcgtttctatgctctttctgcgcaaacaggcgcaacgcgggcagacagttggcttgatattgaaggtggcattgggacgttatttacttacgccagcctcggtagccgggagctgcctgacgatacgctgtggccggaagatgaattgatccccttatcgaaagaaggtggatttgccgcgcgccatttactgacctcaaagtcaggcgtggcagtgcatattaacgcctttaacttcccctgctggggaatgctggaaaagctggcaccaacgtggctgggcggaatgccagccatcatcaaaccagctaccgcgacggcccaactgactcaggcgatggtgaaatcaattgtcgatagtggtcttgttcccgaaggcgcaattagtctgatctgcggtagtgctggcgacttgttggatcatctggacagccaggatgtggtgactttcacggggtcagcggcgaccggacagatgctgcgagttcagccaaatatcgtcgccaaatctatccccttcactatggaagctgattccctgaactgctgcgtactgggcgaagatgtcaccccggatcaaccggagtttgcgctgtttattcgtgaagttgtgcgtgagatgaccacaaaagccggcacaaggtgttctgtcattgagtttttctga

SEQ ID NO: 123011 - DNA, 1801 bp, Homo sapiens
atgatgcgcgatcgcctgatcaatcactgcgatccgtccggcctgcgaatgacaactgggggccgatcagcaaccggcatttgtgttgtatctggagatcgacccacatcaggtggacgtcaacgtgcaccccgccaaacacgaagtgcgtttccatcagtcgcgtctggtgcatgattttatctatcagggcgtgctgagcgtgctacaacagcaactggaaacgccgctaccgctggacgatgaaccccaacctgcaccgcgttccattccggaaaaccgcgtggcggcggggcgcaatcactttgcagaaccggcagctcgtgagccggtagctccgcgctacactcctgcgccagcatcaggcagtcgtccggctgccccctggccgaatgcgcagccaggctaccagaaacagcaaggtgaagtgtatcgccagcttttgcaaacgcccgcgccgatgcaaaaattaaaagcgccggaaccgcaggaacctgcacttgcggcgaacagtcagagttttggtcgggtactgactatcgtccattccgactgtgcgttgctggagcgcgacggcaacatttcacttttatccttgccagtggcagaacgttggctgcgtcaggcacaattgacgccgggtgaagcgcccgtttgcgcccagccgctgctgattccgttgcggctaaaagtttctgccgaagaaaaatcggcattagaaaaagcgcagtctgccctggcggaattggggatggtcaactcgacgcgtttctcactccatgaacaccctgacgctgaaagatctcccggacaatctggcgagcagcggcaacagcctgctgtcgatgattatgcaattgtcgatgagtatgggcgtcactatcgccgggctgttgctgggactttattgcatgtcagcgtcgacagcggcaccacacaaaccgtctttatgtacacctggcttagcatggcgttgatcatcgcccttccggcgttcatctttgccagagtgccgaacgatacgcatcaaaatgtagctatttcgcggcgaaaaacggagtcgcgcaatgaagttctggcgacccggtatcaccggcaaactgtttctggcgattttcgccacctgcattgtcttgctgatcagtatgcactgggcgcgccgattccacctgacggtacacggcgacccattctggtcaacggtgcggaagttggcgcggtgatcgcctcccccgttgagcggttaacgcgcaatactgatatcaatttcgataaacaacagcggcaaaccagctggttgattgtcgccctggcaacgttactcgcggcactggccacttttctgctggcgcgcggtttactggcaccggtaaaacgacttgtcgatggcacgcacaaactggcggcgggcgatttcactacccgcgtaacgcccaccagtgaagatgaactgggcaaactggcgcaagacttcaaccagcgtgccagcacactggagaaaaaccagacccccatcacaagtcgtggtcacccgcggatctttctcgctcgtcacccagcgcccgcgcccacaactcttaccagtttggctttaaagataattcgcagtcccgcgtttcttcctgatactgccagcgaatgtgcaatggcgattgattgctacattttggccgcttccacacaggcgtacaaggctgccagttcactctcgttaagcgtggtcctggcgacatccgcgcgttttaaaacctcatcgaccagcatatgggtaaaatcttcgtccaccaactcttgtgaatga

SEQ ID NO: 123012 - DNA, 2193 bp, Homo sapiens
  misc_feature (1)...(2193): n = a,t,c or g
atggggctgttctatatgggcgcaccgctggcgttaacactgggatcaccgctttccggcgcgctgttggagatgcatggatttatggggcatcccggctggttctggatgtttgtgattgaaggattgttggcagtcggtgctggggtattcacattcttttggcttgatgacacaccggagcaggcacgttttctgagtaaacaagaaaaaacgttgcttatcaatcaactggcaagtgaagaacaacagaaagtgacttctcggctgagcgatgcgctgcgtaatggccgagtctggcaactagcgattatctacctgaccattcaggtggcggtttacggattaattttcttcctgccgacccaggttgcggcattgctgggaacaaaagtgggctttacagcgtcggtggtcaccgccattccgtgggttgcggccttgtttgggacctggcttattccgcgctattccgataaaaccggcgaacggcgtaatgtcgcagcgctgacattactggcggcgggcattggtattggtctgtccgggctgctttctccagtaatggcgatcgtagcgctgtgtgttgcagctatcgggtttattgccgtgcagccagtgttctggacgatgccgacacaactgctttccggtacggcgctggctgcgggaattggttttgtaaacctgtttggtgcagtgggcgggtttattgccccgatcctgcgcgtgaaagcagaaacgttatttgccagcgatgcggcgggattactgacgctggcagcggtggcggtcatcgaccgacgtggcacatcattaaataggttaaggaacacgatgatcgcattattaagcaatccctttaaagaacgtttacgcaagggcgaagtgcaaattggtctgtggttaagctcaacgactgcctatatggcagaaattgccgccacttctggttatgactggttgctgattgacggggagcacgcgccaaacaccattcaggatctttatcatcagctacaggcggtagcgccctatgccagccaacccgtgatccgtccggtggaaggcagtaaaccgctgattaaacaagtcctggatattggcgcgcaaactctactgatcccgatggtcgatactgccgaacaggcacgtcaggtggtgtctgccacgcgctatcctccctacggagaactcatgatctggataatgctcgccacgctggcggtagtgtttgtggttggttttcgggtgctgacatccggggccagaaaagaaattcgccgtctcagcgatcggctgaacatcgatgtcgtacccgtggagtcgatggtcgatcaaatggnaaataactggcgagggtttccagatatcatgagttctgattacgcaggagaagtcatgctctggataatgctcgccgcgctgacggtagtgtttgtggttggttttcgggtgctgtcatgcggggccagaaaagcaattcgccgtctcagcgatcggctgaacatcgatgtcgtacccgtggagtcgatggtcgatcaaatgggaaagtcagctggtgactgtaaactggtgctcagggggggaggggaagggggggtcaagccacctagcccaatacaagtcgacattcgcatcatttctgcaactaatcagaatttggcccagttcattgccgaaggtaaattccgcgaagatctcttctaccgacttaatgttatcccgataactctgccaccgctgcgtgaacgtcaggaagatattgaactattggtgcattactttttacatctgcatacccgtcgtctgggatcggtttatcctggcattgctcccgatgtcgtcgaaatattgcgtaagcatcgttggcccggaaacctgcgcgagttaagcaatttgatggaatatctggttaacgtggttccttcaggtgaagttatcgacagcacgctattgccgccaaatctgctgaataatggcacaacggagcaaagtgatgtaacagaggtcagtgaggcgcacctgtcactcgatgatgcgggcggcacggcgctggaggagatggaaaagcaaatgatccgcgaggcgctttcacgtcataacagcaagaagcaagttgctgatgaactgggcatcggcattgctacgctctatcgcaagattaagaaatatgagttgttaaacacataa

SEQ ID NO: 123013 - DNA, 219 bp, Homo sapiens
atgatccaacgcgcgaattgtcgaacagtacaacaggcattcagcgcccactggaaacagcaaactggtgataacgtggtgatcgtcagtcacacggtggctcaggtgaaggtggtcagctttcctctggggccaagccctggactggtttccccatcccttgtcagttccctgccctgtccacaagcccttaagctctcttctcagttataccacagg

SEQ ID NO: 123014 - DNA, 781 bp, Homo sapiens
atgctgtgtacaaagtgggataaactgggcttggagaaaaacgcgggtaaaaataaaaacgcgtacaaatggtatgggtggcccgcaaatgcacctgatgaaccgcatattgaacaattggttggcgagtgccgtgttatgcggcaattaaaacgactcattagccgtattgcacccagcccatccagcgttatggtggttggtgaaagcggcacggcgatacctgttgtatctcatgcagaatttaaaggcggttttgcagatatcggcgtgcattatctggactggaccagccggactaccgaaaaatcgtcgaccaaatcacacaaagatgattttggttatcttgaatttgaaggtggcgctaactttagttggggagaaatgtacgggttcttcgactgggaaaacttctataacggtcgccataataaaccaggtagcgagcagcgttatacctttaaaaataccaaccgtatttacctgggtgacaccggatttaatctctacttgcatgcgtatggcacctacggttctgcgaatcgcgtgaatttccacgacgatatgttcctgtacggtatcggctacaatttcaccggcagcggttggtggttcaaaccgttctttgctaagcgttatacagatcaaacctattacactggcgacaacggctatgtcgccggctgggttgcaggttacaactttatgctgggcagcgagaaattcactcttaccaactggaacgagtacgagtttgaccgtgacgctacctatgcagcgg

SEQ ID NO: 123015 - DNA, 1716 bp, Homo sapiens
atgaacaagtggggcgtagggttaacatttttgctggcggcaaccagcgttatggcaaaggatattcagcttcttaacgtttcatatgatccaacgcgcgaattgtacgaacagtacaacaaggcattcagcgcccactggaaacagcaaactggtgataacgtggtgattcgtcagtcacacggtggctcaggtaaacaagcgacgtcggtaatcaacggtattgaagctgatgttgtcacgctggctctggcctatgacgtggacgcaattgcggaacgcgggcggattgataaagagtggatcaaacgtctgccggataactccgcaccgtacacttccaccattgttttcctggtacgtaagggaaatccgaagcagatccatgactggaacgatctgattaaaccgggtgtttcggtgatcacgcctaatccgaaaagctctggtggcgcgcgctggaactacctggcagcctggggctacgcgctgcatcacaacaacaacgatcaggcaaaagcacaggattttgttcgggcactgtataaaaacgtcgaagttctggattctggcgcgcgtggctccactaacacttttgtcgagcgcggaatttggcgatgtactgattgcctgggaaaacgaagctctgctgggccgacaattatttttaatggcgtttcaccaatcgcataccagtttttctgtagcaaatgcacctgatgaaccgcatattgaacaattggttggcgagtgccgtgttatgcggcaattaaaacgactcattagccgtattgcacccagcccatccagcgttatggtggttggtgaaagcggcacgggtaaagaagtcgtcgcccgtgcaatccataagttgagcggaagacggaataaaccctttattgctatcaactgtgccgcgattccggagcagcttctggagagcgaactgttcggttatgttaaaggtgcatttactggcgcttctgccaacggtaaaacagggttgattcaggcggcgaatacgggcacgctgtttctcgatgaaataggtgatatgccattaatgttgcaggctaaattactgcgcgctattgaggcacgtgaaattctgccgattggtgccagtagcccaatacaagtcgacattcgcatcatttctgcaactaatcagaatttgccccagttcattgccgaaggtaaattccgcgaagatctcttctaccgacttaatgttatcccgataactctgccaccgctgcgtgaacgtcaggaagatattgaactattggtgcattactttttacatctgcatacccgtcgtctgggatcggtttatcctggcattgctcccgatgtcgtcgaaatattgcgtaagcatcgctggcccggaaacctgcgcgagttaagcaatatgatggaatatctggttaacgtggttccttcaggtgaagttatttatcagcacgcatatttcgcgccacaatgttgtttgatataagtggctaccacggagtcaaatgtgatgtaacagaggtcagtgaggcgcacctgtcactcgatgatgcgggcggcacggcgctggaggagatggaaaagcaaatgatccgcgaggcgctttcacgtcataacagcaagaagcaagttgctgatgaactgggcatcggcattgctacgctctatcgcaagattaagaaatatgagttgttaaacacataa

SEQ ID NO: 123016 - DNA, 1935 bp, Homo sapiens
tcatatgaactttaaagtagttttttccaattctgtgaagaaagtcattggtagcttgatgggaatggcattgaatctataaattaccttcggcagtatggtcattttcacaatgttgattcttcctatccatgagcatggaatgttcttccatttgtttgtggcttttatttcattgagcagtggtttatagttctccttgaagaggtccttcacatcccttgtaagttggattcctaggtattttattctctttgaagcaattgtgaatgggagttcactcatgatttggctctctgtttgtctgttattggtgtataagaatgcttgtgatttttgcacattgagtttgtatcctgagactttgctgaagttgcttatcagcttaagtagattttgggctgaggtgatggggttttctaaatatacagtcatgtcatctgcaaacagggacaatttgacttcctcttttcctaattgaataccctttatttctttctccgccctgattgccctggccagaacttccaatactatgttgaatacgagtggtgagagagggcatctctgtcctgtgccagttttcaaagggaatgcttccagtttttgcccattcagtatgatattggtggtgggtttgtcatagatagctcttattattttgagatacgtcccatcaatacctaatttattgagagtttttagcatgaagcgctgttgaattttgtcaaaggccttttctgcatctattgagataatcatgtggtttttgtcgttggttctgtttatatgatggattatgtttattgatttgcgtgtgttgaaccagccttgcatcctagggatgaagccgacttgatcatggtggataagctttctgatgtgctgctggtttcggtttgccagtattttactctggtagaattcggctgtgaatccatctggtcctggactttttttggttggtaaactattgattattgccacaatttcagctcctgttattggtctattcagagattcaacttcttcctggtttagtcttgggagagtgtatgtgtcgaggaatttatccatttcttctagattttctagtttatttgcgtagaggtgtttgtagtattctctgatggtagtttgtatttctgtgggatcagtggtgatatcccctttatcattttttattgtgtctatttgattcttctctctttttttctttattagtcttgctagcggtctatcaattttgttgatcctttcaaaaaaccagctcctggattcattgattttttgaatggttttttgtgtctctatttccttcagttctgctctaattttagttatttcttgccttctgctagcttttgactgtgtttgctcttgcttttctagttcttttaattgtgatgttagggtgtcaattttggatctttcctgctttctcttgtgggcatttagtgctataaatttccctctacacactgctttgaatgcatcccagagattctggtatgtcgtgtctttgttctcattggtttcaaagaacatctttatttctgccttcatttcgttatgtacccagtagtcattcaggagcaggttgttcagtttccatgtagttgagcggctttgagtgagattcttaatcctgagttctagtttgattgcactgtggtctgagagatagtttattataatttctgttctttcacatttgctgaggagagctttacttccaactatgtgatcaattttggaataggtgtgctgtggtgctgaaaacaatgtatattctgttgatttggggtggagagttctgcagatgtctattaggtccacttggtgcagagctgagttcaattcctggatatccttgctaactttctgtctcattgatctgtctaatgttgacagtagggtgttaaagtctcccat

SEQ ID NO: 123017 - DNA, 1611 bp, Homo sapiens
tcatccctgtcttgtgtcagttttcaaagggaatgcttccagtttttgcccactcagtatgacattggctgtgggtttgtcatagatagctcttattattttgaaatacatcccatcaatacctaatttattgagagtttttagcatgaagcgttgttgaattttgtcaaaggccttttctgcatctattgagataatcatgtggtttttgtctttggttctgtttatatgctggattacatttattgatttgggtatattgaaccagccttgcatcccagggatgaagcccacttgatcatggtggataagctttttgatgtgctgctggattcggtttgtcagtattttattgaggatttttgcatcaatgttcatcaaggatattggtctaaaattctcttttttgattgtgtctctgcctggctttggtatcaggatgatgctggcctcataaaatgagttagggaggattccttctttttctattgattggaatagtttcagaaggaatggtaccagttcctccttgtagctctggtagaattcggctgtgaatccatctggtcctggactctttttggttggtaagctattgattattgccacaatttcagatcctgttattggtctattcagagattcaacttcttcctggtttagtcttgggagagtgtatgtgtcgaggaatttatccatttcttctacattttctagtttatttgtgtagaggtgtttgtagtattctctgatggtagtttgtatttctgtgggatcggtggtgatatcccctttatcattttttattgcatctatttgattcttctctcttttcttctttattagtcttgctagtggtctatcaattttgttgatcctttcaaaaaaccagctcctggattcattaattttttgaagggttttttgtgtctctatttccttcagttctgctctgattttagttatttcttgccttctgctagcttttgaatgtgttggctcttgcttttctttctctctggctgcccttaacattttttccttcatttcaactttggtgaatctgacaattatgtgtcttggagttgctcttctcgaggagtatctttttggcgttctctgtatttcctgaatctgaatgttggcctgccttgctagattggggaagttctcctggataatatcctgcagagtgttttccaacttggtttcattctccccgtcattcatttcattcatttcatcttccatcgctgataccctttcttccagttgattgcattggctcctgaggcttctgcattcttcacatagttctcgagccttggttttcagctccatcagctcctttaagcactcctctgtattggttattctagttatatattcttctaaaattttttcaaagttttcaacttctttgcctttggtttgaatgtcctcccatagctcggagtaatttgatggtctgaagccttcttctctcagctcatcaaagtcattctccgtccagctttgttccgttgctggtgaggaactgcattcctttggaggaggagaggcactctgctttttagagtttccagtttttctgctctgttttttccccat

SEQ ID NO: 123018 - DNA, 1719 bp, Homo sapiens
  misc_feature (1)...(1719): n = a,t,c or g
tcaggtagtgtgatgcctccagctttgttcttttggcttaggattgacttggcgatgcaggctcttttttggttccatatgaactttaaagtagttttttccaattctgtgaagaaagtcattggtagcttgatggggacggcattgaatctgtaaattaccttgggcagtatggccattttcacgatattgattcttcnctacccatgagcatggaatgttcttccatttgtttgtgtcctcttttatttccttgagcagtggtttgtagttctccttgaagaggtgcttcacatcccttgtaagttggattcctaggtattttattctctttgaagcaattgtgaatgggagttcactcatgatttggctctctgtttgtctgttgttggtgtataagaatgcttgtgatttttgtacattgattttgtatcctgagactttgctgaagttgcttaacagcttaaggagattttgggctgagacgatggggttttctagataaacgatcatgtcgtctgcaaacagggacaatttgacttcctcttttcctaattgaataccctttatttccttctcctgcctgattgccctggccagaacttccaacactaatttattgagagtttttagcatgaagggttgttgaattttgtcaaaggctttttctgcatctattgagataatcatgtggtttttgtctttggctctgtttatatgcagttcctccttgtacctctggtagaattcggctgtgaatccatctggtcctggactctttttggttggtaaactattgattattgccacaatttcagagcctgttattggtctattcagagattcaacttcttcctggtttagtcttgggagagtgtatgtgtcgaggaatgtatccatttcttctagattttctagtttatttgcgtagaggtgtttgtagtattctctgatggtagtttgtatttctgtgggatcggtggtgatatcccctttatcattttttattgtgtctatttgattcttctctctttttttctttattagtcttgctagcggtctatcaattttgttgatcctttcaaaaaaccagctcctggattcattgattttttgaagggttttttgtgtctctatttccttcagttctgctctgattttagttatttcttgccttctgccagcttttgaatgtgtttgctcttgcttttctagttcttttaattgtgatgttagggtgtcaattttggatctttcctgctttctcctttcttccagttgatcgcatcggctcctgaggcttctgcattcttcacgtagttctcgagccttggttttcagctccatcagctcctttaagcacttctctgtattggttattctagttatacattcttctaaatttttttcaaagttttcaacttctttgcctttggtttgaatgtcctcccgtagctcagagtaatttgatcgtctgaagccttcttctctcagctcgtcaaaatcattctccatccagctttgttccattgctggtgaggaactgcgttccttctttccatgctccctattcctcttggcaactactgtctttgattgtgtccccaagggctttgttttagagctggggtgcaaagaagcacttgctggcttggagatggagagagcttgacggtagccccagtggctcagaaatctgtttccatctgtattgtgcat

SEQ ID NO: 123019 - DNA, 1221 bp, Homo sapiens
tcaaagatcagatatttgtagatgtgtggcattatttctgagggctctgttctgttccattggtctatatctctgttttggtagcagtaccaaaactgttttggtgactgtagccttgtagtatagtttgaagtcaggtagcgtgattcctccagctttgttcttttggcttaggattgacttggcaatgtgggctcttttttggttccatgcgaactttaaagaagttttttccaattctgtggagaaagtcattggtagcttgatggggatggcattgaatctataaatgaccttgggcaatatggccgttttcacgatattgattcttcctacccatgagcatggaatgttcttccatttgtttgtatcctcttttatttccttgagcagtggtttgtagttctcattgacgaggtccttcacatcccttggaagttggattcctaggtattttactctctttgaagcaattgtgaatgggagttcactcatgatttggctgtttgtcagctcttctttgtacctctggtagaattcggctgtgaatccatctggtcctggactttttttggttggtaagctattaattatagcctcaatttcagagcctgttattggtctattcagagactcaacttcttcctggtttagtcttgggagggtatatgtgtccaggaatttatccatttcttctagattttctagtttatttgcatagaggtgtttatagtattctctgatagtactttgtatttctgtgggatcggtggtgttatcccctttatcattttttattgcgtctatttgattcttctctcttttcttctttattagtcttgctagcggtctatcaattttgttgatcttttcaaaaaaccagctcctggattcattgattttttgaagagttctttgtgtctctacatccttcagttctgctctgaacttagttatttcttgccttctgctagcttttgaatgtgttttttcttgcttctctggttcttttaattgtgatgctagggtgtcaattttagatctttcctgctttctcttgtgggcatttagtgctataaatttccctctacacacttctttgaatgtgtcccagagattctggtatgttgtgtctttgttctcattgctttcaaagaacatctttatttctgccttcatttcattatgtacccagtagtcattcaggagcaggttgttcat

SEQ ID NO: 123020 - DNA, 1225 bp, Homo sapiens
tgacggggagaatgaaaccaagttggaaaacactctgcaggatattatccaggagaacttccccaatctagcaaggcaggccaacattcagattcaggaaatacagagaacgccaaaaagatactcctcgagaagagcaactccaagacacataattgtcagattcaccaaagttgaaatgaaggaaaaaatgttaagggcagccagagagaaagaaaagcaagagccaacacattcaaaagctagcagaaggcaagaaataactaaaatcagagcagaactgaaggaaatagagacacaaaaaacccttcaaaaaattaatgaatccaggagctggttttttgaaaggatcaacaaaattgatagaccactagcaagactaataaagaagaaaagagagaagaatcaaatagatgcaataaaaaatgataaaggggatatcaccaccgatcccacagaaatacaaactaccatcagagaatactacaaacacctctacacaaataaactagaaaatgtagaagaaatggataaattcctcgacacatacactctcccaagactaaaccaggaagaagttgaatctctgaatagaccaataacaggatctgaaattgtggcaataatcaatagcttaccaaccaaaaagagtccaggaccagatggattcacagccgaattctaccagagctacaaggaggaactggtaccattccttctgaaactattccaatcaatagaaaaagaaggaatcctccctaactcattttatgaggccagcatcatcctgataccaaagccaggcagagacacaatcaaaaaagagaattttagaccaatatccttgatgaacattgatgcaaaaatcctcaataaaatactgacaaaccgaatccagcagcacatcaaaaagcttatccaccatgatcaagtgggcttcatccctgggatgcaaggctggttcaatatacccaaatcaataaatgtaatccagcatataaacagaaccaaagacaaaaaccacatgattatctcaatagatgcagaaaaggcctttgacaaaattcaacaacgcttcatgctaaaaactctcaataaattaggtattgatgggatgtatttcaaaataataagagctatctatgacaaacccacagccaatgtcatactgagtgggcaaaaactggaagcattccctttgaaaactgacacaagacagggatga

SEQ ID NO: 123021 - DNA, 407 bp, Homo sapiens
ttacgagctcgcgctaccatcaggttgccttctttagacagcttagtccatacccaggatggcgatgatgtctttcagttcctgataacgttgcaggatggactgaacgccacgcgcggtgtcgtagtgttcctgaccaaccaccagcgggtccagctgacggctggtggagtccagcgggtcaacggccgggtagatacccagagacgcgatctgacggctcagtaccacggttgcgtcaaggtgcgcaaaggtggttgccggagacgggtcagtcaagtcattcgcaggtacgtatactgcctgtacggaggtgatagaaccagttttggtggaggtgatacgttcctgcagaacgcccatcttttccgccagggtcggctgaatacctaccgctgaaagcatac

SEQ ID NO: 123022 - DNA, 3529 bp, Homo sapiens; identical to SEQ ID NO: 120366

SEQ ID NO: 123023 - DNA, 2457 bp, Homo sapiens
ttactgagaatgatgattttcaatttcatccatgtctctgttgtttcctgactttttaatgattaccattctaactggtgtgagatgatatctcattctggttttgagttgcatttctctgatggccagtgacgatgagcattttttcatgtgtcttttggctgcataaatgtcttcttttgagaagtgtctattcatatcctttgcccactttttgatggggttgtttgttttcttcttgtaaatttgtttgacttcattgtagattctggatattaaccctttgtcagatgagtagattgcaaaaattttctcccattctgtaggctgcctgttcactccgatggtagtttcttttgctgtgcagaagctctttagtttaattagatcccatttgtcaattttggcttttgttgccattgcttttggtgatttagacatgaagtccttgcccatgcctatgtcctgaatggtattgcctaggttttcttctagggtttttatggttttaggtctaacgtttaagtctttaatccatcttgaattgatttttgtataaggtgtaaggaagggatccagtttcagctttctacatatggttagccagttttcccagcaccgtttattaaatagggaatcctttcccccttgcttgtttttgtcaggttggtcaaagatcagatagttgtagatgtgtggcattatttctgagggctccattctattccattgttctataactctgttttggtaccagtcccatgctgttttggttactgtagccttgtagtattttttgaagtcaggtggcttgatgcctccagctttgttcttttggcttaggattgacttgggaatgctggctcttttgtggttccatatgaacttgaaagtagttttttcaaattctttgaataaagtcattggtagcttgatggtgatggcattgaatctataaattaccttgggcagtatggccattttcacgatattgattcttcctatccatgagcatggaatgttcttccattcatttgtatcctcttttatttcattgagcagtggtttgtagttctccttgaagaggaccttcacatcccttgtaagttggattcctgggtattttattttctttgtagcaattgtgaatgggagttcactcatgatttggctctctgtttgtctgttattggtgtataagaatgcttgtgatttttgtacattgattttgtatcctgagactttgctgaagttgcttatctgcataaggagattttgggctgagacgatggggttttctagagatacaatcatgtcatctgcaaacagggacaatttgacttcctcttttcctaattgaatacccttcatttctttctcttccctgatttccctggtgagaacttccaacactatgttgaataggagtggtgagagagggcatccctgtcttatgccagttttcaaagggaatgctttcagtttttgcccgttgagtatgatgttagctgtgggtttgtcataaatagctcttattattttgagatacttcccttcaatacctaatttattgagagtttttagcatgaagggctgttgaattttgtcaaaggccttttctgcatcagctcctccttgtacctctggtagaattcggctgtgaatccatctggtcctggacttttttttggttggtaaactattgattattgccacaatttcagagcctgttattggtctattcagagattcaacttcttcctggtttagtcttgggagagtgtatgtgtcgaggaatgtatccatttcttctagattttctagtttatttgcgtagaggtgtttgtagtattctctgatggtagtttgtatttctgtgggatcggtggtgatatcccctttatcattttttattgtgtctatttgattcttctctctttttttctttattagtcttgctagcggtctatcaattttgttgatcctttcaaaaaaccagctcctggattcattgattttttgaagggttttttgtgtctctatttccttcagttctgctctgattttagttatttcttgccttctgccagcttttgaatgtgtttgctcttgcttttctagttcttttaattgtgatgttagggtgtcaattttggatctttcctgctttctcctttcttccagttgatcgcatcggctcctgaggcttctgcattcttcacgtagttctcgagccttggttttcagctccatcagctcctttaagcacttctctgtattggttattctagttatacattcttctaaatttttttcaaagttttcaacttctttgcctttggtttgaatgtcctcccgtagctcagagtaatttgatcgtctgaagccttcttctctcagctcgtcaaaatcattctccatccagctttgttccattgctggtgaggaactgcgttc

SEQ ID NO: 123024 - DNA, 2490 bp, Homo sapiens
ctgttgtttcctgactttttaatgatcgccattctaactggtgtgagatggtatctcattgtggttttgatttgcatttctctgatggccagtaatgatgagtattttttcatgtgttttttggctgcataaatgtcttcttttgagaagtgtctgttcatgtcctttgcccactttttgatggggttgtttgtttttttcttgtaaatttgtttgagttcattgtagattctggatattagccctttgtcagatgagtaggttgcaaaaattttctcccattttgtaggttgcctgttcactctgatggtagtttcttttgctgtgcagaagctctttagtttaattagatcccatttgtcaattttgtcttttgttgccattgcttttggtgttttagacatgaagtccttgcccatgcctatgtcctgaatggtaatgcctaggttttcttctagggtttttatggttttaggtctaacgtttaagtttttaatccatcttgaattgatttttgtataaggtgtaaggaagagatccagtttcagctttctacatatggctagccagttttcccagcaccatttattaaatagggaatcctttccccattgcttgtttttctcaggtttgtcaaagatcagataggtgcacatatgcggcattatttctgagggctctgttctgttccattgatctatatctctgttttggtaccagtaccatgctgttttggttactgtagccttgtagtatagtttgaagtcaggtagtgtgatgcctccagctttgttctttttgcttaggattgacttggcaatgcgggctcttttttggttccatatgaactttaaagtagttttttccaattctgtgaagaaaggcattggtagcttgatggggctggcattgaatctgtaaattaccttgggcagtatggccattttcacgatattgattcttcctacccatgagcatggaatgttcttccatttgtttatatcctcttttatttccttgagcagcggtttgtagttctccttgaagagttccttcacatcccttgtaagttgaattcctaggtattttattctctttgaagcaattgtgaatgggagttcagtcataatttggctctctgtttgtctgttgttggtgtataggaatgcttgtgatttttgcacattgattttgtatctcgagactttgctgaagttgcttatcagcttaaggagattttgggctgagacaatggggttttctagatatacaatcatgtcatctgcaaacagggacaatttgacttcctcttttcctaattgaataccctttatttctttctcctgcctaattgccctggccagaacttccaacactatgttgaataggagtagtgagagagggcatccctgtcttgtgccagttttcaaagggaatgcttccagtttttgcccattcagtatgatattggctgtgggtttgtcatagatagctcttattattttgaaatacgtcccatcaatacctaatttattgagagtttttagcatgaagggttgttgaattgtgtcaaaggccttttctgcatctattgagataatcatgtggtttttgtctttggctctgtttatatgctggattacatttattgatttgcgtatattgaaccagccttgcatcccagggatgaagcccacttgatcatggtggataagctttttgatgtgctgctggattcggtttgccagtattttattgaggatttttgcatcaatgttcatcaaggatattggtctaaaattctctttttttgttgtgtctctgccaggcctctggtagaattcggctgtgaatccatctgatcctggactttttttggttggtaagctattaattattgtctcaatttcagagcctgttattggtctattcagagattcaagttcttcctggtttagtcttgggagggtgtatgtgttgaggaatttatccatttcttctagattttctagtttatttgcatagatgtgtttatagtatcctgtgatggtagtttgtatttctgtgggatcagtggtgatatcccctttatcattttttattgcatctatttgattcttctctcttttcttctttattagtcttgctagtggtctatcaattttgttgatcttttcaaaaataaaaaataaaaaaccagctcctggattcattgatttttttgaagggttttttgtctctctatctccttcagttctgctttgatcttagttatttcttgccttctgctagcttttgaatgtgtttgctcttgcttctctagttcttttaattgtgatgttagggtgtcaattttagatctttcctgctttctcttgtgggcatttagtgctataaatttccctctacacactgctttgaatgtgtcccagacattctggtatgttgtgtttttgttctcattggtttcaaagaacatctttatttctg

SEQ ID NO: 123025 - DNA, 1986 bp, Homo sapiens
ttatacaaaaatagtgtaaaatactttcacaactagccggtcggcaatatcatgtcgaatatcccgattgttggcgcgctgttctctggccccgcatttggtatcggtatcctcgcggcaggcgtgatcctcgccatcatgattattccgtacattgcggcggtaatgcgtgatgtgttcgaacaaaccccggtgatgatgaaagagtcggcctacggtattggctgcaccacctgggaagttatctggcgtatcgttcttccgttcaccaaaaatggtgttatcggcggcatcatgctggggctgggccgcgcgctcggtgaaaccatggcggtgacctttatcatcggtaacacctaccagctcgacagcgcctcgctgtatatgccgggcaacagtatcacctctgcgctggcgaacgaatttgcggaagcggaatccggtctgcacgttgccgcactgatggaactgggcctgatcctgtttgtgattaccttcatcgtcctcgccgcatcgaagtttatgattatgcgcctggctaagaatgagggggcacgctaatggcactgcggcgctggctgaatctcgccgcaaaatgcaggcgcgtcgccgcctcaaaaaccgtattgcgctgacgctctcgatggcgacgatggccttcggcctgttctggctgatctggattttaatgtccaccatcactcgcggtatcgacggtatgtcgctggcgccgttcactgaaatgacgccgccgccccataccgaacgtggtggtctggcgaacgcgttaagttggaaaagacggaacgtggatatatcaaacaacatagaaacctggatcttacgagcacgcgctaccaccagtttgtcttcttcagacagttcatccatacccaggatggcgatgatgtctttcagttcctgataacgttgcaggatggactgaacgccacgcgcggtgtcgtagtgttcctgaccaaccacttgcccgtctccacgtctaggtagcatagatttgaagcttacgtcatgtaattttatagggggtttcctctggtagaattcagctgtgaatccgtctggtcctggactttttttggttggtagactattaattactgcctcaatttcagaacttgttattggtctattcagggatttgacttcttcctgggttagacttgggagagtgtacgtatccaggaatttatccatttcttctagattttctagtttctttgcatagaggtatttagagtattctctgatggtagtttgtatttctgtgggatcagtggtgatatcccctttatcattttttattgcatctatttgattcttctctcttttcttctttattagtctggctagcggtccatcaattttgttgatcttttcaaaaaaccagctcctggattcattgattttttgaagggttttttgtgtctctatctccttcagttctgctagttctctccattgtgatgttaaggtgtcaattttagatctttcctcctttctcttgcgggcatttagtgctataatttcccttacgacctgctccttttggtccgttggtcctgcctgactgcatgcatggactattgttgcttgcttgtgcaacttgtatgccctgccggcagctgttccactgacccttgaatgcctggtcaactgtgcactaggtgctcgttgcattgccaaatgcatgggcacgccgcgcgctcccccgtttaaatgcaactctggcttcccccgattgacagatacaactcgagctcggtacctctggttcaatatgagccttctgagcaaagcagcaaagagtgttctttttccataagttgttgactttctgtcttgtgaccctggtaagtaaccatgatcgaactgatcaagaatctgtaacttggccaaaggtaaccacaaaattgtgcaaaactgggactctgctggtggctgccattggctgaagggcttccccat

SEQ ID NO: 123026 - DNA, 3738 bp, Homo sapiens
atggcacgagaactacgtgatgactgcacaagcttcagtagccgattcgatcaactggaagaaagggtatcagtgactggagatcaaatgaatgaaatgaagccagaagagaagtttagagaaaaaagagtaaaaagaaacgaacaaagcctccaagaaatatgggactatgtgaaaagaccaaatctacgtctgattggtgtacctgaaagtgactgggagaatggaaccaagttggaaaacactctgcagggtattatccaggagagcttccccaatctagcaaggcaggccaacattcacattcaggaaatacagagaatgccacaaagatacacctcgagaagagccactccaagacacataattgtcagattcaccaaagttgaaatgaaggaaaaaatattaagggtagccagagagaaagacagatcaacgagacagaaagttaacaaggatatccaggaattgaactcagctctgcaccaagcggacctaatagacatctacagaagtctccaccccaaatcaacagaatatacatttttttcagcaccacaccacacctattccaaaattgaccacatacttggaagtaaagctctcctcagcaaatgtaaaagaacagaaattataacaaactgtctctcagaccacagtgcaatcaaactagaactcaggattaagaatttcactcaaaaccgctcaactacatggaaactgaacaacctgctcctgaatgactgttgggtacataacgaaatgaaggcagaaataaagatgttctttgaaaccaacgagaacaaagacacaacataccagaatctctgggatgcattcaaagcagtgtgtagagggaaatttatagcactaaatacccacaagagaaagcaggaaagatccaaaactgacaccctaacatcacaattaaaagaactagaaaagcaagagcaaacacattccaaagctagcagaaggcaagaaataactaaaatcagagcagaactgaaggaaatagagacacaaaaaacccttcaaaaaattaatgaatcccaggagctggtttttttttaaagatcaacaaaattgatagatcactagcaagactaataaagaagaaaagagagaataatcaaatagatgcaataaaaagtgataaaggggatatcaccactgatcccacagaaatacaaactaccgtcagagaatactataaacacctctatgcaaataaactagaaaatctagaagaaatggataaatttcctggatacatacaccctcccaagactaaaccaggaagaagtcgaatcccttcagtagactaataacaggctctgaaattgaggcaataattaatagcctatcaaccaaaaaaaagtccaggaccagacggattcacagctgaattctaccagaggtacaaagaggcgttgataccattctttctgaaactattgcaaacaatagaaaaagagggaatcctccctaactcattttaatgaggccagcatcatcctgataccaaaacctggcagagacacaaccaaaaaagagaattttagaccaatatccttgatgaacattgatgcaaaaatcctcaataaaatactggcaaaccgaatccagcagcacatcaaaaagcttatccaccatgatcaagtgggcttcatccctgggatgcaagggctggttcaatatacgcaaatcaataaatgtaatccagcatataaacagagccaaagacaaaaaccacatgattatctccatagatgcagaaaaagcctttgacaaaattcaacaacccttcatgctaaaaactctcaataaattaggtattgatgggacgtatttcaaaataataagagctatctatgacaaacccacagccaatatcatactgaatgggcaaaaactggaagcattccctttgaaaactggcacaagacagggatgccctctctcacctcaccactcctattcaacatagtgttggaagttctggccagggcaattaggcaggagaaggaaataaagggtattcaattaggaaaagaggaagtcaaattgtccctgtttgcagacgacatgattgtatatctagaaaaccccattgtctcagcccaaaatctccttaagctgataagcaacttcagcaaagtctcaggatacaaaatcagtgtacaaaaatcacaagcattcttatacaccaacaacagacaaacagagagccaaatcatgagtgaactcccattcacaattgcttcaaagagaataaaatacctgggaatccaacttacaagggatgtgaaggacctcttcaaggagaactacaaatcactgctcaaggaaataaaagaggatacaaacaaatggaagaacattccatgctcatgggtaggaagaatcaatatcgtgaaaatagccatactgcccaaggtaatttgcagattcagtgccatccccatcaagctaccaatgcctttcttcacagaattggaaaaagctactttaaagttcatatggaaccaaaaaagagcccgcattgccaagtcaatcctaagccaaaagaacaaagctggagacatcacactacctgacttcaaactatactacaaggctacagtaaccaaaacagcatggtactggtaccaaaacagagatatagatcaatggaacagaacagagccctcagaaataatgccacatatctacaactatctgatctttgacaaacctgagaaaaacaagcaatggggaaaggattccctatttaataaatggtgctgggaaaactggctagccatatgtagaaagctgaaactggatcccttccttacaccttatacaaaaatcaattcaagatggattaaagatttaaacgttagacctaaaaccataaaaaccctagaagaaaacctaggcattaccattcaggacataggcgtgggcaaggacttcatgtccgaaacaccaaaagcaatggcaacaaaagccaaaattgacaaatgggatctaattaaactaaagagtttctgcacagcaaaagaaactaccatcagagtgaacaggcaacctacaacatgggagaaaattttcgcaacctactcatctgacaaagggctaatatccagaatctacaatgaactcaaacaaatttacaagaaaaaaacaaacaaccccatcaaaaagtgggcgaaggacatgaacagacacttctcaaaagaagacatttatgcagccaaaaaacacatgaaaaaatgctcatcatcactggccatcagagaaatgcaaatcaaaaccacaatgggatatcatctcacaccagttagaatggcaatcattaaaaagtcaggaaacaacagccacttagagagtgctcttataaacagctctgtgcatcaccagaaatgcattgcacctctagaaggaaatcagaaatttaagagcagcaggtacaacgtgaactggttgctgagtcaccatatgaggaaggcgccattctttgtgcccattttagagataaggagattaaagtacaaggacatgaagttacttgcccaaagttgtccagataagcagcagagttggggtttgagccagctggaatctggtgcctgcaccaagaaccacgaacactatgccgccttcgtggaatgtgtaggagtgattaagcttaagtatttccacatggggctatgcaaacactatcaaggtggtgaaaactgcagcagctga

SEQ ID NO: 123027 - DNA, 452 bp, Homo sapiens
aggtggagaccctaagtaggacagttattttggaagggctaccctctggctggctttcctgatccgtgcgctcagagctggaaggtggcccacgtcctacttttgcggttgggtcatatcaaatctgtatcggctaacgggaaggaagttacgagcaagttccaccggaaagaaaatctagcgcggggactgcactcgaggccgaggagagggcagcgcgtccgtggtggggtcgcccagcactgcgagccgcgctgaaccccacccccggcctgcagggtgcggctccctggctgccccgtggacccggccagcccgggacgaggacgcaggacctcggcagggacgccggagccagcccttcgccatccccacacgccccgcggcccagtggccgcgcgcacgttacctgcggagcccggccctgcccgcccgtctgggctgccgccctc

SEQ ID NO: 123028 - DNA, 545 bp, Homo sapiens
  misc_feature (1)...(545): n = a,t,c or g
gcggccgcggaggcggatgcagccatggcggagggcggcagcccagacgggcgggcagggccgggctccgcagtgcaggtcgtaatctgaaggagtggctgagggagcaattttgtgatcatccgctggagcactgtgaggacacgaggctccatgatgcagcttacgtcggggacctccagaccctcaggagcctattgcaagaggagagctaccggagccgcatcaacgagaagtctgtctggtgctgtggctggctcccctgcacaccgttgcgaatcgcggccactgcaggccatgggagctgtgtggacttcctcatccggaagggggccgaggtggatctggtggacgtaaaaggacagacggccctgtatgtggctgtggtgaacgggcacctagagagtacccagatccttctcgaagctggcgcggaccccaacggaagccggcaccatcgcagcacccctgtctaccacgcctctcgcgtgggccgggcagacatcctgaaggccctcatcaggtacggngctgatgttgacgtc

SEQ ID NO: 123029 - DNA, 1412 bp, Homo sapiens
ttcacgaatgcattcatttattcaatgaacttcgcgtcagccactggctgtcatcagttaccgacctgattgagggcttcatggaagggatttggaggagcattcatctaaaaccacagcacgctgcgacgctcagccctgcagtgggccctcaccagtccccgcgcctccgaatccaccctcccggggctgctcgtggctagcggggggcacctgcggggaccaagccagcccggccgaggcccgggtcccgcccgccacggccctcggggccccgcccgcatctggcagaagccacgccccgtccgtgtgggtggggacggcccgccggaccgaaattcccagactgctgcctcaggcacccggctttccgactccttggcttcttatgtgaggaaaccacagcgcggccggcatccagagagtcggttagccgcgaagttcccgccggacgaagggaccagccagcgccctgctagacagcgaggccggaagcggaggcgtggcccctgcgcggccccggaaaccagtgaggccggcgcgcgcccgccggaagccgcgaccccgacgcgccccccattgccctcggcgccggaagtggtcgcgggtcgttctgcttcctgcccgaggggcgtgcgcgggtcaggggcggccgcggaggcggaagcatccatggcggagggcggcagcccagacgggcgggcagggccgggctccgcaggtaacgtgcgcgcggccactgggccgcggggcgtgtggggatggcgaagggctggctccggcgtccctgccgaggtcctgcgtcctcgtcccgggctggccgggtccacggggcagccagggagccgcaccctgcaggccgggggtggggttcagcgcggctcgcagtgctgggcgaccccaccacggacgcgctgccctctcctcggcctcgagtgcagtccccgcgctagattttctttccggtggaacttgctcgtaacttccttcccgttagccgatacaaatttgatatgacccaaccgcaaaagtaggacgtgggccaccttccagctctgagcgcacggatcaggaaagccagccagagggtagccctagggagggcaggcactttttcaccattctgccgcccacggcgtgtccggtggtacagcggggggcagccttcccaccccacccaagcccagaccagggacaacggggaccccgtcctcagcgagcttcgtagtgacacaacatgtccaggggccctttggcccaccagcaagggaggcagatagaaaggctcacacccaccttccaaaataactgtcctacttagggtctccaccttgcagtgtccctaccatgcagatgtgaaggaagcggtcaggacaggttcccgtttcccggtggtgtggtgggagttcctt

SEQ ID NO: 123030 - DNA, 404 bp, Homo sapiens
gatctgtttctttttcttggcttgatgtttggtaggtccttgaatgggcaagagggcacatgaagtacggcgtcctccacattcacggcctctacacggacccctgcggggtggtgctggacccatcggggtataaagacgtcactcaagacgcagaagtcatggtacggcccgtcctaattagcatcggtgcgtcctctcagggattactggtggccactggccattggctgcagttgagtggcttcccaggctccaggcgtccgtgcccttcaggtcggccctgcacacagttgctgagggaggggccacgtctcttggcctccgccgtggccctggggacccccatgttgccctctatgtttactaaatggcttgcccaacatttgatggaaagaaacaat

SEQ ID NO: 123031 - DNA, 2817 bp, Homo sapiens
  misc_feature (1)...(2817): n = a,t,c or g
ataaagcgtacgattgttaggatactctacaccggccgccgagagaccccggaggcgtagccggctgcggaggttattaggtggcagcgcgagctgggaccagcgggtgggaggcgccgcacaattcacagatggattcagtggaaaagacaacaaatagaagtgaacaaaaatccagaaagtttttaaaaagcctcatccggaaacagccccaggaactgctcctggttatcgggactgggcgtcagcgcagcagttgggcccccggaatccctgccctttgctcgtgggagaagctgcatcgaggccgtcatcgaggctgcagagcagctggagggtgctgcaccccggagacgttcgccgagttccggaggaaagttgacaaaggaccgggacctgtttgttgttcgcccttgatttgatcccgaagatgtcacctcgcacagggnattgccaagcccagcttcttccaggactgcctgatggaggtgtttgacgacctggagcagcacatccggaactcctgtggttctgcagtccgatcctcagcctgatggacagaggcgccatggtcctgaccaccaactatgacaacctgctggaggcctttggccggcggcagaacaagcccatggagtccctggacttgaaggacaagaccaaggtccttgaatgggcatgagggcacatgaagtacggcgtcctccacattcacggcctctacacggacccctgcggggtggtgctggacccatcggggtataaagacggtcactcaagacgcagaagtcatggaagtcctccagaacttataccgcaccaagtcctttctgtttgtgggctgtggggagacccttcgtgatcagatattccaggccctctttctttactccgtgccgaataaggtggatttggagcactacatgcttgtgctgaaggagaatgaagaccatttctttaagcatcaggcagatatgcttctgcacggaatcaaagttgtatcctacggggactgttttgaccactttccaggatatgtgccaagaactttgccactcagatctgcaaacagcaaagcccagatgctgatcgcgtggacagcaccacattattgggtaatgcatgccaggactgtgcaaagaggaagttagaagagaatggaattgaagtttcaaaaaaacgcacacaatcagatactgatgatgctggagggtcttgaaatgtgttacaggaaaacctgcaacttgaaaactagccttctgtaaccacagtgcccaaacgaagaggaatgtatggagaactccacgtggatctctgattgcgaaaccgtcacatacaccaagagagccacatgggcatgtggccctcaaggctgggtgagagggctcccctgtgtgttgaactatgcaggagggtgatgcggacacatttcaggtggactttgcaaggactgatggatagctacctcagggaccagaatccgtgggaagggatggacctggtgttcccgttcccatctgacaggctctcttttgtcaaggtggtatttttcgtaataaaaggggaagagtaaagactgtccaagcaacagtagctgccaaagagaaaatacgaaatagacactttttttttttgagtcagagtctcactctgtcacccaggacagagtgcagtggtacgatctcaagctcactgcagccgccaccgcctgggctcaagtgattctcctgcctcagcctcccgagtagctgggattacaggcgtccaccaccatgcccagctaatttttttatttttagtagagttggagtttcaccatgttggccaggatggtctcgaactcttgacctcaggtgatccacccgccttggcctcccaaagtgctaggattacaggcatgagccactgcgcccagcaaaataaacacattttataatttgtatgtggaaacatgttactattaggaaaggctttttaaaggtacgttttaaaggtccactgtttaaatagttaaaggaatgaattccgctagcgaaaatgtttttaggggagaacagctggatcaaaagggcttctttggaattaggttgttttagtaacttctgttccaaaggaaacacaggtctggatattgctaaggaactggaaatcggggggagccagaggcccttttcagtccaggccaacattgtgcacggccactgtgggactgacaacctggtaagcttcaggttcgagagaccaggtttcaaaccattataagttccaggctttgcaagtctttattctctggggtaatatccagtctttatgttattgtctcttaaaattctcttccatgggcccacataaggggagtttgcagagagtgagggaggcaaaacttgaaaagggccctgccaaaactttaaaaaccctcctcaggtttcaccccacatgaaaaacagctgtgcctgagtgtgcctgccggtgcccggggagcttcttctgacttgtgacccggcagaggctttctgtggcggtgcatggagcggcccttacagtggagggttctctttggaaacaaacagccctgcttggtttcagtttggaggccacttatcttcaatgtgcacatttcttgccaagccctgtgacactccccattgatgactcccataggtacagataaagttaagaacaggaaacagaagggtaggatgcatagggaggggagagaagccctgaaaacttttttttttctttttgaagcatggaaaacaaatcttttatgccactccagccataaataacattttaacttcaaaaaaaaaaaaa

SEQ ID NO: 123032 - DNA, 583 bp, Homo sapiens
acactgttgttgaagccagatcgttgccccagggcacttcagctcagaaagctgaactcattgctttaattcgggccttagaactcagtgaaggtgactcttaaatttgagaaacattggaatagtggattaattcggagtagcggtttttgtgatccacagatgaagcacagagaaaaggatagagatggagacacaaaaacattgatctcccaagctgtagagactgggtctcctttgggaatatctacaactaccaactgcacaacaaagtagtaagtgcagcttcgaatttgtcttgtggtaggccacgatcctgtgcccacaaggacagtgcacaggtcatccgagcacacggctgagcccggtaggcaaaggaaggaaggtccaggtcacagggcagcgaggcccagcacaatgaaggagaatggaaacacaccacacctcaattagaatgggatccaattcttttacaaaaatttttttctgattacaaaatttaagggaaaaagggaaagttcttccttcctacagactgacatgtaataaatggagatggaacacacaaaaaaaaaaaaaaaaa

SEQ ID NO: 123033 - DNA, 1821 bp, Homo sapiens; identical to SEQ ID NO: 117658

SEQ ID NO: 123034 - DNA, 2365 bp, Homo sapiens
cgttaccagggagagaggctcaccacttttgagtccacggggcttgcacctccacaagacaaacatccctaggccacccagagtaggcaagagaggaggtgaagcctcgggagaaacccctcccttggcagctggtttaagacccaaaacggggatacaaatgcccctgagagagcagtggtatactggaatagatgaggatgggcacatggtggagaggcgtgtttttgtgtaccagcccttcttctctgccgacctcctcaactggaaaaacaataccccatcctatactgaaaagccgcaagctctaattgatttgctccaaactattatccagacccataaccccacttgggctgattgccaccagttgctcatgttcctctttaacacagatgaaaggcggagagtgctccaagcagcaactaagtggctagaggaacatgcaccggctgattaccaaaacccccaagagtatgtaaggacccagttaccgggaaccgacccccagtgggacccaaatgaaagagaggatatgcaaaggctaaaccgatacagggaagctctcttggaaggattaaagaggggagcccagaaggccacaaacgtggccattcagggaaaagaagaaagtccagcacaattctacgagaggctgtgtgaggcctattgtatgtatactccctttgatcccaatagtcctgaaaatcagcgcatgattaacatggctttagttagtcaaagtgcagaagacattagaagaaaactgcagaaacaggctgggtttgcagggatgaacacatcacagttattagaaatagctaaccaggtgtttgtaaacagggatgcagtaagccctaaggaaaaccgcagagagaatgaacatcaggtccggcgaaatgccgacctgttagctgcagcaatcacaggggtccccccaaagaggcaagggaaggggggccccgggaaagaaattcagcctggttgtcagagcttgcagcgtaatcagtgtgcttattgtaaagaaataggacattggaagaacaaatgccctcagctaaaaggaaaacaaggtgactcggagcaggaggatccagacaaggaggaaggggccctgctcaacctgggctcaaggacccccaaagagcctatggtcaggatgacagttgggggtaaagacattgattttcttgtagataccggtgctgaacattcggtagtaaccaccccggtcagccccttatccaaaaagactattgacataattggagccacaggagtttcagcaaaacaagctttctgcttgccccggacttgtactgtaggaggacataaagtgattcatcagtttttgtacatgcctgattgtcccttgcccttgttgggaagggacttgcttagcaaactgagagccactatctattttacagagcatggctctttgctgctaaagttacccggaacgggagtcattatgacccttatggtaccccgagaggaggaatggaaacttttcttaactgagtcgggccaagagataagaccagctctggctaagtggtggccaagagtgtgggcagaagacaaccctccagggttggcagtcaaccaagcccccgtacttatagaagttaagcctagggcccagccggttaggcaaaaacagtacccggtccccagagaagctcttcaaggtatccaggtccatctcaagtgcctaagaacctttggaattatagttccttgtcagtctccatggaacactcccctcctgcctgttcccaagcctgggaccaaggactacaggccggtacaggatttgcgcttggttaatcaggctacagtgactttacacccaacagtacctaactggtacacattgctggggttgctgccagctgaggacagctggttcacctgcttggacctgaaagatgctttctttagcatcagattagcccctgagagccagaagctgtttgcctttcagtgggaagatccggagtcaggtgtcactactcagtacacttggatccggcttcccaaagggttcaagaactcccccaccatcttcggggaggcattggctcaagacctccagaagtttcccaccagagacctaggctgcatgttgctccagtacgttgatgacctttttctgggacaccctacggcagtcaggtgcgccaagggaacagatgctctactccggcacctggaggactgtgggtataaggtgttcaagaaaaaagttcagatctgccgacagcaggtacgttacttgggatttactatccggcagggggagtgcagcctgggatcaaaaagaaagcaagtcatttgtaatctaccggagcctaagacc

SEQ ID NO: 123035 - DNA, 246 bp, Homo sapiens
atggaggaaggatggattcggttaccagatgggagactagctgtgccacagctgctaggagctgcagttgtactggctgtgcaagaaaccacccatcgagatcaggagtcactggaaaagttgttaggctggtatttctacatctcacttctgtcagcccttgccaaaacgatttcgaccgccttacggatcggctcagacaacgggcctgtgtttttggctgccttggtacagaagacagcaaag

SEQ ID NO: 123036 - DNA, 472 bp, Homo sapiens
  misc_feature (1)...(472): n = a,t,c or g
cccccgccgcnnngnnnnaatggagactganggctaacgcacgagcnaccggaccgganaacccgggtcgacgatttcgtatggcagcctaccctgtggcaacgcgttagtctttttgccgcagggggcgcattggggtccagccgtgcccagaacgcaaatcagaggtagtcggacctttcccgctggcgcgcagcctcagctagtttattctagtgggcccaacctctgagaccatccttgaacatcagtagactgtgagttgtacatgggcgagagcagcttcaccaacccctgcaaagtgactctgaagaagatgacaatacctgcttcagtcacacccggaagctgactggtccacgcatggccaaagcatgagaaaactcattgcgggactcattttccttaaaatttggacttataccatagggacttcaactgaccttcctcagactgaagactattcccagta

SEQ ID NO: 123037 - DNA, 408 bp, Homo sapiens
  misc_feature (1)...(408): n = a,t,c or g
gatcaggtgtggatcaaggattggaacataggctccttgcggccacggtgaaaaggaccccagaccatcatcttgaccactcccacagccgtaaagatagagggaatcccagcctggatccaacacagccaggtaaaacctgcagcacctgagacctgggaggtgagaccaagcctagataacccctgcaaagtgactctgaagaagatgacaagccctgctccagtcacactcagaagctgactggtccacgcatggccaaagcatgagaaaactcatcgtgggactcattttccttaaattttggacttgtacagtaaggacttcagctgaccttcctcagactgagaactgttcccagtcacnnnnnnnnnnnnnnnnnnnnnnnnnnnnnnnnnnnnnnnnntt

SEQ ID NO: 123038 - DNA, 1105 bp, Homo sapiens
atgttgaaaaattttaagaagggatttaatggcgactatggggttactatgacaccagggaaacttagaactttgtgtgaaatagattggccaacattagaagtgggttggccatcagaaggaagcctggacaggtcccttgtttctaaggtatggcacaaggtaactggtaagtcaggacactcagaccagtttccatacatagacacttggttaccacagtgggtaagagggcaggcagcagcagtgctagtagcaaagggacagatagtcaaggaaggatcccgctccacccaccgagggaaatcaactcctgaagttctgttcgacccaacatcagacgatccattgcaggagatggcaaaagtcatcccagtggtgccctccccttaccagggagagaggctccccacttttgagtccacagtgcttgtgcctccgcaagacaaacatatccctaggccacccagagtagacaagagaggaggtgaagcctcaggagaaacccctcccttggcagctcgtttaagacccaaaacggggatacaaatgcccttgagagagcagcggtatactggaatagatgaggatgggcacatggcggagaggcgtgtttttgtgtgccagcccttcacctctgccgaccttctcaactggaaaaacaataccccgtcctgtactgaaaagccacaagctctaattgatttgctccaaactattatccagacccataaccccacttgggctgattgccaccagttgctcatgttcctctttaacacagatgaaaggcggagagtgctccaagcagcaactaagtggctaggggaacatgcaccggctgattaccaaaacccccaagagtatggaaaagaagaaagtccagcacaattctacgagagactgtgtgaggcctatcacatgtatactccctttgatcccgatagccctgaaaatcaacgcatgattaacatggctttagttagtcaaagcgcagaagacattagaagaaaactgcagaaacaggctgggtttgcagggatgaacacatcacaattattagaaatagctaaccaggtgtttgtaaacagggatgcagtaagcc

SEQ ID NO: 123039 - DNA, 711 bp, Homo sapiens; identical to SEQ ID NO: 122071

SEQ ID NO: 123040 - DNA, 447 bp, Homo sapiens
atgcatttcctcatgcttcggccgtgtgtggaccagtcagcttccgggtgtgactggggcagggcttgtcgtcttcttcagagtcactttgcaggggttggcgaagctgcttccatccacgtaggactgcttagcagtgaaaagggcgtcctgggtgcagccaacagggtacagctgcaagccattgttgaaggtgtcttgacgtatcagagaaggcaggcagcctttccgcccttgcggagggagagactagcatcatcatcaagagataaaccgaagtgtgctggaaaacacacgagctctttagtaagagcaggcgacatgcaaggaaccatagtaacaggaacagaggtcctgaggctggatatggaacccaagtttgaggatgaccaactgagaccagtgttgctggagcacaaagtgccaaggagagaaatggcaggctaa

SEQ ID NO: 123041 - DNA, 373 bp, Homo sapiens
aaattgtggagatctgattcctagatttcgactgcccttacggatcggctcacataacgggcctgcgtttttggctgccatggtacagaaaacggcaaaggtattggggatcacacggaaactgcatgccgcctcccagcctcagagttccggaaaggtgtccaagtcacacagagccacggaatctcacaggagcctgagaactcctcctcctgggactctcagaggatccagaactgcagcccatcctcgctgggctgtccctgtccatgtatctggtcacggtgctgaggaacctcctcatcagcctggctgtcagctctgactcccacctccacaccccaatgtgcttcttcctctccaacctgtgctg

SEQ ID NO: 123042 - DNA, 1857 bp, Homo sapiens
atgagacaagatggcaaggtggcaagacagctattggtgattggtgagatggtgagacagcgatcagcagctggcaataaggaaggagacaagacgccccagcctatacctctcactgcccaaggaagtaagccctaccagtaccaccaggagggtacccctatatcagcccctaaaatcaaacctgtgtccattgtgggagataagaaacagatggatctgagtactgtccaaaaatatgcagatggagtggccacacataacctagaccatgctagttatcatgtggaaggagatacagttccagatatggaccctcagtggaattaccagagggcttcccaagatctcaaatgcaaaaatcacatgacggagaaagtcagaaatttcaagtgtgagagggagctggcccaaggaaattctactggctttgagatggagggatcacgtggcaaggatggtctctatgagctaagtggcccacagctgacagcaaggaaagaggtacctcattcctgcaactgcaacaaactaaatatggctgatgatctgaatcagcttctgattaaagccactcccttcactatctcggtgtctcctgtccgcggctcgtcctgctacatttcttggttccctgaccggcaagcgagagccgtgtgtggcaggcccccgtggaggatcaacgcagtggctgaacaccgggaaggaactggcacttggagtctggacattcgttaccagggagagaggctcaccacttttgagtccacggggcttgcacctccacaagacaaacatccctaggccacccagagtaggcaagagaggaggtgaagcctcgggagaaacccctcccttggcagctggtttaagacccaaaacggggatacaaatgcccctgagagagcagtggtatactggaatagatgaggatgggcacatggtggagaggcgtgtttttgtgtaccagcccttcttctctgccgacctcctcaactggaaaaacaataccccatcctatactgaaaagccgcaagctctaattgatttgctccaaactattatccagacccataaccccacttgggctgattgccaccagttgctcatgttcctctttaacacagatgaaaggcggagagtgctccaagcagcaactaagtggctagaggaacatgcaccggctgattaccaaaacccccaagagtatgtaaggacccagttaccgggaaccgacccccagtgggacccaaatgaaagagaggatatgcaaaggctaaaccgatacagggaagctctcttggaaggattaaagaggggagcccagaaggccacaaacgtggccattcagggaaaagaagaaagtccagcacaattctacgagaggctgtgtgaggcctattgtatgtatactccctttgatcccaatagtcctgaaaatcagcgcatgattaacatggctttagttagtcaaagtgcagaagacattagaagaaaactgcagaaacaggctgggtttgcagggatgaacacatcacagttattagaaatagctaaccaggtgtttgtaaacagggatgcagtaagccctaaggaaaaccgcagagagaatgaacatcaggtccggcgaaatgccgacctgttagctgcagcaatcacaggggtccccccaaagaggcaagggaaggggggccccgggaaagaaattcagcctggttgtcagagcttgcagcgtaatcagtgtgcttattgtaaagaaataggacattggaagaacaaatgccctcagctaaaaggaaaacaaggtgactcggagcaggaggatccagacaaggaggaaggggccctgctcaacct

SEQ ID NO: 123043 - DNA, 1635 bp, Homo sapiens
atggaggaaggatggattcggttaccagatgggagagtagctgcgccacagctgctgggagctgcagttgtactggctgtgcaagaaaccacccatcgaggtcaggagtcactggaaaagttgttaggccggtatttctacatctcacctttgtcagcccttgccaaaacggtgaggcagcgggattttgccgatttcggaaccaccatcaaacaggattttcgcctgctggggcaaaccagcgtggaccgcttgctgcaactctctcagggccaggcggtgaagggcaatcagctgttgcccgtctcactgacttcccagtgccaagtgtataagtgtgtctggaattggtgggttcttggtctcactgacttcaagaatgaagccaaggaacttcgtctttataagcaggagaaaagggagaaagcaaaacgttggaaggaaacagaaaagggatttaatggagactatggggttactatgacaccagggaaatgtagaacttattttgaaatagattggtcaaaattagaagtgggttggccatcagaaggaaacctggagaggtcccttgtttctaaggtatggcacaaggtaactggtaagtcaggacactcagaccagtttccatacatagccacttggttacagctggtgctagaccccccacagtggctaagagggcaggcagcagcagtgctagtagcaaagggacagattgccaaggaaggatcctactccacccgccgagggaaatcaactcctgaagttctgtttgacccaacatcagaagatcccttgcaggagatggaaccagtgatcccagtggtgccctccccttaccagggaaagatgctccccactcttgagcccacagtccttgtgcctccacaagacaaacatatccctaggccacccggagtagacaagagaggaggtgaagcctcgagagaaacccctacattggcagctcgtttaagacccaaaactgggatacaaatgcccctgagagagcagtggtatactgggatagatgaggatggtcacatggtggagagaggacatcagcaagcttcaaccttggtgggcttggggaattcctgcactgacttagaggctcaaaaagcagcatctgacctcttccaggcctcaatcacagcccccctgttccctcaagcacctggtcttgtacctacttattctaaagaagaaaaagactttctccaggcagagggaggacaggtgataaaggaaggatgggttcggttaccagatgggagagtagctgtgccacagatgctaggagctgcagttgtactggctgttcatgaaaccacccatctagaggcttatccaacaccaactgagaaagctcgtgaagtaacccatgtgcttcttcgagatcttattcctagatttggactacccttacggatcggctcagataacgggccatcatttctgactgacttggcacagaagatagcaaagtattggggatcacaaggaaactacatgccacttacgggcctcagagttccagaaagtatacctctaaatgatgatgatgatgatgatgatgataatgatgatgatgatgatgatgatgatagtgataatagtacattttgctga

SEQ ID NO: 123044 - DNA, 2082 bp, Homo sapiens
atgctagtagcaaagggacagatagccaaggaaggatcccgctccacccgcccagggaaatcaactcctgaagttctgtttgacccaacatcagaagatccattgcaggagatggcaccagtgatcccagtggtgccctccccttaccagggagagaggctccccagtcttgagcccacagtgcttgcacctctgcaagacaagcatatccctaggccacccagaatagacaagagaggaggtgaagcctcgggagaaacccctcccttggcagctcgtttaagacccaaaactgggatacaaatgcacctgagagagcagcagtatactgggagagatgaggatggtcacatggtggagaggcgtgtttttgtgtaccagcccttcacctctgccgaccttctcaactggaaaaacaataccccgtcctataccgaaaagccacaagctcaaattgatttgctcccaactattatgcagacccataaccccacttgggctgattgccaccagctgctcatgttcctctttaatgcagatgtaaggtggagagtgctccaagcagcaactaagtggctagaggaacatgcaccagctgattatcaaaacccccaagagtatgtaaggacccagttaccaggaaccgacccccagtggggcccaaatgaaagagaggatatgcaaaggctaaagggagacagggaagctgtcttggaagggttaaagaggggagctcagaagaccacaaacgttaacaaggtctctgaggtcattcagggaaaagaagaaagtccagcacaattctctgagagactgtgtgaggcctatcgcatgtatactccctttgatcccgatagccgtgaaaatcagcgcatgattcaaatggctttagttaaagcgcagaagacattagaagaaaactgcagaaacagactgggatattggaagaacaaatgccctcagctaaaaagaaaacaaggtgactcagagcaggaggccccagacgaggaggaaggggccctgctcaacctggcagaagggttattggactcagggggaccgggctcaagtgccccgaaagagcctatggtcagcatgacagtcgggggtaaagacattgatattcttgtagataccgttgctgaacattcggtagtaaccgccccagttgcccccttatccaaaaagactattgacatcatcggagccatgggggtttcagcaaagcaagctttctgcttgcctcggacttgtgctgtaggaggacatacagtgattcactgggaactatacgtggacgggagcagcttcatcaacccacaaggagagagatgtgcagggtatgcagtggtaaccctggacaccgttgttgaagccagatcattgccccagggcacttcagcccagaaagctgaactcattgctttcattcgggccttagagctcagggaggcacctgatcttgtacctacttcttctaaagatgaaaaggactttctccaggtagagggaggacaagtgatggaggaaggatggattcggttaccagatgggagagtagctgcaccacagctgcgaggagctgcagttgtactggctgtgcaggaaaccacccatcgaggtcaggagtcactggaaaagttgttaggccggtatttctacatctcgcatttgtcagcccttgccaaaacggtgatgcagcagtgtgttacctgccaacagcatcatgcgaggcgaggtccagccattccacccggcatacaaacttacggagcagccccctttgatagatctccaggtggacttcacagaaatgccaaagtgtggagatttggactgcccttatggatcggctcagataacgggcctgcgtttgtggctgacttggtacagaagatggcaaaggtattggggatcacatggaaactgcatgccgcctaccggcctcagagttccggaaaggtggagcggatgaatcggactatcaaaaatagtttagggaaaagtgaccctgaagaagacgacaagccctgctccagtcacacccggaagctgactggtccacgcatggctgaagcatga

SEQ ID NO: 123045 - DNA, 788 bp, Homo sapiens
cttaggaaaacctgaatataaaggccccccatgctgtggtaactttaatgactaccacaggacctgattggatatcgaatgctatattaaccaaggacttttgtttgttatgtgaaaatacccacatatccaggtggggttgtaacaccctaaacgccaccaccttgctcctggtatcagagagcccagttaaacataactgtttagaggtgctggactcagtttattctagtaggcctaacctccgagaccacccttaaacatcagtagactgggagctgtacgtggatgggagcggctttgccaacccctgcaaagtgactctgaagaaggagacaagccctgctccagtcacacccagaagctgactggtccacgcacaggcgaagcatgaggaaactcattgcgggactcattttccttaaaatttggacttgtacagtaaggacttcaactgaccttcctcagattgagaactgtttccagtatatacatcaagtcactgaggtaggacaaaaggttgctatggtcctattattttacagttattataagtgtactagaactctaaaaaagccttgtttgtataatgttattctgtacaaggtatgtagcccaggaaatgaccaacctgatgtgcgttatgacccacctgagcctcccatgaccacagtttttaaaataagattaagaatgaagactggtgggggctcacaaacgatatgagtaaagtgttaaccaaaacagaagaaaaagaggtgcccaaacaagtcacgttaaaatttaaa

SEQ ID NO: 123046 - DNA, 3477 bp, Homo sapiens
atgttgaaaaattttaagaagggatttaatggcgactatggggttactatgacaccagggaaacttagaactttgtgtgaaatagattggccaacattagaagtgggttggccatcagaaggaagcctggacaggtcccttgtttctaaggtatggcacaaggtaactggtaagtcaggacactcagaccagtttccatacatagacacttggttaccacagtgggtaagagggcaggcagcagcagtgctagtagcaaagggacagatagtcaaggaaggatcccgctccacccaccgagggaaatcaactcctgaagttctgttcgacccaacatcagatgatccattgcaggagatggcaaaagtcatcccagtggtgccctccccttaccagggagagaggctccccacttttgagtccacagtgcttgtgcctccgcaagacaaacatatccctaggccacccagagtagacaagagaggaggtgaagcctcaggagaaacccctcccttggcagctcgtttaagacccaaaacggggatacaaatgtccttgagagagcagcggtatactggaatagatgaggatgggcacatggcggagaggcgtgtttttgtgtgccagcccttcacctctgccgaccttctcaactggaaaaacaataccccgtcctgtactgaaaagccacaagctctaattgatttgctccaaactattatccagacccataaccccacttgggctgattgccaccagttgctcatgttcctctttaacacagatgaaaggcggagagtgctccaagcagcaactaagtggctaggggaacatgcaccggctgattaccaaaacccccaagagtatgtaaggacccagttaccgggaaccgacccccagtgggacccaaatgaaagagaggatatgcaaaggctaaaccgatacagggaagctctcttagaaggattagaggggagcccagaaggccacaaacataccggtgctgaacattcggtagtaaccggcccagtcgcccccttatccaaaaagactattgacatcatcggagccatgggagtttcagcaaaacaagctttctgcttgccccggacttgtactcctgggaccaaggactacaggctggtacaggatttgcgcttggttaatcaggctacagtgactttacatccaacagtacctaacccgtacatattgctggggttgctgccagctgaggacagctggttcacctgcttggacctgaaagacgctttctttagcatcagattagcccctgagaggcagaagctgtttgcctttcagtgggaagatccggagtcaggtgtcactactcagtacacttggacctggcttccccaagggttcaagaactcccccaccatcttcggggaggcattggctcgagacctccagaagtttcccaccagagacctaggctgcgtgttgctccagtacgttgatgaccttttgctgggacaccccacggcagtcgggtgcgccaagagaacagatgctctactccggcacctggaggactgtgggtataaggtgtccaagaaaaaaagctcagatctgccaacagcaggatggcccccatgtttgagggccttggcagcaactgccctgctagtacaagaagcagataagctgactcttgggcaaaaccggaacataaaggccccccatgctgtggtgactttaatgaatactaaaggacatcattggctaatgagtgctagactcactaagtaccaaagtttgctttgtgaaaatccccgtataaccactgaagtttgtaacaccctgaaccccgctaccttgttcccagtatcagagagccctgttgagcatgactgtgtagaagtgttggactcagtttactctagcagacctgacctccgggaccagccttgggcatcagtagactgggaactatacgtggatgggagcagctttatcaacccacaaggagagagatttgcagggtatgcggtggtaactctggacactgttgttgaagccagatcgttgccccagggcacttcagctcagaaagctgaactcattgctttaattcgggccttagaactcagtgaagtgcatggagcattatataaagaaaagggcctattgaactctgggggaaaagacataaaatatcaacaagaaatcttgcaattattagaagcagtatggaaaccccacaaggtggcagttatacattgcagaggacaccagcgagcttccaccttggtgggtttagggaattcccgtgctgactcagaggctcgaaaagcaccatctgccccattccgggcatcagtcacagcccccctgctccctcaagcacctgatcttgtacctacttattctaaagaagaaaatgactttctccaggcaaagggaggacaagtgatggaggaaggatgaattcggttaccggatgggagagtagctgcagttgtactggctgtgcatgaaaccacccatcgaggtcaggaattacttgaaaagttgttaggctggtatttctacatctcacatttgtcaggccttgccaaaatggtgacgcagtggtgtgttacctgccgacagcataatgcgaggcaaggtccagccgttccacccggcatacaagcttatggagcagccccctttgaagatctccaggtggacttcactgagatgccaaagtgtagaggtaacaagtatttactagttcttgggcgtacctactctgggtaggtggaggcttatccaacacgaactgagaaagctcgtgaagtaactcgtgtgcttcttcgagatcttcttcctagatttgaactgcccttacggatcggctcagataacaggccggcatttgtggctgacttagtacagaaggcggcaaagatattacggatcacatggaaactgcatgctgcctactggcctcagagttccggaaaggaccccagactgtcatcctgagcactcccaccgctgtgaaggtagagggaatcccaacctggatccaccacagccgtgtaaaacctgcagtgcctgaaacctgggaggcaagaccaagcccagacgacccttgcagagtgaccctgaggaaaacgacaagccctgctccagtcacacccagaagctgactggtccacccacggccgaagcatgaggaagctcatcgcgggattcatttttcttaaattctggacttacacagtaagggcttcaactgaccttactcaaactggggactgttcccagtgtatttatcaggtcactgaggtaagacagccaattaaaacaatgtttctgttctatagttattataaatgtataggaacattaaaagaaacttgtttgtataatgctactcagtacaatgtatgtagcccaggaaatgaccgacctgatgtgtgttataacccatctgagcctcctgcaaccaccatttttgaaata

SEQ ID NO: 123047 - DNA, 500 bp, Homo sapiens
  misc_feature (1)...(500): n = a,t,c or g
tcgagtgcctccaccccggagactcgcgccaagttcacgtaggacaatttgtgctgtgccagctggcagcgcctggcctcggccaacttccgggtgctggtggactgcatcnttagcgacaccttcgaggacttgcggctccagtgcgacgccgtgaacctggctttcgggcgccgctgtgaggagctggaggacgcgcggtacaagctgcatcaccacctgcacaaggctgttgagtgaggtggaggagctgaacatgtccctcacagcactgcgagagaagcttctagaagcggagcagtccctgcgcaacctcgaggacatccacatgagcctggagaaggacattgccgccatgaccaacagtctcttcatcgaccgccagaagtgcatggcccatcgtactcgctaccccaccatcctgcagctggctggctaccagtgagcagcggcacggtgcttccccccagtcccccaaataaacagcgcgttagctttca

SEQ ID NO: 123048 - DNA, 1641 bp, Homo sapiens
atggtgcagacggatgtgctcctaccagagccagcaccgcagacagtgtcaccctgcgagctgccctgcaaagagtatgacgtggcccgcaacatgggccctggccaccgccagctggaggtgtggttccagaactgctatgctcgctaccaccaggccttcgccgactgcaaccagtcggagcgggagctgcaggggcgcgagagccagcagctggccgcagagacccaggcgctggcacagccgacacagcaagactccacgtgcagggtgggcgagcgactgcaagacacgcacagctggaagtcagagctgcagcacgaggtggaggtgctggctgcagagaccgacctgctgctggcccagaagcaacggctggagcgtgccctggatgccatggaggtgcccttctccatcgccactgacaacatgcagtgcagccagcgccaccagcacgccaaccttgtgcgtgactatgtggagacggagctgctgaaggcctatccccctgcaccctctcagtgcctcaagaactgctgcagctcccgcaaaccttctgcctgcaacaagggtgcctgtgaagtgatggagacactgacagtgcaggaagaggcaaacccagggacagaggggtgcaggactcgggccctggcacacaaggaggaagctgagcccatccggaacattcaggagctgctgaagagagccatcgtgcaagcagtgagccagatccaactgaaccgagagcacacggagatctgcgagatggactggttggacaaggtggaggcctacaacctcgacgagacttgcgggcgccaccacagccagagcaccgagagacccggaccaagttcacacaggacaatctgtgccgtgcccagcgcaagcgcctggagctcggccaacctgtgggttcttgtggactgcatccttcgcgacacctccgaggacctgggactccagtgtgacgccgtgaacctggccttcgggcgccgctgtgaggaactggaggacgcgcggcacaagctgcagcaccacctgcacaagatgctgcgggaaatcacagatcaggaacacaacgtggtggcactgaaggaggccatcaaggacaagaaggaacctctgcacatagcccagacccggctgtacctgccctcacaccagccccaacatgcagctgtgccgcgaagcagcccagttcagagccgcttttcctgggtaggaatcctttcaatggcgtcttcccaggacctccttgccagctcccaattgggagttttgggtccccttccaccccagtaggtgcatacttctgccctccccagccccagctcacacccccccaacacccccaagctggtgagtgaggtggaggagcttgtacaagtccatcacagcgctgcgggagaagcttctacaagcggagcagtccctgcgcaacctcaaggacatccacatgagcctggagaaggacgtcaccgccatgaccaacagtgtcttcatcgaccgccagaagtgcatggcccatcgtacttgctaccccaccattctgcagctggctggctaccagtgagcagcggcacggtgcttccccccaatcccccaaataaacagtgcgttagctttcaaaaaaaaaaa

SEQ ID NO: 123049 - DNA, 442 bp, Homo sapiens
  misc_feature (1)...(442): n = a,t,c or g
gcggtccgaggcccgtagcctccacgaccttggagaaggcagggctgccggagcagtcacacagggagccggggaggtggcagcagtcacccgtcgtcatggccaccgggagccccgtatcctcagggcctgaggcccatggttccaggnnnnnnnnnnnnnnnnnnnnnnnnnnnnnnnnnnnnnnnnnnnnnnnnnnnnnnnnnnnnnnnnnnnnnnnnnnnnnnnnnnnnnnnnnnnnnnnnnnnnnnnnnnnnnnnnnnnnnnnnnnnnnnnnnnnnnnnnnnnnnnnnnnnnnnnnnnnnnnnnnnnnnnnnnnnnnnnnnnnnnnnnnnnnnnnnnnnnnnnnnnnnnnnnnnnnnnnnnnnnnnnnnnnnnnnnnnnnnnnnnnnnnnnnnnnnnnnnnnnnnnnnnnnnnnnnctctgatccgcggccgggccg

SEQ ID NO: 123050 - DNA, 927 bp, Homo sapiens
tcattgctcatgggtcctatctctgtgtccagtgatggtcctttctgccggatctgccatgagggagcgaacggggagtgcttgctgtccccgtgtggctgcaccggcacgatttgacccactggagtatttagtgatgccacgttgtgctcctttcttcattcctgtgcaggtgaactgaatcatctgcctctgagaaaacgacaggagaggacggaacgcgggtcttcgtgagccttttgcgctctctcctctctctcctaccgtctgcaccattgcgtcaccatcctccttctgcctagctctccttatgctcttgcgtctccgattaggctgttgccttaatcccacaatctgctcatcatttcccaaatatatcatagccttttccacttcactgttttgctcacgcaaagcctcctgtttggatttttcattctcatatttatggttaccatgagcctttttggcaccaatgaccagtttcacggaccaggtggcagtagatgatttcttgtcgattgtatatctgtttacattcacaccgttcttagcattctgcggagagccaagcactgctcttgctaccagggaacaggtgtgggtagaatccgcctcctgacagaacagcttccccgaaacacgggaaaaaggggattcctcccccgacttcgtatctgtctgcttccgagggtgaacgctaagcagcagatcccatctctccactaatacggcactggacgccgctaccctgagcaggcggtacgggaacagccggggccgaggccgcgccggggctaggccgccaacagaccccttagggcccggagccccgttgccgctcggcacgccgggcgcgccgctctcttcctccattttgatctccgtcgccgccacctccgccgccgcttcgacccctgccgccat

SEQ ID NO: 123051 - DNA, 1608 bp, Homo sapiens
gcggccgcccggcccggccgcggatcagagactggagactgggtcttgctctgttacccaggctggagtgcagtggtgtgatcatagctcactacagccttgaactcctgggctcaagaggttgaggctccctcctcagcctcccaagtagctgggactacaggctttcagcaccatgcctggctaattcaaaaaaaccttcagagagatagggtctctctatgttgccctagctcgtctcaaactcctggcctcaagtgatcctcctgcttggacctcccaaagcgctgggattacaggctcctggaaccatgggcctcaggccctgaggatacggggctcccggtggccatgacgacgggtgactgctgccacctccccggctccctgtgtgactgctccggcagccctgccttctccaaggtcgtggaggctacgggcctcggaccgccccagtatgtggcacaggtgacttcaagggatggccggctcctctccaccgtcatccgtgccttggacacaccgagtgatggtcctttctgccggatctgccatgagggagcgaacggggagtgcttgctgtccccgtgtggctgcaccggcacgctgggtgccgtgcatgaagagcttgtctggagaagtggctttcctcatctaacaccagctacttgcgagctgtgccacacggagtttgcagttggagaaacggcctcgaccccctcacagagttggctgaaggacccggggccgcggacggagaagcggacactgtgctgcgacatggtgtgtttcctgttcatcacaccgctggccgccatctcaggctggttgtgcctgcgcggggcccaggaccacctccggctccacagccagctggaggccgtgggtctcattgccctcaccatcgccctcttcaccatctatgtcctctggacgctggtctccttccgctaccactgccagctgtactccgagtggagaaagaccaaccagaaagttcgcctgaagatccgggaggcggacagccccgagggcccccagcattctccactgggcaggtggactcctgaagaaggtggcagaggagacaccagtatgaatgctgggctctccggaccctgcagcagagaggccagaggtagctggtgataccctgtcctgtggaaggacttccacttcaacacttccacttcaacagttcccgcacggcctgaacgcttcttaggcccaagagacacccatgcagagccttagtctgtgatcctgtgtgaagatattttcagggttttttttttttttttttttgcatatggaggacaggtgggacatggtcctgagctctggacggagcaggcaccctgatttcattttgaggtccacatggccccttttgggccagcagctgtggccggtgtatcaagggggcccttaaagctggaacattccagcaagcttcttgggcttttttgcacccggcaggccccctttcctggcaccctcgactttatataaaagttgccctgggtttcaaaaacccccccctgaatgaataaaaggagccctggctggaaaaaaaaaaaaaaaaaaaatatataaaagtcgtatcga

SEQ ID NO: 123052 - DNA, 814 bp, Homo sapiens
atggcggaaacagcggttatcaatcacaagaaacgtaaaaatagcccgcgaatcgtccagtcaaacgacctcactgaggcggcatatagtctctcccgggatcaaaaacgtatgctgtatctgttcgttgaccagatcagaaaatctgatggcaccctacaggaacatgacggtatctgcgagatccatgttgctaaatatgctgaaatattcggattgacctctgcggaagccagtaaggatatacggcaggcattgaagagtttcgcggggaaggaagtggttttttatcgccctgaagaggatgccggcgatgaaaaaggctatgaatcttttccttggtttatcaaacgtgcgcacagtccatccagagggctttacagtgtacatatccccccatatctcattcccttctttatcgggttacagaaccggtttacgcaaaaatgcaaaaacctgctcaccattttgggaggcagcacttgccagggcaagagccacgtcagcggaagacaccactgcatcctcaggaacatgcatggcccccaccaggtcgtgcacgttgaggagatgtccactggggatcaggcattagaagttctacagtacctcttctccaatgacctggatgtgcctgtgggccacattgtgcatactggcatgctcaacgagggtggagggctggctgctggctctaccaggttctgtgctggcatcctgagcactgccaggcacttgaccattgagcagaagatggcagactactcaaacaaactctaccatcagttagagcaagaaacagggatccgaacag

SEQ ID NO: 123053 - DNA, 513 bp, Homo sapiens
ggcgccgctctccatctccaggatgacaagaggctggttggggttgctgtcgatgaactgcttcgtcttctctaacactcgtttatggacatcggctttgctggctcggtccaagtcatccatgaccttctttagggatttgagagtctaccgcaattcatccttctgccactgggggatgactgcagtggccagggcctctccaaggtcagcgatcttccctctgcacattccttgtttggagcagtctgagccttcactttggcttccatgacagagagacatttcttcaagctctctgctttcctgagggccttctgggcctcggcacctgtgacagccacaatcctccggatacccttggcaatggcttcttccgtcacgatcacaaaagctcctgcatgactcgagttccgcaggtgcctgaatggcagaacacaaagtccatagtgaaagaggccctggcagcccttggctggggggtcacactagcggacaagagaagcaggaatg

SEQ ID NO: 123054 - DNA, 1239 bp, Homo sapiens
atgaaactcatggaaacacttaaccagtgcataaacgctggtcatgaaatgacgaaggctatcgccattgcacagtttaatgatgacagcccggaagcgaggaaaataacccggcgctggagaataggtgaagcagcggatttagttggggtttcttctcaggctatcagagatgccgagaaagcagggcgactaccgcacccggatatggaaattcgaggacgggttgagcaacgtgttggttatacaattgaacaaattaatcatatgcgtgatgtgtttggtacgcgattgcgacgtgctgaagacgtatttccaccggtgatcgggggtgctgccataaagttggcgtttacaaacctcattttctgttcatcttgctcaggatctggctctgaagggctacgtgttttgctcgtgggaggtgggggcactggagcccctgagatgcagggtcctgatgggtggagggcttatgcctctcccggatccctgacttcactcttgcctcctgaccaccacaccctggcctgcaggtttggcaactgcgtggagctgcaggcttcagctgccttcaactggaacgaccagcgctgcaaaacccgaaaccgttacatctgccagtttgctttgatgtatgatctgaaggttccccgctgggacttccagaccggtaggcagttacgcacctctcctctctacgaccggctggatgcacagggagccaggtggatggagaaacatggatttgagaggccaaagtactttgttccccccgacaaggacctcctggcattggagcagagcaagactttctataagccagattggtttgacatcgtggagtctgaagtcaagtgctgtaaggaagctgtgtgtgtcattgacatgtcctctttcacaaagtttgagataacagtgcgagcccaaccgctctcgcgggcgccgtgtttgccggatctcgcagcggtcggtggcgggcgggctggtgttttggttggcttttttgctgtggcggattctgttacgcgcgaacacgggctgcgttggtttgctcgagctgccctcgaggatcggctggctgctggctctaccaggttctgtgctggcatcctgagcactgccaggcacttgaccattgagcagaagatggcagactactcaaacaaactctaccatcagttagagcaagaaacagggatccaaacaggtacctatgctgaacgctgggaaaattga

SEQ ID NO: 123055 - DNA, 1098 bp, Homo sapiens
atggctatcctgttcctcctcctttccactacagtctgtcctcttgcctacctccgtgaaaatggccctcccacggatcagcaaattcaacagcctcttctccctgctcagcccgtgtggcttattctcagcagagaggcagcgatgaagctgcttttgatgtatgatctgaaggttccccgctgggacttcaggaccggtaggcagttacgcacctctcctctttacgaccggctggatgcacagggagccaggtggatggagaaacatggatttgagaggccaaagtactttgttccccccgacaaggacctcctggcattggagcagagcaagactttctataagccagattggtttgacatcgtggagtctgaagtcaagtgctgtaaggaagctgtgtgtgtcattgacatgtcctctttcacaaagtttgagataacagtcccttccacaacacgtgggaattatgggagcacaattcaagatttaggtgcagacacagccaaaccgtatcagctacccacccactgccactgctaccagggttatcaagaagccatgaattctgctaccatcaactcaccaggacctccccttgctttggctgtgctgttctttgtgactttgatgcaaggaagccagtggctgacctggaaggatccttcatactctgaagcccgcggtgcttatgtcttgggaactgcatcctttactctgaacaaaggagacgcgcgtactaatgcagcgctcgataccgccaacacaattagttctgttaaacgcctgatgggacgctcgctggctgatatccagcaacgctatccgcatctgccttatcaattccaggccagcgaaaacggcctgccgatgattgaaacggcggcggggctgctgaacccggtgcgcgtttctgcggacatcctcaaagcactggcggcgcgggcaactgaagccctggcaggcgagctggatggtgtagttatcaccgttccggcgtactttgacgatgcccagcgtcagggcaccaaagacgcggcgcgtctggcgggccttcacgtcctgcgcttacttaacgaaccgaccgctgcactgtga

SEQ ID NO: 123056 - DNA, 2316 bp, Homo sapiens
atgatttaccgggagttaaatagagcatatgcgctgggtaatcttcccgcagccaaaggcgttgacgccgagcaatccgcactggaaaacggcctgacgctggtactgaaaaacattgagtttcgtctgctggatagcgacggtgctaccagcgcgattctggaagctcaccgatccctggctggcgatacttccctgcgcgaacatttactggcaggctgtgaccccccagccaagggctgccagggcctctttcactatggactttgtgttctgccattcaggcacctgcggaactcgagtcatgcaggagcttttgtgatcgtgacggaagaagccattgccaagggtatccggaggattgtggctgtcacaggtgccgaggcccagaaggtgagcaggggtcagctcgtgacaactatagtaagcgtacgccgtaacggccatgtggtcatcgctggtgatggtcaggccacgttgggcaataccgtaatgaaaggcaacgtgaaaaaggtccgccgtctgtacaacgacaaagtcatcgcgggctttgcgggcggtactgcggatgcttttacgctgttcgaactgtttgaacgtaaactggaaatgcatcagggccatctggtcaaagccgccgttgagctggcaaaagactggcgtaccgatcgcatgctgcgcaaacttgaagcactgctggcagtcgcggatgtgacaagtaatgagatgagtgtgggctatgcaaatgggatccgggtgatgagcatgacgcacacaggagagccaggattcatgctctacatccccatagaggaggattgtttgggcctggggccacctataccttctgatgctctttccccacccttggaggaggaggaaaggaagaaaatgggccctgagcgatcaccacataccaggccctgggggtctagtggtgaaggagaattaaatgacaagtcacatccccgcaggccccaggggccaaccgacctctcttcatgtcggggacagggatccctggaagagcgtgaaaaatacagtggtcactgtgcagttctctctgctggagcctgtcctgccatcatacaaggtgctgtgacagcaatgcaaggttcagatggcatacaccgacaagagaaggcagagaccatccttcgtggtcaggcaggacgccgggttctgctgatcgataatggtaaaaaaccagggcgcaaaatccttatgtctggcggtgggcgctgcaactttaccaacctttatgtcgaaccaggcgcttatctgagccagaatccgcatttttgtaagtctgcactcgcacgttttacccagtgggatttcattgatctggtcaataaacacggcatcgcctggcacgagaaaacgttagggcaactcttctgcgatgactccgcgcagcagattgtcgacatgctggtggatgagtgcgagaagggcaatggtgacttcagattgcgtagcgaagtgggaaaatcacatctgaatcaggaattaacaatgaaacctgtaaaaccacctcgtattaatggacgagtgccggtcctgtcggcacaggaagcggtgaattatattcccgacgaagcaacactttgtgtgttaggcgctggcggcggtattctggaagccaccacgttaattactgctcttgctgacgaatataaacagactcaaacaccacgtaatttatcgattattagtccaacagggcttggcgatcgcgccgaccgtggtattagtcctctggcgcaagaaggacggaaagggaacccacaagtacaggaccgcaacggaagcgaggggaagacaggggacgctcacagaaaagacagaaaaagacagcgaagagaaccagacgaacagagaggcaccggcaccaagggccccacgccaaaccgggagaaaccggagcgcaagccggcccgcccaaagcaacgcccgcaaaaagcgtcgggaacagggagaaaggacccacacacaccagcacccggagaacacacaatggaagaacacaagaacaacagcgagcgagcgaggacacggaatacggacacacaactgcgaaggcaagcgccgcaaaaacaccagaccagcgaattacgcgcgggtgttaacggcggttctggtattgctttaacgggtagattaccgcctgccagcatcgggatttcgctgtactgcaagccttccatctccagtcggaaatccgggccagcggtcccttgcgcactgcgggagctggcgtacagcgttgcaccgctctggtcctgggcctttcaaccttgcgggctgtgctga

SEQ ID NO: 123057 - DNA, 800 bp, Homo sapiens
ctaagatttataaaagtaatcctcccaaaattgtcgcatagtgagcagaatacaaaaatggagcttaagttcccctacaagaccagaactgtcatgtagagcctaagggtaagactgtattggatattagggaccacaaagcgctttcatgtttccctcatttgattttcacagcaactgtgtggggagaatcatccccatttgagaactgagaacactcaggctcagcgagctggtgtcccgcttggtgtcagaatactctcaagaccaggctttccctgactgtcaacccattcttgcttctcttgtccgctagtgtgaccccccagccaagggcagccagggcctctttccctatggactttgtgttctgccattcaggcacctgcggaactcgagtcatgcaggagctcttgtgatcgtgacggaagaagccattggccaagggtatccggaggattgtggctgtcacaggtgccgaggcccagaaggtgagcaggtcaggctggtttgtggcttatctgaagaaggcaagaggagcccagtctgcgaatccatagagcaaacactgctctgcgtggctgctgcagtcagagtgaaagtacaggctgggccactccccctgccccagtgtcctacccctgagtggcagaagaaacctgccaccacacaagatcttctagctttcctatgtttagccttttagaatatatgtgatctcggccgcacctaattggctcacgtctcgcctacccagctcctttccgaacattcactcatcccttgtatatatatggtcc

SEQ ID NO: 123058 - DNA, 2031 bp, Homo sapiens
tcatgggcgagtctcctgcagtgtagggctactttgtcctggcaggaatgaactctgctggcctttcatttggtggaggagccggaaagtaccttgccgaatggatggtacatggttatccctcagaaaacgtttgggaattggacctgaaacgttttggagccctccagagcagccgcacctttctgcgccaccgggtcatggaagtcatgcctttgatgtatgatctgaaggttccccgctgggccttcaagaccgttagccagttacgcacctctcttctttacgaccggctggatgcacaggaagccaggtggatggagaaacatggatttgagaggccaaagtactttgttccccccgacaaggacctcctgggcattggagcagagcaagactttctataagccagattggtttgacatcgtgggagtctgaagtcaagtgctgtaagggaagctgtgtgtgtcattgacatgtcctcttttcacaaagtttgagataacatccactggggatccaggcattagaagttctacagtacctcttctcccaatgacctggatgtgcctgtgggccacattgtgcaatactggcatgctcaacgagggtggagggtatgaaaatgactgcagcatagcacgactgaacaagcgcagtttcttcatgatctctccaaccgaccagcaggtccacttgttgggcctggcttaagaaacacattgccgaaagacagcaacctgctcctggaggacgtcacctggaagtacacaggtacgggggttcgggctctctatggggatgtagagcatgaatcctggctctcctgtgtgcgtcatgctcatcacccggatcccatttgcatagcccacacttatctccatctcaggagttttagccaagctgatggtagagagtggaggaaagtccttgacaagcacaaaatattcctctttgccaggtccttgtgttagtcgagggtagcaggcacaatgaggacaaggcgagtgtcttctcaggctctgctgcagcacggggtagaggcgctggcagccctcgaggcccaggcgtacggcctccgcccagctctctgtcaggccgccctcgccgctgcccagcagcccggccacctgattcagcacaggcatgagcgccacggtgaggccggcggcggcgcgctcttcctcgagccgcgtggggtccaggagccaggtgggcgcgggccccggcgcgaggctgaggccgcagcccaccaccaggtcgtacatctccacgcccgcgtcggccagggcgagcgcggcggcggtgagcgcggcggccagggccgagccaccgtcctccagcagcagcgccgacacctcgagctgcgcgcgcgggtagcggcccaggcgcacagccggctccagcgcctcctgcagcgccagcgccagctcacgctcctcgcagccgcccgggggagcgcggcgccggcggcccgcgaagggtgcgcggcggaagtcgcagagcaggcgaccgcgcagcgcggccggggcctcgccgcctgctccggccgggccgccgccgcgctcgccgccctcggcctgtcgcgggcccgacacggcacacagcaccttggtgcctcccgcctccaggtaggccgagcccttggcctggctcagcagcccggcgcgcgcgtacacgggccgtagccgcgttgggtcgcgggtgccgggcgcctcctcctcgtcggccgcgtacagctgcggcggctgcgattcttcagggccgcggatgcggcggtgatccccaggcatggcggttctggcgtgcgaacccttcgcccaacgccttgcgatccactggtctgctcaccttctgggcctcggcacctgtgacagccacaatcctccggatacccttggcaatggcttcttccgtcacgatcacaaaagctcctgcatgactcgagttccgcaggtgcctgaatggcagaacacaaagtccatagtgaaagaggccctggcagcccttggctggggggtcacacttcat

SEQ ID NO: 123059 - DNA, 1875 bp, Homo sapiens; identical to SEQ ID NO: 121963

SEQ ID NO: 123060 - DNA, 2253 bp, Homo sapiens
atgggagactttaacaccccactgtcaacattagacagatcaacaggacagaaagttaacaaggatatccaggaattgaactcagctctgcaccaagcggacctgatagacatctacagaactctccaccccaaatcaacagaatatacattcttctcagcaccacacagcacctattccaaaattgaccacatagttggaagtaaagcactcctcggcaaatgtaaaagaacagaaattataacaaactgtctctcagaccacagtgcaatcaaactagaactcaggattaagaaactcactcaaaactgctcaactacatggaaactgaacaacctgctcctgaatgactactgggtacataacgaaatgaaggcagaaataaagatgttctttgaaaccaacgagaacaaagacacaacgtaccagaatctccgggacacatttaaagcagtgtgtagagggaaatttatagcactaaatgcccacaagcgaaagcaggaaagatctaaaattgacaccctaacatcacaattaaatgaactagagaagcaagagcaaacacattcaaaagctagcagaaggcaagaaataactaagatcagagcagaactgaaggagatagagacgcaaaaaacccttcaaaaaatcagtgaatctaggagctggttttttggaaagatcaacaaaattgatagaccactagcaagactaataaagaagaaaagagagaagaatcaaatagacgcaataagaaatgataaaggggatatcaccaccgatcccacagaaatacaaactaccatcagagaatactatcaacacctctacgcaaataaactagaaaatctagaagaaatggataaattcctcgacacatacaccctcccaagactaaaccaggaagaagttgaatctctgaatagaccaataacaggctctgaaattgaggcaataatagcttaccaaccaaaaaaagcccaggacgagacggattcacagccgaattctaccagagaaaaagagggaatcctccctaactcattttatgaggccagcatcatcctgataccaaagcctggcagagacacaagaaaaaaagagaattgtagaccaatatccctgatgaacgtcgatgcaaaaatcctcaataaaatactggcaaaccgaatccagcagcacatcaaaaagcttatccaccatgatcaagtgggctccatccctgggatgcaagactggttcaacagaataaaatacctaggaatccaacttacaagggatgtgaaggacctcttcaaggagaactacaaaccactgctcaacgaaataaaagaggacacaaacaaatggaagaacattccatgctcatggacaggaagaatcaatatcgtgaaaatggccatagtgcccaagaattggaaaaaagctactttaaagttcatatggaaccaaaaaagagcccgcatcaccaagtcaatcctaagccaaaagaacaaagctggaggcatcacgctacctgacttcaaactatactacaaggctacactaaccaaaacagcatggtactggtatcaacacagagatataaaccaatggaacagaacagagccctcagaaataataccacacatctacaaccatctgatctttgacaaacctgacaaaaacaagaaatggggaaagcattccctatttaataaatggtgctgggaaagctggctagacatatgtagaaagctgaaactggatcccttccttacaccttatacaaaaattaattcaagatggattaaagacttaaacgtaagacctaaaaccataaaaaccctagaagaaaacctaggcaataccattcaggacataggcatgggcaaggacttcatgtctaaaacaccaaaagcaatggcaacaaaagccaaaattgacaaatgggatctaattaaactaaagagcttctgcacagcaaaagaaactaccatcagagtgaacaggcaacctaaagaatgggagaacatttttgcaatctactcatctgacaaatggctaatatccagaatctacaaagaactcaaagaaacttacaagaaaaaaacaaacaaccccatcagaaagtgggcaaaggatatgaacagacacttctcaaaagaagacatttatgcagccaacagacacatgaaaaaaatgctcatcatcactggccatcagagaaatgcaaatcaaaaccacaatgagataccatctcacaccagttag

SEQ ID NO: 123061 - DNA, 1260 bp, Homo sapiens
atggggagaaaccacaatagaaaagctgaaaattctaaaaaccagaacccctcttatcctccaaaggattgcagctcctcgccagcaacggaacaaagctggatggagaatgactttcacaagttgacagaaatatgcttcagaagatcagtaataacaaacttctccaagctaaaggaggatgttcaaacccatcgcaaggaagctgaaaaccttgaaagaagattagaagaatggctaactggagtaaacagcatacagaagaccttaaatgacctgacagagctgaaaaacatggcacgagaactactgttagaagttctagccagggtaatcaggcaggagaaagaaataaagggtattcaattaagaaaagaggaagtcaaattgtccctgtttgcagatgacgtgactgtatatttagaaaaccccatcgtctcagcccaaaatctccttaagctgataagcaacttcagcaaagtctcaggatacaaaatcaatgtgcaaaaatcacaagcattcttatacaccaacaacagacaaacagagagccaaatcatgcatgacttcccattcacaattgcttcaaagagaataaaatacctaggaatccaacttacaagagatgtgaaggacctcttcaaggagaactacaaaccactgctcaacgaaataaaagaggacacaaacaaatggaagaacattccatgcccatggataggaagaatcaatatcgtgaaaatggccatactacccaagttccaaagtcgcttccacattttcaggtatcttttcaggaacaccccactctactggtaccaacttactgtattagtccgttttcatgctgctgataaagacatacccgagactgggaagaaaaacgggtttaattggacttacagtttcacatggctggggaggcctcaaaatcatcgcggcaggcaaaaggaacttcgtacatcgcggcagcaagagaaaatgagagacgaagcaaaagcggaaacccccgataaacgcatcagatctcgtgagacttattcactatcacgagaacagcaggggaaaggcagctgtcagaaatctaagtccagaagctcaaagagaggcaaaagctccctactccccaagacctgggctgcttgccatgatgaagtaaaggacccagcaaagaggaaggaggaggaggaggaggaagaggaggaggaggaggaggaagaggaggaggaggaggaggagagggaaaaaatcagggcataa

SEQ ID NO: 123062 - DNA, 1599 bp, Homo sapiens
atggagaatgaatttgataagttgagagaaaaaggcttcagacgatcagtaataacaaacttctctgagctaaaggacgaagttcgaactcatcgcaaagaagctaaaaaccttgaaaaaagattagatgaatggctaactaaaataaacagtgtagagacgtccttaaatgactggatggagctgaaaatcatggcacgagaactaaaggatgcatgcacaatcttcagtagccaatttgatcaagtggaagaaagggtatcagtgattgaagatcaaatgaatgaaatgaagcgagaagagaagtttagagaaaaaagagtaaaaagaaatgaacaaagcctccaagaaatatgggactatgtgaaaagaccaaatctacatttgattggtgtacatcaaagtgacggggagaatggaaccaagttggaaaacactctacaggatattatccaggagaacttccccaacctagcaaagcaagccaacattcaaattcaggaaacacagagaacaccacaaagttactcctcaagaagagcaactccaagacacataattgtcagattcaccaaagttgaaatgaaggaaaaaatgttaagactaaaccacgaagaacttgaatccctgaatagaccaataacaggttctgaaattcaggcaattattaatagcctaccaaccaaaaaaagtccagaatcagatggattcacagccaaattctaccagagccaatatcatactgaatgggcaaaaactggaagcattccctttgaaaaccggcacaaaacaggatgccctctctcaccactactattcaacatagtggtggatgttccggctagggcaatcaggcaggagaaagaaataaagggtattcaattaggaaaagaggaagccaaattgtccctgtttgcagatgacatgaatgtatatttaaaaatccccatcgtctcagtccaaaatctccttaagctgataagcaacttcagcaaagtctcaggatacaaaatcaatgtgcaaaaatcacaagcattcctatacactaataacagacaaacagagagccaaatcatgagtgaactcccattcacaattgcttcaaagagaataaaatacctaggaatccaacttacaagggatgtgaaggacctcttcaaggagaactacaaaccactgctcaacgaaataaaagaggacacaaacaaatggaagaacattccatgctcatggataggaagaatcaatatcatgaaaatggccatactgcccaaggtaatttatagattcaatgccatccccatcaagctaccaatgactttcttcacagaattggagaaaactgctttaaagttcatatggaaccaaaaaagagcctgcattgccaagacaatcctaagccaaaagaacaaagctggaggtatcacactacctgacttcaaactgtactacaaggctacagtagccaaaacagcatggtactggtaccaaaacagcatggtactggtaccaaaacagagatatagaccagtggaacagaatagagcccttggaaataataccatacacctacaaccatctgatcttcgaaaaacctga

SEQ ID NO: 123063 - DNA, 1587 bp, Homo sapiens
atgaacatcgacgcaaaaatcctcaataaaatactggcaaaccgaatccagcagtacatcaaaaagcttatccaccatgatcaagtgggcttcatccctgggataaccaatgacaaaaaccacatgattacctcagtagatggagaaaaggcctttgacaaaattcaacagcccttcatgctaaaaactctcaataaactagtgttggaagttctggccagggcaatcaggcaagagaaaggaataaagggtattcaattaggaaaagaggaagtcaaattgtccctgtttgcagatgacatgattgtatatttagaaaaccccatcgtctcagcccaaaatctccttaagctgataagcaacttcaacaaagtctcaggatacaaaatcaatgtgcaaaaatctcaagcattcgtatacaccaataacagacaaacagagagccaaatcatgagtgaactcccattcacaattgcttcaaagagaataaaatacctaggaatccaacttacaagggacgtgaaggacttctttaaggagaactacaaaccactgctcaacgaaataaaagaggacacaaacaaatggaagaaaattccatgctcatgggtaggaagaatcaatattgtgaaaatggccatactgcccaaggtaatttatagattcaatgccatccccatcaagctaccaatgactttcttcacaaaattggaaaaaactactttaaagttcatatggaaccaaaaaagagcccacattgccaagacaatcctaagccaaaagaacaaagctggaagcatcgcgctacctgacttcaaactatactggaaggccacagtaaccaaaacagcgtggtattggtaccaaaacagagatatagatcaatggaacagaatagagccctcagaaataataccacatatctacaaccatctgatctttgacaaacctgacaaaaacaagaaatggggaaaggattccctatttaataaatggtgctgggaaaactggctagccatatgtagaaagctgaaactggatcccttccttacaccttatacaaaaattaattcaagatggattaaagacttaaatgttagacctaaaaccataaaaaccctagaagaaaacctaggtaatactattcaggccatgggcatgggcaaggacttcatgactgaaacaccaaaagcaatggcaacaaaagccaaaattgacaaatgggatctaattaaactaaagagcttctgcacagcaaaagaaactaccatcagagtgaacaggcaacctacagaatgggagaaaatttttacaatctacccatctgacaaagggctaatatccagaatctacaatgaactcaaacaaattaacaagaaaaaatcaaacaatcccatcaataagtgggcaaaggatatgaacagacgcttctcaaaagaagacatttatgcagccaacagacacatgaaaaaatgctcatcatcactggccatcagagaaatgcaaatcaaaaccacaatgagataccatctcacaccagttagaatggcgatcattaaaaagtcaggaaacaacaggtgctggtga

SEQ ID NO: 123064 - DNA, 1464 bp, Homo sapiens
atgggagactttaacaccccactgtcaacattagacagatcaacgagacagaaagttaacaaggatatccaggaattgaactcagctctgtaccaagtggacctaatagacatctaccgaactctccagcctaaatcaacagaatatacattcttctcagcaccacatcgcacttattccaaaattgaccacatagttggaagtaaagcactcctcagcaaatgtaaaagaacagaaattataacaaactgtctctcagaccacagtgcaatcaaactagaactcaggatgaagaaactcactcaaaatcactcaactacatggaaactgaacaacctgctcctgaatgactactgggtacataacaaaatgaaggcagaaataaagatgttctttgaaaccaacgagaacaaagacacaacataccagaatctctgggacacatttaaagcaactgctagcaagactaataaagaagaaaagagagaagaatcaaatagatgcaataaaaatgctaaaggtgttatcaccaccgatcccacagaaatacaaactaccatcagagaataccataaacacctctatgcaaataaactagaaaatctagaagatacagataaattcctggacacatacaccctcccaagactaaaccaggaagaagttgaatctctgaatagaccaataacaggctctgaaattgaggcaataattaatagcttaccaaccaaaaaacgtccaggaccagatggattcacagccgaattctaccagaggtacaaggaggaacagagaataaaatatctaggaatccaacttacaagggatgtgaaggacctcttcaaggagaactacaaaccactgctcaacgaaataaaagaggacacaaacaaatggaagaacattccatgctcatggataggaagaatcaatatcatgaaaatggccatactgcccaaggtaatttatggattcaatgccatccccatcaagctaccaaggactttcttcacagaattggaaaaaattactttaaagttcatacggaaccaaaaaagagcccgcattgccaagacaatcctaagcaaaaagaacatagctggaggcatcatgctacctgacttcaaactatactacaaggctacagtaaccaaaacagcatggtactggttccaaaacagagatatagaccagtggaacagaacagaggcctcagaaataacaccacacatctacaaccatctgatttttgacaaacctgaaaaaaacaagaaatggggaaaggattccctatttaataaatggtgctgggaaaactggctagccatatgtagaaagctgaaactggatcccttccttataccttatacaaaaattaattcaagatggattaaagacttaaatgttagacctaaaaccataaaatccctagaagaaaacctaggaataccattcaggacatag

SEQ ID NO: 123065 - DNA, 996 bp, Homo sapiens
atgggagactttaacaccccactgtcaacattagacagatcaacaaaacagaaagttaacaaggatatccaggacttgaacccagctctgtaccaagcagacctaatagacatctacagaactctccaccccaagtcaacagaatatacattcttctcagcaccacatcgcacttgttccaaaattgaccacatagttggaaagaataaaatacctaggaatccaacttacaagggatgtgaaggacctcttcaagcagaactacaaaccactgctcaaaaaataaaagaggacacaaacaaatggaagaacattccatgctcatggacaggaagaatcaatatcgtgaaaatggccatactgcccaaggtaatttatagatccagtgccatccccatcaagctaccaatgactgtcttcacagaattggaaaaaagtactttaaagttcatatggaaccaaaaaagagcccacattgccaagacaatcctaagccaaaagaacaaaactggaggcatcatgctacttgacttcaaactatactacaaggctacagtaaccaaaacagcatggtactggtaccaaaacagagacatagaccaatggaacagaacagagccctcagaaataataccacacatctgcaaccatctgatctttgacaaacctgacaaaaacaggaaatggggaaaggattccctatttaataaatggtgccgggaaaactggctagccatatgtagaaagctgaaactggatcccttccttacaccttatacaaaaattaattcaagatggattaaagacttaaatgttagatctaaaaccataaaaaccatagaagaaaacctaggcaataccattcaggacatagtcatgggcaaggacttcatggctaaaacaccgaaaacaatggcaacagaagccaaaatagacaaatgggatctaattaaactaagagcttctgcacagcaaaagaaactaccatcagagtga

SEQ ID NO: 123066 - DNA, 1188 bp, Homo sapiens
atgagtgaactcccattcacaattgcttcaaagagaataaaatacctaggaatccaacttacaacggatgtgaaggacctcttcaaggagaactacaaaccactgctcaacaaaataaaagaggacacaaacaaatggaagaatattccatgctcatggataggaagaatgaatatcgtgaaaatggccatactgcccaaggtaatttatagattcaatgctatccccatcaagctaccaatgactttcttcacagaattggaaaaaactactttaaagttcatatggaaccaaagaagagcctgcattgccaagacaatcctaagccaaaagaacaaagctggaggcatcaagctacctgacttcaaactgtactacaaagctacaataaccaaaacagcatggtactggtaccaaaacagagatacagaccaatggaacgaaacagagccctcaggtataacgccacacatccacaaccatctgatctttgacaaacctgagaaaaacaagcaatggggaaaggattccctatttaataaatggtgctgggaaaactggctagccatatgtagaaagctgaaactggaccccttccttacaccttatacaaaaattaattcaagatggattaaagacttaagtgttagacctaaaaccataaaaaccctagaagaaaacctaggcaataccattcaggacataggcatggccaaggacttcatgtctaaaacaccaaaagcaatggcaacaaaagctaaaattgacaaatgggatctaattaaactaaagagcttctgcacagcaaaagaaactaccatcagagtgaacagacaacctacagaatgggagaaaatttttgcaatctacccatctgacaaagggctaatatccagaatctacaaggaacttaaatttacaagaaaaaaatcaaacaacctcatcaaaaagtggatgaaggatgtgaacagacacttctcaaaggaagacatttatgcagccaacagacacatgaaaaaatgctcatcctcactggccatcagagaaatgcaaatcaaaaccacaatgagataccatctcacaccagttagaatggcagtcattaaaaagtcaggaaacaacagcactattcacaatagcaaagacttggaaacaacccagatgtccagcaatgatagactggattaa

SEQ ID NO: 123067 - DNA, 1085 bp, Homo sapiens
agaataaaatacctaggaatccaacttacaagggatgtgaaggacctcttcaaggagaactacaaactactgctcaacaaaataaaagaggacacaaacaaatggaagaacattccatgctcatgggtaggaagaatcaacatcgtgaaaatggccatactgcccaagccatatggaaaaagctgaaactggatcccttccttacaccttatacaaaaattcattcaagatggatcaaagacttcaatgttagacctaaaaccataaaaaccctagaagaaaacctaggcaataccattcaggacgtaggcctgggcaaggacttcatatctaaaacaccaaaagcaatggcaacaaaagccaaaactgacaaatgggatctcattaaactaaagagcttctgcacagcaaaagaaactaccatcagagtgaacaggcaacctacaaaatgggagaaaatttttgcaatctactcgtctgacaaagggctaatatccagaatctacaaagaactcaaacaaacttacaaggaaaaaacaaacaacctcatcaaaaagtgggtgaaggatatgaacagacacttctcaaaagaagacttttatgcagccaaaagggacatgaaaaaatgctcatcatcactggccatcagagaaatgcaaatcaaaactacaacgagataccatctcacagcagttagaatggccatcattaaaaagtcaggaaacaacaggtactggagaggatgtggagaaataggaacacttttacactgttggtgggactgtaaactagtacaatcattgtggaagacagtgtggcgattcctcagggatctagaactagaaataccatttgacccagcaatcccattactgggtatatacccaaaggattgtaaatcatgctgctataaagacacatgcacacgtatatttattgtggcactattcacaatagcaaagacttggaaccaagccaaatgtccaacaatgatagactggattaaggaaatgtggcacatacacaccatggaatactatgcagccataaaaaaggatgagttcatgtcctttgtagggacatag

SEQ ID NO: 123068 - DNA, 1321 bp, Homo sapiens
actaaaccaggaagacattgaatccctgaacagaccaataacaggttctgaaattgaggcaataattaatagcctaccaaccaaaaaaagtccaggaccagatggattcacagccgatttctaccagaggtacaaacaggagctagtaccattccttctgaaactattccaatcaatagaaaaagagggaatcctccctaattcatttgatgaggccagcatcatcctgataccaaagcctggcagagacacaacaaaaaaagagaattttagaccaatatccctgatgaacattgatgcaaaaattctggcaaaccaaatccagcagcagatcaaaaagtttatccaccacgatcaagttggcttcatccctgggatgcaaggctggttcaacatacacaaatcaataaatgtaatccagcatataaacagaaccaaagacaaaaaccacacgattatctcaacagatgcagaaaaggccttcgacaaaattcaacagcccttcatgctaaaaactctgaataaactaggtattgatgggacgtatctcaaaataataagagctatttatgatgaacccacagccaatatcatactgaatgggcaaaaactggaagcattccctttgaaaactggcacaagacagggatgtcctctctcaccactcctattcaacatagtattggaagttctggccagggcaatcaagcaggataaagaaatacaggatattcagttaggaaaagaagtcaaattgtccctatttgcagatgtcatgattgtatatttagaaaactccatcgtctcagtccaaaatctccttaagctgataagtaacttcagcgaagtctcaggatacaaaatcaatgtgcaaaaatcacaagcattcctctacaccaataaaagacaaagagagagccaaatcatgagtgaactcccattcacaattgcttcaaagagaataaaatacctaggaatccaacttacaagggatgtgaaggacctcttcaaggagaactacaaaccactgctcaatgaaataaaagaggacacaaacaaatggaagaacattccatgctcatggattggaagaatcaatatcgtgaaaatggccatactgcccaagataatttatgcagccaaaaaacacatgaaaaaatgctcatcatcactggccatcagagaaatgcaaatcaaaaccacaatgagataccatctcacaccagttagaatggcgatcattaaaaagtcaggaaacaacagaagtacccgtggcctgctcagctgtgactctgctgacctcaggacctcactggtcaag

SEQ ID NO: 123069 - DNA, 1759 bp, Homo sapiens
aaccaatgacaaaaaccacatgactatctcaatagatgcagaaaaggccttcaacaaaattcaacagccattcatgctaaaaactctcaataaactaggtattgatgtgacatatctcaaaataataagagatatttatggcaaacccacagccaatatcatactgaatgggcaaaaactgggagcattccctttgaaaactggcacaagacagggatgccctctcccaccactcctattcaatgtagtgttggaagttctggccagggcaatcaggcaggagaaagaaatgaagaatattcaattagaaaaagaggaagtcaaattgtccctgtttgcagatgacatgattgtatatttagaaaaccccatcatcttagccccaaatctccttaagctgataagcaacttcagcaaagtctcaggatacaaaacccatgtgcaaaaatcacaagcattcttatacaccaataacagacaaacagagagccaaatcacgagtgaactcccattcgcaattgcttcaaagagaataaaatacctaggaatccaacttacaagggatgtgaaggacctcttcaaggagaactacaaaccacagctcaacgaaataaaagaggacacaaacaaatggaagaacattccatgctcatggataggaagaatcaatattgtgaaaatggccatattgcccaagaattggaaaaaaactactttaaagttcatatgggaccaaaaaagagcctgcattgccaagactatcctaagcaaaaagaacaaagctggaggcatcacactacgtgacttcaaactatactacaaggctacagtaaccaaaacagcatggtactggtaccaaaacagagatatagaccaatggaacagaatagagccctcaaaaattataccacacatctacaaccatctgatctttgacaaatctgataaaaacaagcaatggggaaaggattccctatttaataaatggttctgggaaaactggctagccatatgtagaaagctgaaactggatcccttccttacaccttatacaaaaattaattcaagatggattaaaaaagtaaatgttagacctaaaaccataaaaaccctagaagaaaacctaggcaataccaatcaggccacaggcatgggcaaggacttcatgactaaaacaccaaaagcaatggcaacaaaagccaaaattgacaaatgggatctaattaaactaaagaacttctgcacagcaaaagaaactaccatcagagtcaacaggcacactacagaatgggagaaaatttttgcaatctactcatctgacaaagggctaatatccagaatctacaatgaactcaaacgaatttacaagaaaacaaacaaccccatcagaaagtgggtgaaggatacgaacagacatttctcaaaagaagacatttatgcagccaaaagacacatgaaaaaatattcatcatcactggccatcagagaaatgcaaatcaaaaccacaatgagataccatctcacaccagttagaatggcgatcattcaaaagtcaggaaacaacaggtgctggagaggatgtggagaaatagaaatgcttttacactgttggagggaccgtaaactagttcaactattgtggaagacagtgtggcgattcctcaaggatctagaactagaaataccatttgacccagccatcccattactggacatatacccaaaggactataaatcatgctgctataaagacacatga

SEQ ID NO: 123070 - DNA, 1011 bp, Homo sapiens
actgctagcaagactaataaagaagaaaagagagaagaatcaaatagatgcaataaaaatgctaaaggtgttatcaccaccgatcccacagaaatacaaactaccatcagagaataccataaacacctctatgcaaataaactagaaaatctagaagatacagataaattcctggacacatacaccctcccaagactaaaccaggaagaagttgaatctctgaatagaccaataacaggctctgaaattgaggcaataattaatagcttaccaaccaaaaaacgtccaggaccagatggattcacagccgaattctaccagaggtacaaggaggaacagagaataaaatatctaggaatccaacttacaagggatgtgaaggacctcttcaaggagaactacaaaccactgctcaacgaaataaaagaggacacaaacaaatggaagaacattccatgctcatggataggaagaatcaatatcatgaaaatggccatactgcccaaggtaatttatggattcaatgccatccccatcaagctaccaaggactttcttcacagaattggaaaaaattactttaaagttcatacggaaccaaaaaagagcccgcattgccaagacaatcctaagcaaaaagaacatagctggaggcatcatgctacctgacttcaaactatactacaaggctacagtaaccaaaacagcatggtactggttccaaaacagagatatagaccagtggaacagaacagaggcctcagaaataacaccacacatctacaaccatctgatttttgacaaacctgaaaaaaacaagaaatggggaaaggattccctatttaataaatggtgctgggaaaactggctagccatatgtagaaagctgaaactggatcccttccttataccttatacaaaaattaattcaagatggattaaagacttaaatgttagacctaaaaccataaaatccctagaagaaaacctaggaataccattcaggacatag

SEQ ID NO: 123071 - DNA, 1314 bp, Homo sapiens; identical to SEQ ID NO: 121436

SEQ ID NO: 123072 - DNA, 1155 bp, Homo sapiens; identical to SEQ ID NO: 118324

SEQ ID NO: 123073 - DNA, 5286 bp, Homo sapiens
atgccctctctcaccactcctattcaacatagtgttggaagttcgggcagggcaatcaggcaggagaaagaaataaagggtattcaattaggaagagaggaagtcaaattgtctctgtttgcagacgacatgattgtatatttagaaaaccccatcatctcagcccaaaatctccttaagctgataagcaacttcagcaaagtctcaagatacaaaatcaatgtgcaaaaatcacaagcattcctatacaccaataacagacaaacagagagccaaatcatgagtgaactcccattcacaattgctacagagaataaaatatctaggaatccaacttacaagggatgtgaaggacctcttcaaggagaactacaaaccactgctcaacaaaataaaagaggacacaaacaaatggaagaacattccatgctcatgggtaggaagaatcaatattgtgaaaatggccacactgcccaagatgacttggatagcaaattggctcaggaacagtctgcaagctcagtgaataccagaacacccctcaactatggatcaagaacacagttcggtcacttttattccagtggtaacagacatggtaatatcacagaaaggcacaaaaaacactataatgaaacttccaatatgtctatctatgacatcctaagaccaggaactcctagggaaggttttaaaaccttttctcctaggacaagcacaatttatgatatgtataggacaagggagcccagagtctttaaagaagattatgtgcaaaagaatacttttggcagtacttcgctgtgttttgacagcaggcaacggtcggccttaccagccacagggcatttcacagcaagaagcttacattttccagccacaactcagagcaagagtgggtttataccaccaaggcaccagcagagtccaaagagaactcctttatcatccatcatatggaacagatcagattcctctagagacagggagaaccaggaagagttcctgagggcaccatcaccaatggaaattgatcccgctgacaagtatgtgtatcccaggggttttcaggagaataagagatatgaatcgtaccattcacagaatgtttaccaacgtgttagtttaaatgctcccatggagaatgcaatgagtcccgacacttttgagaactcagagaacatgccattctaccatcaaagcaacacatttaccagatctttcttcagcaatacctttggacgaagcggagaacagaggagatttggacaaggtcctttttggggccaagagaaaggacattctttctggtctgactttcatcgaagcaggaaatcattcagttcttctgacagagactttgaaatgatttccatggaagcaaatagtgtatcagccattcatggccataatgtttcttctgaacactgggaatcattttcttctggttatggaacagatgtttccagaggccaagaagagccacatccttggcagtttgattttcagagatccacactggatagcatggtggtatcacatggtaatgagacccagttgactcctcattttggcacaccaaatgtttgctccatgactggttcaagctatcacgtcaaatctagtgagttggtaagtcaacaggacagttctcctgtagaagtacatataaacaaagaagcttcctcatttggaattgctcagactctagcatcctcattcaaaacttccttttcccagatttctgatgacagaaggaatcctcagagtcccaacttgcagaatcccacagtcactttgcagaaaatttttccaaataagcctgcctctcatccaatgagaagccatacagaagtcactgtgaccagcagcaattcagttgactctctgcctcttgccaaaagccagcccaatatcttggtcacagaagtaaataatgagaaagacttaaatgaatctatttcagaagaagacaaacagctaagcaagatggaccagacaaacaaggcagatctgtcatcagctgcactaccagattcctcaccatcaaagaattcttcccttgatgctcctgtggttccatctactacagtgttctccaggagaagtccttcagacaaagatccatcgctaggagaaagagaagaaaaagacaatgctgggaagaaccaaaagaatcagtttattgtaagccactcagaaaaccaagagagaaatgatagtcctgtgcctacacatgatgaagtggttgatgtcaaatgccattcacactctccttttaggaatgaaagaggaaaaggaaaaataaggcatcatatatcctgtattgaaaagttaagcaaaacagaaagtatatcagtacccaccagtgatcacaggagcctcattgaagcaaatcaaagcaattccaaagtttctgaacttgacacaatttattgtaccttgccaagaaaatcaagcagttttctcatacatggcaggcagtcaggaagtaaaataatggctgcttcattgaggaatgggccacctcccttccaaatcaaaaataatgtggaagatgcaatggggaactatatgttaaacaaatttagtcccagttctcctgagtcagcgaatgaatgttccaaagtcctttcagactcagccctggaagcacctgaagccacagagagaatgacaaatgtaaaaagcagtggatctacttccgttagaaaaggaccacttccattcctcatcaacagggctatgtcatgtccctcaggggagccacatgcctcaactggaagagaaggaagaaaaaagccattgacctcaggcatggatgcttctgagctaacaccaagggcttgggagagaatcattagccctgtggaaagtgactcatctgttagagattgttctttaaccaaaagacaacaccaaaaggaaaacttccaagaatacactgagaaagaggacttgtcaggaaaagaacgtgggaaaacattacataaagttaagacgactagtacgttttctgtttctggtgatgaagataatgtaaaatgtctggaggtggtctcaatatattacactctaccgaggaaacccagcaaaaaattctgtaacctccttcaacagtatacacaaaatactaatttacttatagaatcacctcaagtggagactgaaacatttcctaacgctttagaaaaagacaaacagaattattctacacgagagcagtcaggaacaccttcatgtgaaaatctaaagatgtccgtcaactctgatcagacgctcaccactgaaaatatgactgccttccgattatcaaatagggggcccctagctcctacattacaggaaatggcttctgttgaggcagctgtttctcttcctgaagaggaatctaaagctagagagattttttcagataatttagctaaaacacctctaggtgattcagaaaacaagaaggaaagaggcaaaaagttgcaaagtgaaaccctgcatacttcattgatgcttcagagaaaaaatgtatccgaagaaaaatctgaaaattgtcaacaatccattaattcaagtaacagtggtccctctagtcttccagctctttcagaagttaatattggaaattcccaaactagaagaagttcttgggagtgtacagggagtggtagagccattccatttactggaagtggcaagtgtccccagaaagatcacacatccacagctgtaggtgatggctccagtggatcacagcctagggaaggcagaggggacattggaaccaactgccaaaaaatgactaataaaacactttctcactcagagagtcaagtctttgcccttactccagcattgcataaactacagcttggtgaggagactcagtcagatgaaccaaacttagagagtctgcagtctgaaccaagagaattacctcaaagaagtcaggaggcaaatatgacagagagcaggaaggctgaagatgaaatgcagaagtcagcttgggatcaaccttcacttcctgaaggaaacaaaaataaaaccaacttggatgacctagtaaagggggaaaatagatcttcagttaaacacagattggcagccatgtctaaagccagcagaaaattcccagctaaagatgtaagccccagaagacatgtagctactatcttcccccaaagtggaagcagatctggctttgaccatttatctcttggcacagtggagtgcaacccactgttccctgagcctactccaaaatctgcagagtccattggcgaaagcaggttgagtgagaacggaaagcatgtgaagaaatccgagaaccttctccccattactgtactacccaacagagaaccttctacacacgtcagcaaccagaagtctaacagcatttcacaacgacatcagaatgagtttaaaaacgtctcagaatcaccatcaaagcatgagaattctaaagacgtcacagcagctcagaatttagtaagagaatcaggagccccatcacccatcacattcaccagcctcagggaagcagaattctctgacaatcagaggaggctgagccctccttttccactggagcctgcacagaaatctagagtaagcagtccactggccagttttctgcagcaacaaaggagtgcttcatctctggagtgggaacctgagccacacctctatcgttcaaagagtttaaaaagcattaatgttcatggcgatctactacgaaaaagccatcctccaaaagtcagggagcgccatttttctgaaagcacttctattgacaatgccctgagtcgactgacccttgggaatgaattctctgtcaacaatgggtacagtcgaagattcagatctttttctgaactcccctcctgtgatggaaatgaaagttgggcttatcgcagcgggacaaaaacaggtcccaggtctgcaatatctatatacagacctatcgactatgggatctttgggaaagaacaacagttagctttcttagaaaatgtaaagaggtcacttacacaaggaagattatggaaaccaagttttcttaagaaccctggcttcctaaaagatgatttgaggaaccctcccaacccctcagagtcattaagctcaaattctcccagtagtcaggtgccagaagatggcttatctccaagtttattcacccctggagctgactctagcaggcatgaactaagagaaccccatgcctcctcagcctctcctggggcccacatcttctccacgggacacagtcatactgtggttgcttga

SEQ ID NO: 123074 - DNA, 1626 bp, Homo sapiens
atgggagactttaacatcccactggcaacattagacagatcaacaagacagaaagttaacaaggatatccaggaattgaactcagctctgcaccaagcagacctaatagacatctatagaactctccaccccaaatcaacagaatatacattcttctcagcatcacatcacacttattctaaaattgaccgcatagttggaagtaaaacactccttagcaaatgtaaaagaacagaagtgttaacaaactgtctcttagaccacagtgcaatcaaactagaactcaggattcagaaactcactcaaaaccgctcaactacatggaaactgaacaacctgctcctgaatgactactggaagttggtttttgaaaagatcaacaaaactgataggccactagcaagaccaataaagaagaaaagagagaagaatcaaatagatgcaataaaaaatgataaaggggatatcaccaccaatcccacagaaatacaaactacgaacagagaatactacaaacacctctatgcaaataaactagaaaatctagaagaaatgcataaattcctggacacatacaccagcccaagactaaaccaagaagaagttgaatccctgaatagatcaataacaggctctgaaattgaggcaataattaagagcctaacaaccaaaaaaagtccagaaccagacggattcacagccgaattctaccagagaataaaatacctaggaatccaacttacaagggatgtgaaggacctcttcaaggagaactacaaaccactgctcaacgaaataaaagaggacacaaacaaatggaagaacattccatgctcatggataggaagaatcaatatcgtgaaaatggccatattgcccaaggtaatttatagattcaatgccatccccatcaagctaccaatgactttcttcacagaattggaaaaaactactttaaagttcatatggaaccaaaaaagagcctgcattgccaagacaatgctaagcataaagaacaaagttagaggcatcacactacctgacttcaagctatactacaaggctacagtaaccaaaacagcatggtactggtaccaaaacagagatatagatcaagggaacagaacagagccctcggaaataataccacacttctacaaccatctgatctttgacaaacctgacaaaaacaagaaatggggaaaggattccttatttaataaatgctgctgggaaaactggctagccatatgtagaaagctgaaactggatcccttccttacaccttatacaaaaattaattcaagatggattaaagacttaaatgttagacctaaaaccataaaaaccctagaagaaaacctaggcaataccattcaggacataggcatgggcaaggacttcatgtctaaaacaccaaaagcaatggcaacaaaagccaaaattgacaaatcggatctcattaaactaaagagcttctgcacagcaaaagaaactaccatcagggtgaacaggcaacctacagaatgggagaaaatttttgcaatctactcatctgacaaagggctaatatgcagaatctacaatgaactcaaacaaatttacaagaaaaaaacaaccccatga

SEQ ID NO: 123075 - DNA, 2364 bp, Homo sapiens; identical to SEQ ID NO: 119543

SEQ ID NO: 123076 - DNA, 1140 bp, Homo sapiens
atgagtgaactcccattcacaattgcttcaaagagaataaaatacctaggaatccaacttacaagggatgtgaaggacctcttcaaggagaactacaaactactgctcaacaaaataaaagaggacacaaacaaatggaagaacattccatgctcatgggtaggaagaatcaacatcgtgaaaatggccatactgcccaagttcatatggaaccaaaaaagagcccgcattgccaagacaatattaagcaaaaagaacaaagctggaggcatcacgctacctgacttcaaactatactacaagtctacagtaaccaaaacagcatggtactggtaccaaaacagagatatagaccaatggaacagaacagagcgctcagaaataataccacacatctacaaccagctgatctttgacaaacctgacaaaaacaagaaatggggaaaggattccctatttaataaatggtgctgggaaaactggttagccatatggaaaaagctgaaactggatcccttccttacaccttatacaaaaattcattcaagatggatcaaagacttcaatgttagacctaaaaccataaaaaccctagaagaaaacctaggcaataccattcaggacgtaggcctgggcaaggacttcatatctaaaacaccaaaagcaatggcaacaaaagccaaaactgacaaatgggatctcattaaactaaagagcttctgcacagcaaaagaaactaccatcagagtgaacaggcaacctacaaaatgggagaaaatttttgcaatctactcgtctgacaaagggctaatatccagaatctacaaagaactcaaacaaacttacaaggaaaaaacaaacaacctcatcaaaaagtgggtgaaggatatgaacagacacttctcaaaagaagacttttatgcagccaaaagggacatgaaaaaatgctcatcatcactggccatcagagaaatgcaaatcaaaactacaacgagataccatctcacagcagttagaatggccatcattaaaaagtcaggaaacaacagaaaacctacactggatcgagcagttggtcatgaaaaaaatggtgatgatgacagcaataacaattacagccatacatcagagatattgcag

SEQ ID NO: 123077 - DNA, 2115 bp, Homo sapiens
atgccttatggatctgtattggcattccttcccgctgatgaaattctaggagcttttagtaaattaaagctgcatttgcatgaagaagccagagaaattactgactggtttgaagataatgacgtgcatggtcggataagaagacatgccctggagttgctgtttgaccatcagtattgtttccaccaaatttgtgatctgcatataagtactgctcacatgatagaggctgatgtccttcttccaagtgatggatcagaacacagccagccaattatggcccatccccctgaaacaaacagtgataatactctacaggagtggctgactgaagttatgaaaagcaataaaggcatcaagctggatttcaaaagtctggcagttgtagaaccatccatgatgctcttggaaaatgtgaagaggcatctgaagcgtcctgtatggattaatgccgatattcttcctggtccaaatggaaatagcaaagtaatagatgcaaaaccatttttagacaccgtgatatccttctttccagacgtgacgttttccctgggttggacaacaggatggcatcctgagaaagtcaatgaagggtacagttggacaatggtgaaagagatggaatatatatgtaatgaactaagtcagcctgtaacgttccctgtcagagcagcattagtcaggcagtcttgttctcagttactttggctgttaaagaaatcaaacaggattaagaaactcactcaaaaccgctcaactacatggaaactgaacaacctgctcctgagtgactactgggtacataacgaaatgaaggcagaaataaagatgttctttgaaaccaacaagaacaaagacacaacataccagaatctctgggacacatttaaagcagtgtgtagagggaaatttatagcactaaatgcccacaagagaaagcaggaaagatctaaaattggcaccctaacatcacaattaaaagaactagagaagcaagagcaaacccattcaaaagctagcagaaggcaagaaataactaagatcagagcagaactgaaggagatagagacacaaaaaacccttcaaaaaagcaatgaatccaggagctggttttttgaaaagatcaacaaaattgatagaccgctagcaagactaataaagaagaaaagagagaagaatcaaatagacgcaataaaaaatgataaagcggatatcaccactgatcccacagaaatacaaattaccatcagagaatactataaacacctctacgcaaataaacgagaaaatctagaagaaatggataaattcctggacacatataccctcccaagactaaaccaggaagaagttgaatctccgaatagaccaataacaggctctgaaattgagggaataattaatagcccaccaaccaaaaaaagtccaggacgagacggattcacagctgaatctaccagagtgttggaagttctggccagggcaatcaggcaggagaaggaaataaagggtattcaattaggaaaagaggaagtcaaattgtccctgtttgcagatgacatgattgtatatttagaaaaccctattgtctcagcccaaaatctccttaagctgataagcaacttcagcaaagtctcaagatacaaaatcaatgtgccaaaatcacaagcgttcctatacaccaataacaggcaaacagagagccaaatcatgagtgaacttccattcacaattgcttcaaagagaataaaatacctaggaatccagcttacaaaggatgtgaaggacctcttcaaggagaactacaaaccactgctcaacgaaataaaagaggacacaaacaaatggaagaacattccatgctcatggataggaagaatcaataccgtgaaaatggccatactgcccaaggtaatttatatgttcaatgccatcaccatcaagctaccaatgactttcttcacagaattggaaaaaactactttaaaattcatatggaaccaaaaaagagcccgcattgccaagacaatcttaagccaaaagagcaaagctggaggcatcatgctacctgacttcaaactatacgacaaggctgcagtaaccaaaacagcatag

SEQ ID NO: 123078 - DNA, 1065 bp, Homo sapiens
atgggagactttaacaccccactgtcaacattagacagatcaatgagacagaaagttaacaaggatatccaggaattgaactcagctctgcaccaagtggacctaatagacatctacagaactctccaccccaaatcaacagaatatacattcttctcagcaccacactgcacttattccaaaattgaccacatagttggaagtaaagcactcctcagcaaatgtaaaagaatagaaattataacaaactgtctctcagaccacagtgcaatcaaactagaactcaggattaagaaactcactcaaaaccgctcaactacatggaaactgaacaacctgctcctgaatgactactgggtacataacgaaacgaaggcagaaataaagatgttctttgaaaccaacgagaacaaagacacaacattttctctgggacacatacaaagcaaaataccaactaccatcagagaatgctataaacacctctatgcaaataaactagaaaatctagaaggaatggataaattcctcgacacatacacccacccaagactaaaccaggaagaagctgaatctctgaatagaccaataacaggctctgaaattgaggcaataattaatagcttaccaaccaaaaaaaaaatccaggaccagatggattcacagccaaattctaccagagagaataaaatacctaggaatccaacttacaagggatgtgaaggacctcttcaaggagaactacaaaccactgctcaaggaaataaaagaggacacaaacaaatggaagaacattccatgctcatgggtaggaagaatcaatatcgtgaaaatggccatactgcccaagacacactggggtggcggggtgggtcccaaggcttcaggggacccgacctccatgtctttgccggatgcagcccatgctgcagctttcacaggttggagttcagtgcctgtggctctctcgagctagagttgcacgttggtgattctacaggtctggagtgttgggagcagcccagccctacagttctcttgggcatgacccaagtggaactgtga

SEQ ID NO: 123079 - DNA, 1419 bp, Homo sapiens
atgaagatgttctttgaaaccaatgagaacaaagacacaatgtaccagaatctctgggacaccattaaagcagtgtgtagagggaaatgtatagcactaaatgcccacaagagaaagcaggaaagatctaaaatcgacaccctaacatcacaattaaaagaactagagaagcaagagcaaacacattcaaaagctaacagaaggcaagaaataactaagatcagagcagaactgaaggaaatagagacacaaaaaccctttcaaaaaatcaatgaatccagagctgaaatacaaactaccatcagagaatactataaacacctctacacaaataaactagaaaatctagaagaaatggataaattcctggatgcatacaccctcccaagacgaaaccaggaagaaggtgaatccctgaagagaccaataacaggctctgaaattgaggcaataattaatagcctgccaaccaaaaaaagtccaggaccagacatattcacagccaaattctaccagagaaccaaagacaaaaaccacatgattatctcaatagatgcagaaaaggccttcgacaaaattcaacagcccttcatgctaaaaactttcaataagctaggtattgatggaatgtatcttaaaataatgagagctatttatgacaaacccacagccaatatcatactgaatgggcaaaaactggaagcattccctttgaaaactggcacaagacagggatgccctctctcaccactcctattcaacatagttttggaagttctggccaggacaatcaggcaagagaaagaaagaaagtgtattcaattaggaaaagaggaagtcaaattgttcctgtttgcagatgacatgattgtatatttagaaaaccccattgtctcagctcaaaatctcctgaagctgataagcaacttcaacaaagtctcaggatacaaaatcaatgtgcaaaaatcacaagcattcttatacaccaataacagacaaacagagagccaaatcatgagtgaactcccattcacaattgctacaaagagaataaaatacctaggaatccaacttacaagggatgtgaaggacctctttaaggagaactacaaaccactgctcaacaaaataaaagagaacacaaacaaatggaagaacattctatgctcatggataggaagaatcaatatcatgaaaatggccatactgcccaaggtaatttatagattcagtgccatcctcatcaagctaccaatgactttcttcacagaattggaaaaaactactttaaagttcatatggaaccaaaaaggagcccgcattgccaagtcaatcctaagccaaaagaacaaagctggaggcatcatgctacctgacttgaaactatactacaaggctgcagtaaccaaaacagcatga

SEQ ID NO: 123080 - DNA, 1893 bp, Homo sapiens
atgccgatggtagaggagctttacggcaactatggcatcatggccgataccacggagcgagtgggccagcataaagatgcctatcaagtgatactggatggtgtgaaaggtggtactaaggaaaaacgattagcagctcaatttattctgaaattctttaagcattttacagaattggctgattctgctatcaatgcacacttacagacagtaagtggaagacagcaacttgtaaagttggtggctgaacaggccgacctagaacagaccttcaatccctcagatcctgagtgtgtgggcaggctcttacagtgcactcagcaggcagtacccttcttctctaaaactgtccattccacaaggtctgtgacatatttctgtgagcaggttctccctaaccttggtatcttgactaccgcagtggaaggtcttgacatacagttggaggtattgaaattgttggtggagatgagttcattttgtggtgacatggaaaaactagaaacaaatttagggaaactatttgataagttattggaatacatgcccctccctccagaagaagcagaaaatggagggaatgctggtgatgaagaacccaaactacagttcagttatgtggaatgtttgttgtacagttttcaccagttgggccaaaaacttccagatttcttaacagccaaactgaatgcagaaaaactcaaagatttcaaaatcaggctgcaatactttgcacgaggcctgcaagtttatatcagacaacttcacttagctctccaggtgaaacagtgttttgcccaatatatggagaaggaaaatgggattgatgcaaaaatcctcaataaaatactggcaaaccgaatccagcagcacatcaaaaagcttatccaccatgatcaagtgggcttcatccctgggatgcaaggctggttcaatatacgcaaatcaataaatgtaatccagcatataaacagagccaaagacaaaaaccacatgattatctcaatagatgcagaaaaagcctttgacaaaattcaacaacccttcatgctaaaaactctcaataaattaggtattgatgggacgtatttcaaaataataagagctatctatgacaaacccacagccaatatcatactgaatgggcaaaaactggaagcattccctttgaaaactggcacaagacagggatgccctctctcaccgctcctattcaacatagtgttggaagttctggccagggcaatcaggcaggagaaggaaataaagggtattcaattaggaaaagaggaagtcaaattgtccctgtttgcagatgacatgattgtttatctagaaaaccccatcgtctcagcccaaaatctccttaagctgataagcaacttcagcaaagtctcaggatacaaaatcaatgtacaaaaatcacaagcattcttatacaccaacaacagacaaacagagagccaaatcatgggtaaactcccattcacaattgcttcagagaataaaatacctaggaatccaacttacaagggatgtgaaggacctcttcaaggagaactacaaaccactgctcaaggaaataaaagaggacacaaacaaatggaagaacattccatgctcatgggtaggaagaatcaatatcgtgaaaatggccatactgcccaagaattggaaaaaactactttaaagttcatatggaaccaaaaaagagcccgcattgccaagtcaatcctaagccaaaagaacaaagctggaggcatcacactacctgacttcaaactatactacaaggctacagtaaccaaaacagcatggtactggtaccaaaacagagatatagatcaatggaacagaaataatgccgcatatctacaactatctgatctttga

SEQ ID NO: 123081 - DNA, 1575 bp, Homo sapiens
atggagctgaaaaccaaggctcgagaactacgtgaagaatgcagaagcctcaggagccgatgcgatcaactggaagaaagggtatcagcaatggaagatgaaatgaatgaaatgaagcgagaagggaagtttagagaaaaaagaataaaaagaaatgagcaaagcctccaagaaatatgggactatgtgaaaagaccaaatctacgtctgattggtgtacctgaaagtgatgtggagaatggaaccaagttggaaaacactctgcaggatattatccaggagaacttccccaatctagcaaagcaggccaaccatataaacagagccaaagacaaaaaccacatgattatctcaatagatgcagaaaaagcctttgacaaaattcaacaacccttcatgctaaaaactctcaataaattaggtattgatgggacgtatttcaaaataataagagctatctatgacaaacccacagccaatatcatactgaatgggcaaaaactggaagcattccctttgaaaactggcacaagacagggatgccctctctcaccgctcctattcaacatagtgttggaagttctggccagggcaatcaggcaggagaaggaaataaagggtattcaattaggaaaagaggaagtcaaattgtccctgtttgcagacgacatgattgtttatctagaaaaccccattgtctcagcccaaaatctccttaagctgataagcaacttcagcaaagtctcaggatacaaaatcaatgtacaaaaatcacaagcattcttatacaccaacaacagacaaacagagagccaaatcatgggtgaactcccattcacaattgcttcaaagagaataaaatacctaggaatccaacttacaagggatgtgaaggacctcttcaaggagaactacaaaccactgctcaaggaaataaaagaggacacaaacaaatggaagaacattccatgctcatgggtaggaagaatcaatatcgtgaaaatggccatactgcccaaggtaatttacagattcaatgccatccccatcaagctaccaatgactttcttcacagaattggaaaaaactactttaaagttcatatggaaccaaaaaagagcccgcattgccaagtcaatcctaagccaaaagaacaaagctggaggcatcacactaccttacttcaaactatactacaaggctacagtaaccaaaacagcatggtactggtaccaaaacagagatatagatcaatggaacagaacagagccctcagaaataatgccgcatatctacaactatctgatctttgacaaacctgagaaaaacaagcaatggggaaaggattccctatttaacagaagcagtaatgatgcagcagggtgcacatgcattggcggggatgggacagcagcaggggtgaggcagcagcatccatgcatccatgctcatgccagtgatgggacagatgtggttgtgggtgccagtaaagcagtggggaggtgcaccatggatgagtgtgcaccagcaagtggcaggggaaggctgcagttgggggaagctgtgggtcagtgg

SEQ ID NO: 123082 - DNA, 2685 bp, Homo sapiens
atggtgaagggatcaattcaacaagaggagctaactatcctaaatatttatgcacccaatacaggagcacccagattcataaagcaagtcctgagtgacctacaaagagacttagactcccacacattaataatgggagactttaacaccccactgtcaacattagacagatcaacgagacagaaagtcaacaaggatacccaggaattgaactcagctctgcaccaagcagacctaatagacatcaacagaactctccaccccaaatcaacagagtatacatttttttcagcaccacaccacacctattccaaaattgaccacatagttggaagtaaagctctcctcagcaaatgtaaaagaacagaaattataacaaactatctctcagaccacagtgcaatcaaactagaactcaggattaagaatctcactcaaagccgctcaactccatggaaactgaacaacctgctcctgaatgactactgggtacataacgaaatgaaggcagaaataaagatgttctttgaaaccaacaagaacaaagacaccacataccagaatctctgggacgcattcaaagcagtgtgtagagggaaatttatagcactaaatgcctacaagagaaagcaggaaagatccaaaattgacaccctaacatcacaattaaaagaactagaaaagcaagagcaaacacattcaaaagctagcagaaggcaagaaataacgaaaatcagagcagaactgaaggaaatagagacacaaaaaacccttcaaaaaatcaatgaatccaggagctggttttttgaaaggatcaacaaaattgatagaccgctagcaagactaataaagaaaaaaagagagaagaatcaaatagacacaataaaaaatgataaaggggatatcaccaccgatcccacagaaatacaaactaccatcagagaatactacaaacacctctacgcaaataaactagaaaatctagaagaaatggatacattcctcgacacatacactctcccaagactaaaccaggaagaagttgaatctctgaatagaccaataacaggctctgaaattgtggcaataatcaatagtttaccaaccaaaaagagtccaggaccagatggattcacagccgaattctaccagagagctatctatgacaaacccacagccaatatcatactgaatgggcaaaaactggaagcattccctttgaaaactggcacaagacagggatgccctctctcaccgctcctattcaacatagtgttggaagttctggccagggcaatcaggcaggagaaggaaataaagggtattcaattaggaaaagaggaagtcaaattgtccctgtttgcagatgacatgattgtttatctagaaaaccccatcgtctcagcccaaaatctccttaagctgataagcaacttcagcaaagtctcaggatacaaaatcaatgtacaaaaatcacaagcattcttatacaccaaaaacagacaaacagagagccaactcatgagtgaactcccattcacaattgcttcaaagagaataaaatacctaggaatccaacttacaagggatgtgaaggacctcttcaaggagaactacaaaccactgctcaacgaaataaaagaggacacaaacaaatggaagaacattccatgctcatgggtaggaagaatcaatatcgtgaaaatggccatactgcccaaggtaatttacagattcaatgccatccccttcaagctaccaatgactttcttcacagaattggaaaaaactactttaaagttcatatggaaccaaaaaagagcccgcatcgccaagtcaatcctaagccaaaagaacaaagctggaggcatcacactacctgacttcaaactatactacaaggctacagtaaccaaaacagcatggtactggtaccaaaacagagatatagatcaatggaacagaacagagccctcagaaataatgccgcatatctacaactatctgatctttgacaaacctgagaaaaacaagcaatggggaaaggattccctatttaataaatggtgctgggaaaactggctagccatatgtagaaggctgaaactggatcccttccttacaccttatacaaaaatcaattcaagatggattaaagatttaaacgttagacctaaaaccataaaaaccctagaagaaaacctaggcattaccattcaggacataggcgtgggcaaggacttcatgtccaaaacaccaaaagcaatggcaacaaaagccaaaattgacaaatgggatctaattaaactcaagagcttctgcacagcaaaagaaactaccatcagagtgaacaggcaacctacaacatgggagaaaattttcgcaacctactcatctgacaaaggtctaatatccagaatctacaatgaactcaaacaaatttacaagaaaaaaacaaacaaccccatcaaaaagtgggcgaaggacatgaacagacacttctcaaaagaagacatttatgcagccaaaaaacacatgaagaaatgctcatcatcactggccatcagagaaatgcaaatcaaaaccactatgagatatcatctcacaccagttagaatggcaatcattaaaaagtcaggaaacaacagggacatggatgaaattggaaaccatcattctcagtaa

SEQ ID NO: 123083 - DNA, 2088 bp, Homo sapiens
atggtaaagggatcaattcaacaagaagagctaactatcctaaatagatatgcacccaatacaggagcacccagatccataaagcaagtcctgagtgacctacaaagagacttagactcccacacaataataatgggagactttaacaccccactgtcaacattagacagatcaacgagacagaaagttagcaaggatatccaggaattgaactcagttctgcaccaagcggacctaatagacatctacagaactctccaccccaaatcaacagaatgtacattcttctcagcaccacaccgcacttattccaaaattgaccacatagttggaagtaaagcactcctcagcaaatataaaagaacagaaattataacaaactgttgctcagaccacagtgcaaccaaactagaactcaggattaacaaactcactcaaaaccgctcaactacatggaaactgaacaacctgctcctgaatgactactgggtacataatgaaatgaaggcacaaataaagatgttctttgaaaccaatgagaacaaagacacagcataccagaatctctgggacacatttaaagcaatgtgtagagggaaatttatagcactaaatgcccacaagagaaagcaggaaagatctaaaattgacaccctaacatcacgattaaaagaactagagaagcaagagcaaactttacattcaaaagacagcagaaggcaagaaataaatgcagaaaaggcctttgacaaaattcaacagcccttcatgctaaaaactctcaatacactagatattgatgaaacgtatctcaaaataataagagctatttatgacaaacccacagtcaatatcatactgaatgggcaaaaactggaagtattccctttgaaaactggcacaagacagggatgccgtctctcgccactcctattcaacataatgttggaagttctggccagggcaatcaggcaagagaaagaaataaagggtattcaattaggaaaagaggaagtcaaattgtccctgtttgcagatgacatgattgtatatctagaaaaccccatcatctcagcccaaaatctccttaagctgataagcaacttcagcaaagtctcaggatataaaatcaatgtgcaagaatcacaagcatttctgtacaccaataacagacaaacagagagccaaatcatgagtgaactcccattcacgattgctgcaaagagaataaaatacctaggaatccaacttacaaaggatatgaaggacctcttcaaggagaactacaaaccactgctcaacaaaataaaagaggacacaaacaaatggaagaatattccatgctcatggataggaaaaatcaatatcgtgaaaatggccatattgcccaaggctacagtaaccacaacagcatggtactggtaccaaaacagagatatagaccaatggaacagaacagaggcctcagaaatgacaccccacatctacagccatctgatctttgacaaacctgacaaaaacaagaaatggggaaatgattccgtatttaataaatggtgctgggaaaactggctagccatatgtagaaagctgaaacaggatcccttccttacaccttatacaaaaattaattcaagatggattaaagaattaaatgttagacctaaaaccataaaaaccctagaagaaaacctaggcaataccattcaggacataggcatgggcaagaacttcatgactaaaacaccaaaagcaacggcaacaaaagccaaaatagacaaatgggatctaattaaactaaagagcttctgcacagtaaaagaaactaatatcagagtgaacaagcaacttatagaatgggagaaaatttttgcaatctacccatctgacaaagggctaatatccagaatctacaaagaacttaaacaaatttacaagaaagaaacaaacaaccccatcaaaaagtgggccaaggatataaacagacacttctcaaaagaagacatttatgcagccaatagacacatgaaaaaatgctcatcatcactggtcatcagagaaatgcaaatcaaaaccacaatgagatag

SEQ ID NO: 123084 - DNA, 2409 bp, Homo sapiens
atgagtgaactcccattcacaattgcttcaaagagaatattcaaagagaataaaatacctaggaatccaacttacaacggatgtgaaggacctcttcaaggagaactacaaaccactgctcaacgaaataaaagaggacacaaacaaatggaagaacattccatgctcatgcataggaagaatcaatatcgtgaaaatggtcacactgcccaagaactagaaaagcaagagcaaacacattcaaaagctagcagaaggcaagaaataactaaaatcagagcagaactgaagaaaatagagacacaaaaaacacttcaaaaaattaatgaatccaggagctggttttttgaaaagatcaacaaaattcatagaccgctagcaagactaataaagaagaaaagagagaagaatcaaatagacgcaataaaaaatgataaaggggatatcaccaccaatcccacagaaatacaaactaccatcagagaatactacaaacacctctatgcaaataaactagaaaatctagaagaaatggataaattcctcgacacatacaccctcccaagactaaaccaggaagaagttgaatctctgaatagaccaataacaggatctgaaattgtggcaataatcaatagcttaccaaccaaaaagagtccaggaccagatggattcacagccgaattctaccagaggtacaaggaggaactggtaccattccttctgaaactattccagtcaatagaaaaagagggaatcctccctaactcactttatgaggccaacatcatcctgataccaaagccaggcagagacacaactaaaaaagagaattttagaccaatatccttgatgaacattgatgcaaaaatcctcaataaaatactgtcaaaccaaatccagcagcacatcaaaaagcttatccaccatgatcaagtgggcttcatccctgggatgcaaggctggttcaacatacgcgaatcaataaatgtaatccagcatataaacagaaccaaagacaaaaaccacatgattatctcaatagatgcagaaaaggccttcgataaaattcaaccgcccttcatgctaaaaactctcaataaattagcccaaaatctccttaagctgataagcaacttcagcaaagtctcaggatacaaaatcaatgtgcaaaaatcacaagcattctgttacaccaataacagacaaacagagagccaaatcatgagtgaactcccattcacaattgcttcaaagagaataaaatacctaggaatccaacttacaagggatgtgaaggaccgcttcaaggagaactacaaaccactgctcaacgaaataaaagaggacacaaacaaatggaagaacattccatgctcatggataggaagaatcaatattgtgaaaatggccatactgcccaaggtaatttatagattcaatgccatccccatcaatctaccaatgcctttcttcacagaattggaaaaaactactttacagttcatatggaaccaaaaaagagcccgcattgccaagacaatcctaggccaaaagaacaaagctggaggcatcatgctacctgacttcaaactatactacaaggctacagtaaccaaaacagcatggtactggtaccaaaacagagatgtagaccaatggaacagaacagagccctcagaaatcatgccgcatatctacaactatctgatctttgacaaacctgagaaaaacaagcaatggggaaaggattccctatttaataaatggtgctgggaaaactggctagctatttgtagaaagccgaaactggatcccttccttacaccttatacaaaacttaattcaagatggattaaagatgtaaatgttagacctaaaaccgtaaaaaccctagaagaaaacctaggcaataccattcaggacataggcatgggcaaggacttcatgtctaaaacaccaaaagcaatggcaacaaaagccaaaatggacaaatgggatctaattaaactgaagagcttctgcacagcaaaagaaattaccatcagagtgaatggacaacctacagaatgggagaaactttttgcaatctactcatctgacaaagggctaatatccagaatctacaatgaattcaaacaaatttacaagaaaaaaacaaacaaccccatcaaaaagtgggtgaaggacttgaacagacacttctcaaaagaagacagttatgtagccaaaaaacacatgaaaaaatgctcaccatcactggccatcagagaaatgcaaatcaaaaccacaatgagataccatctcacaccagttagaatggcaatcattaaaaaagtcaggaaacaacaggtgctggagaggatgtggagaaacaggaacacttttactctgttggtgggactgtaa

SEQ ID NO: 123085 - DNA, 2057 bp, Homo sapiens
atgttctttgaaaccaatgagaacaaagttataacataccagaatctctgggacacatttaaagcagtgtgtagagtgaaatttatagcactaaatgcccacaggaaaaagcaggaaagatctaaaattgacaccctaacatcacaattaaaagaactagagaagcaagagcgaacacatttaacagctagcagaaggcaaaaaataactgagatcagagcagaactaaaggagatagagacacaaaaaacccttcgaaaaatcaatgaatccaggagctggttttttgaaaagatcaacaaaattgatagactgctagcaagactaataaagaagaaaacagagaagaatcaaatagatgcaataaaaaatgataaaggggatatcaccaccgatcccacagaaatacaaactactatcagagaatactataaacacctctatgcaaatatactagaaaatctagaagaaatggataaattccttgacacatacaccctcccaagaataaaccaggaagaagttgaatctctgaatagaccaataagaggctctgaaattgaggcaataattaatagcttaccaaccaaaaaaagtccaggaccagatgcagtcacagccgaattctaccagaggtacaaggaggagctggtgccattccttctgaaactattccaatcagtagaaaaagagggaatcctccctaactcattttatgaggccagcatcatcctgataccaaagcctggcagagacacaacaaaaaaagagaattttagaccaatatccctgatgaatgtcgatccaaaaatcctcaataaaatactggcaaaccgaatccagcaacacatcaaaaagcttatccaccatgatcaagtgggcttcatccctgggatgcaaggctggttcaacatacgcaaatcaattaacgtaatccagcatataaacagaaccaacgataaaaaccacatgattatctcaatagatgcagaaaaggcctttgacaaaattcaacagcacttcatgctaaaaactctcaataaattagagaataaaatacctaggaatccaacttacaagggatgtgaaggacctcttcaaggagaactacaaaccactgctcaacgaaataaaagaggacacaaacaaatggaagaacattccatgctcatgggtaggaagaatcaatatcgtgataatggccacactgcccaagaattggaaaaaagctactttaaagttcatatggaaccaaaaaagagcccgcatcaccaagtcaatcctaagccaaaagaacaaagctggaggcatcacgctacctgacttcaaactatactacaaggctacactaaccaaaacagcatggtactggtatcaacacagagatataaaccaatggaacagaacagagccctcagaaataataccacacatctacaaccatctgatctttgacaaacctgacaaaaaacaagaaataggggaaggattccctatttaataaatggtgctgggaaagctggctagacatatgtagaaagctgaaactggatcccttccttacaccttatacaaaaattaattcaagatggattaaagacttaaacgtaagacctaaaaccataaaaaccctagaagaaaacctaggcaataccattcaggacataggcatgggcaaggacttcatgtctaaaacaccaaaagcaatggcaacaaaagccaaaattgacaaatgggatctaattaaactaaagagcttctgcacagcaaaagaaactaccatcagagtgaacaggcaacctaaagaatgggagaacatttttgcaatctactcatctgacaaatggctaatatccagaatctacaaagaactcaaagaaacttacaagaaaaaaacaaacaaccccatcagaaagtgggcaaaggatatgaacagacacttctcaaaagaagacatttatgcagccaacagacacatgaaaaaaatgctcatcatcactggccatcagagaaatgcaaatcaaaaccacaatgagataccatctcacaccagttag

SEQ ID NO: 123086 - DNA, 4344 bp, Homo sapiens
atggataaattcctcaacacatacactctcccaagactaaaccaggaagaagttgaatctctgaatagaccaatagcaggctctgaaattgtggcaataatcaatagcttaccaaccaaaaagagtccaggaccagatggattcacagctgaattctaccagaggtacaaggaggaactgctgataagcaacttcagcaaagtctcaggatacaaaatcaatgtacaaaaatcacaagcattcttatacaccaacaacagacaaacagagagccaaatcatgagtgaactcccattcacaattgcttccaagagaataaaatacctaggaatccgacttacaagggatgtgaaggacctcttcaaggagaactacaaaccactgctcaatgaaataaaagaggacacaaacaaatggaagaacattccatgctcatgggtaggaagaatcaatatcgtgaaaatggccatactgcccaagaggaaacagccttctgcactcacagccgaagggaaagcagcaggttggggcttcttgtggccaacttcagagcctgtcaccaggaaaggtttagaagagaacgctcagtcccggcaggagtccacgcggaggctcatccttgttgggagaacaggggccgggaagagcgccactgggaacagcatcctgggccagagacggttcttctccaggctgggggccacgtctgtgaccagggcctgcaccacgggcagccgcaggtgggacaagtgccacgtggaagtcgtggacactccggacattttcagctcccaagtgtccaagacagatcctggctgtgaggagagaggtcactgctacctgctctcggcccccggaccccacgcgctgctcctggtgacccagttgggtcggttcaccgcccaggaccagcaggcggtgaggcaggtgagggacatgttcggggaggacgtcctaaaatggatggtcatcgtcttcaccaggaaggaggacctggccgggggctccctgcacgattacgtgagcaacacagagaaccgggccttgcgcgagctggtggccgagtgcgggggccgggtctgtgcctttgataaccgggccaccggccgggagcaggaagcccaggtggagcagctgctggggatggtcgagggcttggtgctggagcacaagggcgcccattactccaacgaggtgtatgagctggcgcaggtgctgcgctgggcaggccctgaggagcggctccggcgggtggcggagcgcgtggcagccaggggagaatggacagaagaaatatttgaaaaggaaatggttaagacttttctaaaagtattgaaggacaccaaactacagatccaagaaacagagagctccaagcagggctcccctttgtcttccacaatgattggaagcctcctgaggccctcaccagaagaagatgccagcactgtgaggccctcaccagaagaagatgccagcactgtgcttcctgcacagcctgcaaactggtgggctccatcacgtgccagacagcttaccagggtcagtcacgagcccagagtcaaaccctgcaagggcttgttctggtcctctttggaccagagtgcctttctgatcctggttagcagaaactttccagaagcagagcctctgagtcatggagctttcagccccagcacatggctcctccttaactgcgtctgctcaacctccctcagccctgtgaacagcatccccgcacacagacgcagagcaggactctctctgctgccacttcaccttcctgagagaggaccagcggccagagcctcagtgactgccaccctggaggacagggcacaacaaccgtttctggagagaatgggaggattccagaggggcaaatatggaactatggctgaaggtagatcagaagataacttgtctgcaacaccaccggcattgaggattatcctagtgggcaaaacaggctgcgggaaaagtgccacagggaacagcatccttggccagcccgtgtttgagtccaagctgagggcccagtcagtgaccaggacgtgccaggtgaaaacaggaacatggaacgggaggaaagtcctggtggttgacacgccctccatctttgagtcacaggccgatacccaagagctgtacaagaacatcggggactgctacctgctctctgccccggggccccacgtcctgcttctggtgatccagctggggcgtttcactgctcaggacacagtggccatcaggaaggtgaaagaggtctttgggacaggggccatgagacatgtggtcatcctcttcacccacaaagaggacttagggggccaggccctggatgactatgtagcaaacacggacaactgcagcctgaaagacctggtgcgggagtgtgagagaaggtactgtgccttcaacaactggggctctgtggaggagcagaggcagcagcaggcagagctcctggctgtgattgagaggctggggagggagcgagagggctccttccacagcaatgacctcttcttggatgcccagctgctccaaagaactggagctggggcctgccaggaagactacaggcagtaccaggccaaagtggaatggcaggtactgcctgtagtcttcttggcaggccccagccctgcctctctggagcagctgggcatccaggaagaggttattgctgtagaaggagccctctcgctccctccccagcctctcgatcgcagccaggagctctgcctgctgctgcctctgctcctccccggcagcccggttgttgaaggcacagtaccttctctcacattcctgcaccagtgctcgggtagaaaatccacccaggccccacagaagaataacttctcaggcttcgctactatgaaaaacccatacaacccattccagagcaacatgaggaccttgctgtgtgcaaagtttcacacaatgaagcatgcaggcctgggtgaaggaatacctcctgacaactccgggaatgatggctatgctaataatgggtatagtgcccgtgaagaagaaaatgagacactcactgaaaatctgagaagcaaagtaactgctataaaatctttttccattgaaataggccatgaagttaaaacccaaaataaattattagctgtaatggattcacaatttgattctacaactggatttctagtgttggaagttctggccagggcaatcaggcaggagaaagaaataaagggtattcaattaggaaaagaggaagtcaaattgtccctgtttgcagatgacatgattgtacatttagaaaaccccatcgtctcagcccaaaatctctttaagctgataagcaacttcagcaaagtctcaggatacaaaatcaatgtgcaaaaatcacaagcattcttatacaccaataacagacaaacagagagccaaatcatgagtgaactcccattcacaattgcttcaaagagaataaaatacctaggaatccaacttacaagggatgcaaaggacgtcttcaaggagaactacaaaccactgctcaatgaaataaaagaggacacaaacaaatggaagaacattccatgctcatggataggaagaatcaatatcgtgaaaatggccatactgcccaggaattggaaaaaactacttcaaagttcatatggaaccaaaaaagcccgcatcaccaagacaatcctaagcaaaaagaacaaagctggaggcatcacgctacctaacttcaaactatactacaaggctacagtaaccaaaacagcatggtactggtaccaacacagagatatagaccaatggaacagaacagaggcctcagaagtaacaccacacatctacaaccatctgatctttgacaaacctgacaaaaacaagaaatggggaaaggattccctgtttaataaatggtgctgggaaaactggctagccatatgtagaaagctgaaactggatctcttccttacaccttatacaaaaattaatccaaggtggattaaagacttaaatcttagacctagaaccataaaaaccctagaagaaaacctaggcagtatctttagggacataggcatgagcaagggcttcatgactaaaacaccaaaagcaaaggcaacaaaagccaaaacagacaaatgggatctaattaaactaaagagcttctgcacggcaaaagaaactaccatcagagtgaacaggcaacctacagaatgggagaaaatttttgcaatctatccatctgacaaagggctaatatccagaatctataaagaactcaaacgaatttacaagaaaaaaacaaccccatcaaaaagtgggcaaagggtatga

SEQ ID NO: 123087 - DNA, 387 bp, Homo sapiens
ttagcagtgtctggggctcttcctgctggtagtcaatcgcatgcccttggtggtgacaccaaagatgtctccaaacatggccagaagtccccagggaggtaaaatcatccccagctgaaagtcgctggcctgaagaatggctgctgcgtctgcatgtgcgtttgtgtctgtctgcgtctgcgtccgcgtctggatctgggtctgtgtctgtgtctgtgtctgtgtctgcgtctgcgtctgtctgcgtctgcgtctgtctgcgtctgcatctgcgtctgcatctaggtctgggtctgtgtctgtgtctgtctgtgtctcagcctcccaaagtgctgggattacaggcatgagccacagcgcccggcctaggagcacccacatcttcat

SEQ ID NO: 123088 - DNA, 735 bp, Homo sapiens
tcagccacttccaccaggaagcacagccagcagtgactgcagaaggtgctgcccatgacagcagccagcagggagctcccccttcagcaccaacagctgacctgtgagcagggcctgtggcaactgcttcgagtcctgggaatcacacaccaggccccactgaaatggcaggggacatggatcttctgtggagggagcaggagaggagatccgggccacttctgtctgtgatacctcagtggcaatggtggagaaaaaggtttctgtcatgcactgccggaccacaggctccgtgtcctgcaccagcacccgccccatgcttgtgtagaaactgacactgtggatttgggaataaccagcatttctctggctgatgtgagagtctgcgtctgcatgtgcgtttgtgtctgtctgcgtctgcgtccgcgtctggatctgggtctgtgtctgtgtctgtgtctgtgtctgcgtctgcgtctgtctgcgtctgcgtctgtctgcgtctgcatctgcgtctgcatctaggtctgggtctgtgtctgtgtctgtctgtgtctgtgtctgcgtctgtatctgtctgcgtctgtgtctgtgtctgcgtctgcgtttgtctgcatctgcgtctgcatctaggtctgtgtctgtgtctatgtctgtgtctgtgtctgtctgtgtactgtactcggaatacacagtttcctcacagccagaaatgcacatcaacccattggccat

SEQ ID NO: 123089 - DNA, 795 bp, Homo sapiens
tcattcttccccggtaacatccacagggtccttccgcatcagcacacagctccccactgcgtggtcctgttcttgaactgatggcctaacatcaacaaagcctctgagccctgagaccctcctctggctgggagccacggtatccatggcaaccatggctgacacagaggacgatgcggacatcgtgggaaacaaagccacatctgtgctgggaccctcttcctcccgtgcctgtgcgggaccctcttcctcccgtgcctgtgcgggaccctcttcctcccgtgtctgtgcgggaccctcttcatcccgtgtctgtgcgggaccctcttcatctcgtgcctgtgtgggaccctcttcatcccgtgcctctgtctgaccctcttcatcccgtgtctgtgtgggactctctatttgtgcgtcctcagctctcacacctgccaggcctgtcatcccctgcaggatgaagcctggtgtccatggcttgcccttagcacctcccacaacattgtaagccttgtagctccttcctatgggctgctgaatccacacagccctttgaagagagtatggccctgccgacaccctgattgcagacttctggcccccgggactgtgtgtgagtttctgttgtttcacactgtctggtttgtggcacttttttccagcaaccacaggacactcattcaccctctggccagcaggaatgtgcaccagcctggggggcatatgcaggaccccagcagctttgagcccacactcatccaccaccttgatgtcaacttgacttgttgtcat

SEQ ID NO: 123090 - DNA, 1623 bp, Homo sapiens
tcatccctgtgttccctgggcccaacagaatagagagtcccacacagacacgggatgaagagggtcagacagaggcacgggatgaagagggtcccacacaggcacgagatgaagagggtcccgcacagacacgggatgaagagggtcccgcacagacacgggaggaagagggtcccgcacaggcacgggaggaagagggtcccgcacaggcacgggaggaagagggtcccagcacaggtacaggatgaagagggtcactgccagaagccagggcgctgcgtctgcatgtgcgtttgtgtctgtctgcgtctgcgtccgcgtctggatctgggtctgtgtctgtgtctgtgtctgtgtctgcgtctgcgtctgtctgcgtctgcgtctgtctgcgtctgcatctgcgtctgcatctaggtctgggtctgtgtctgtgtctgtctgtgtctgtgtctgcgtctgtatctgtctgcgtctgtgtctgtgtctgcgtctgcgtttgtctgcatctgcgtctgcatctaggtctgtgtctgtgtctatgtctgtgtctgtgtctgtctgtgtcttttctatctggttcttcagtgcttcatctgcagttgataatttcagggggccagcggtggtgttgacgtaagacaatgtgctcactcccatttgctcattcccatcactctttcccaggccatttttttctgatcttccaatctcgttccttccaagtctctttccaccctcattgcacattttggtaatggcatcatcttgcctctgagggttaagagtgctacatggtctctgccgttttgggatcctctcttctccgtggacactagggaggccagttctatagcagcctcccgtcatcaatcctgtactgcagatgatgaccacaaccggatttggcaacgccgccggggcttccttcactggtgcatgtcttacagtcttcacaagcagagtcctctggggctcccttgggctgggtgtgaaggcaggagctccagtctgaaccgctgtagcattgcagtgccctgagagaatattgtgcctcaggggtacttgtgcaggaaaaaccaaaccaaagctagaattcctggatgtggctgttttcacatagggcttgcattccgccttcagccagcagctctggacccggaggtactccccaaagcagccctcaggccagtctgcagtgccctggcagttgagcttcccttggccccaggtcaagctgtgggctctgttctctgctcctggtcttgcagcaaatgccatttctgtggccaggtcagctgttggtgctgaagggggagctccctgctggctgctgtcatgggcagcaccttctgcagtcactgctggctgtgcttcctggtggaagtggccgggagcgctggttcctgagagctgccacctcacgtgctgtccttgtccccatgggtcggtgttggctgccctccctccatccttcccgtccatctccacagtctgtgccccgttcaggccaggaaaagcctcttcctggttctcctctctgtagccctgtctcatctgagcccaccttacattttcatccacctgagacattctcctagtaatcagaccctcctcccccat

SEQ ID NO: 123091 - DNA, 234 bp, Homo sapiens
agtggtcccccaggtcctccagggggtccaggcatgcccccgggggccgaggccgaggaagaggccaaggcaattggggtccccctggcgggggatgaccttctccatccccactcacaagtgtgggctggtcatcggccgattgaccaggcccaggtggcccaggccctgctggcccaatggggcccttcaatctgggcccttcaaccaggggccacccggggctcccccaca

SEQ ID NO: 123092 - DNA, 926 bp, Homo sapiens
caggtggcgagaatgtgaaagccataaaccagcagacgggagccttcgtagagatctcccggcagctgcacccaacgggaccccaacttcaagttgttcatcatccgggggttcacccgagcgagattgaccacgccaagcagcttatcgaggaaaagatcgaggtgggttggggcgggctctggggatttggtctcacagcccggatcccagcccacttaccttggttactctccttccttctagggtcctctctgcacagttgggaccaggcccaggtggcccaggccctgctggcccaatggggcccttcaatcctgggcccttcaaccaggggccacccggggctcccccacagtgagtatcctctgcctcctgggttttgaggccgggggcttactgagctggcaagaagaatagcagaccccatttccctttccctagaagtgcagggcgggggccctcatccaagcccatttttgtggataccatcaacaggccctctcctgtctactggtagagcatgtgcctttcagcatccctccgtgcacgtgcaagtttcgcggcttctttcatgtcctcaagctgacgctgcgcgtccttcgagttgcttcttgtctaggcctttcccaggcgccccgttgagcctggtggtctgggtctctggcgcctccccactgaaaaacatccccaccccaggtggtccggctgcggccacccccgcaccactgctcaagcatccctttcttctctcctgcagtgccggggggccccctcctcaccagtacccaccccagggctggggcaatacctacccccagtggcagccgcctgctcctcatgacccaagtaagtgatgggccacctggcggagggcaggccctgttctgtccccccgtctcacccgaggtatctcctgcaggcaa

SEQ ID NO: 123093 - DNA, 611 bp, Homo sapiens
gcgaccgcggaccccaacgccgcgtgggccgacgactatctcacactactaccagcagcccccgggcgccggtcccctgccccgcaccggcccctgcggccccaccggctcagggtgagccccctcagcccccacccaccggccagtcggactacactgagtgggcctgggaagagtattacaaaaagatcggccagcagccccagcagcccggagcgcccccacagcaggactacacgaaggcttgggagggagtactacaagaagcaagcgcaagtggcccaccggaggggggtccaggagctcccccaggctcccagccagactacagttgccgcctgggcggaatattacagacagcaggccgcttactacggacagaccccaggtccttggcggcccccagccgccgcccacgcagcagtggacagcagcaggctcaatgaatcgaatgaatgtgaacttcttcatctgtgaaaaatcttttttttttccattctggttctgtttgggggcttctgttttgtttggcgagagagcgatggctgccgtggggagtactggggagccctcgcggcaagcagggtgggggggacttgggggcatgcggg

SEQ ID NO: 123094 - DNA, 1662 bp, Homo sapiens
cggcgttgcagggctctggggtgggctcttcttttaaacttgtgtctctgctctctcggtgctggcctcagatgacgggacagggcccgagaagattgctcatataatggggcccccagacaggtgcgagcacgcagcccggatcatcaacgacctcctccagagcctcagggtaggtggccccgggtgctgaaggggctggcagggcctccaggggagtgcaagaccagaccggcttccagggttcatcatcctcctcctcctcttgtcttgcagagtggtcccccaaggtcctccaagggggtccaggcatgcccccggggggccgaaggccgaaggaagaaggccaaggcaatttgggggtccccctgggcggggaagatgaccttctccatccccactcacaagtgtgggctggtcatcggccgaggtggcgagaatgtgaaagccataaaccagccaacggggagctttcgtagagatctgccggcagctgccacccaacgaggacggccaacttcaagttgttcatcataccggggttcaccaccagcagattgaccacgccaagcagcttaacgaagtaaaagatgaagggtcctctttgcccagttggaccaggcccaggtggcccaggccctggctggcccaatggggcccttcaatcctggagcccttcaaaccaggggccacccggggctcccccacatgccaagaaggccccctcctcaccagtacccaccccagggctgcggcaatacctacccccagtggcagcagcatgctcctcatgacccaagtatctctgcaggcaaagcagctgcagcggccgcggaccccaacgccgcgtgggcgcctactactcacactactaccagcagcccccgggccccgtccccggcccgcaccggcccctgcggccccaccggctcagggccagcagccccagcgcccggagcacccccacagcaggactacacgaaggcttgggaggagtacacaagaagcaagcgcaagtggcaccggaggggtccaggagctcccccaggctcccagccagactacagtgcgcctgggcggaatattacagacagcaggccgcttactacggacagacccaggtcctggcggcccccagccgccgcccacgcagcagggacagcagcagcaatgggtagcgccggaaaccccttccccgcggggtgtgcccttgatgcctgcagcgggggccgtgtggccggaggtcccgggagtccccacgcaccgccagggaagcattcgctgggtccagaggtaaacgaagaggcctccctgcgccggctgcttgttcctgtgtgccgctgtcgtgatgctggggagcgctgagactcgcaggcgggacttctgaactgctggggagtcggggggcaggcagacagcgcggacggtgggcaccggcccggccgccaccacctcgctcacaatctggccacttgggaagaaaacgtctattttttccccttctctgcatcacttttttgggttttggtctttttattcttttattttttaaacccatgatcttttttcctgtgtccaagtgactgtgttgcaggcggcccggctctggcagggactggtggggacgcggggagcggcccaggccccttgcccgccgggctc

SEQ ID NO: 123095 - DNA, 1778 bp, Homo sapiens
atgccagtgttgcctgtaactgcaactgaaatccgccagtatttgcgggggcatgggatccccttccaggatggtcacagttgcctgcgggcactgagcccctttgcagagtcttcacagctcaaaggccagactggtgttaccacttccttcagcctcttcattgacaagaccacaggccactttctctgcatgaccagcctagcagaagggagctgggaagacttccaggccagcgtggaggggcgaggggatggggccagggaggggtttctgcttagcaaggcaccagaatttgaggacagcgaggaggtccggaggatctggaaccgagcaatacctctctgggagctgcctgatcaggaggaggttcagctggctgatacaatgtttggccttaccaaggttacagatgacacactcaagcgtttcagtgtgcgatatctgcgacctgctcgcagtcttgtcttcccttggttctcccctgggggctcaggattacgaggcctgaagctcctagaggctaaatgccagggggatggagtgagctacgaggaaaccactattccccgacccagcgcctaccacaatctgtttggattaccactgattagtcgtcgagatgctgaggtggtactgacgagtcgtgagcttgacagcctggccttgaaccagtccacggggctgcctacccttactctaccccgaggaacgacctgcttaccccctgccttactcccttacctggaacagttccggcggattgtattctggttgggggatgaccttcggtcctgggaagccgccaagttgtttgcacgaaaactgaaccccaaacgatgcttcttggtgcgaccaggagaccagcaaccccgtcccctggaggccctgaacggaggcttcaatctttctcgtattcttcgtaccgccctgcctgcctggcacaagtccatcgtatctttccggcagcttcgggaggaggtgctaggagaactgtcaaatgtggagcaagcagctggcctccgctggagccgctttccagacctcaatcgtatcttgaagggacatcgaaagggcgagctgacggtcttcacagggccaacaggcagtggaaagacgacattcatcagtgagtatgccctggatttgtgttcccagggggtgaacacactgtggggtagcttcgagatcagcaatgtgagactagcccgggtcatgctgacacagtttgccgaggggcggctggaagatcaactggacaaatatgatcactgggctgaccgctttgaggacctgcccctctatttcatgactttccatggacagcaaaagcatcaggactgtaataggtacaatgcaaccatgcagtctacgtctatgacatttgtcatgtgatcatcgacaacctgcagttcatgatgggtcacgagcagctgtccacagacaggatcgcagctcaagactacatcatcggggtctttcggaagtttgcaacagacaataactgccatgtgacactggtcattcacccccggaaagaggatgatgacaaggaactgcagacagcgtccatttttggctcagccaaaggaggggagtggtctgccccgcactccaccagcagccgacccagtgcccagcctaagagtgactcgacggtggccgaggctgcccctctggcctctgacttcacagcttactggatttggtttttgacctggggaagggggcgagcatcacgtgaccgagaattcggctacctggctgccttaaactaa

SEQ ID NO: 123096 - DNA, 1583 bp, Homo sapiens
  misc_feature (1)...(1583): n = a,t,c or g
tgtcacccttgattgtctcttccgccagaatgcatgcaggcagggacctgcccctctatttcatgactttccatggacagcaaagcatcaggactgtaatagatacaatgcaacatgcaggtctacggtctatgacatttgtcatgtgatcatcgacaacctgcagttcatgatgggtcacgagcagctgtccacagacaggatcgcagctcaagactacatcatcggggtctttcggaagtttgcaacagacaataactgccatgtgacactggtcattcacccccggaaagaggatgatgacaaggaactgcagacagcgtccatttttgggctcagccaaaggcaagccagggnaggcagacaatgttcttgatcctgcagggacagggaagctgggtaaccggggccaggggaaacggtattttgcaggtgttcccaaggaaccgttttgatgggagatgtagggtgtcttcccgcttgagttcaacaagaactccctcaccttctccattccaccaaagaacaaggcccggctcaagaagatcaaggatgacactggaccagtggccaaaaagccctcttctggcaaaaagggggctacgacacagaactctgagatttgctcaggccaggcccccactcccgaccagccagacacctccaagcgttcaaagtgaaggccgtgcagagctggtctctgaaatgagcttgataggataggctggagcataaacctctgcaagggctcctctatcctgtggtcctgagctgtgtgcccttctcagtatgaggggcctaacctagagcaggtttccatagtgagaaaattcaatgtagcagactactgagaaactactgtgttgctcaggctttgtttgaggtcctgtatatacagccctgaaaagagagataaagtccctgcatgcatgcattctggcggaagagacaagcaagcaatgaacaaattagcagaaaacctagttttagtgaaaaatgctgtaaagaaaatagaaatgcgatagagtgctggcaggctagtgtagataagtggtctgaaaaggtgtctctgagccgagggcatgtgagctggggcctaaacaactagaaggagagagccacgtgaacatccggcgaaggggacccaggcagagagaaaaggaaatgccaagccctgaggtaggaatgagcaggtcagattcaaggcagtgaggtcaggccgcatgaacctggaggggaatcggggacttcatgcgaaactccagcctaggctttcaaagtcaaagggtgaatacagtgggtacccaagctcctctgctcccccactttgtagagcctagcatgaaggtggcattgtactagaattgaatcctaggtgcttagccctgcaatatcagggcctcactggtgggagctgctctcgggctgggttgcttgggcgtagagccatagggggaagctgtcagcccggattgtcctgcctatcctagtcactgatgccattgtgtgcttcctcaagactgtctggagtcagtgacattttatagagccttttccagttttactaaaaaatttttccattg

SEQ ID NO: 123097 - DNA, 612 bp, Homo sapiens
atggacaatggaggcagtgactggagtgacgcatctacaagccaaggaacaccaagctcagtggctggttctgaaagtgagaaacttaaggaacactcagaaaaaggtatagagcctttcactgccgaatcacaatttttaaggcgcttactgaggtctgcaaaaacttctcagctcttcactgtgaattttcatggggattctttttcttctgcagttttttcttccttgcctcttcttgaggttaaaattgtttgccatctcaaccacagccttgttggtttttgcaacctccttgtccttggcaaatcctttgaaatcacggatgaacctcttgagggtcttcttccagatgtcatttatacgttccttggtaacatcaccccaagcccaagcaagggtcctgatggagtcgtagatgtaatcctttcagaattgcatcagcgtcttctccgtgtcttcctttgttgcagtaataacctgagcaaagctgctcctcctcaggcagtgggccttaaaagctgctgtaactcctttacccattggttggtaatccttaatctcttgtttcaagatcagtcacttgatgtggcctcttactggcaacaatag

SEQ ID NO: 123098 - DNA, 2423 bp, Homo sapiens
gcccaggttatctagtgtcctctcagaatttataactactcatatttattttttgctctcagaaacaacctacaactatgaatggaatttaataagcctctacgtagtggacccatcacgtcttgcatgttgaactgtacaacttttctttatgttacagttgtccgtcggactttatgtcttcaatgtgggtaatgacatatgcctacacaagatgggctcagtcactgtccttttttttgttacagccagaagagtcaacctgccacctgtagcagttataaaacttatgtcttcctcttcttgtatttcattcttgtctttatttcttaatcttgtagaaagtacagatgatactgaaatagtgagttatcattgggaagaaataaacgggcccttcatagaagagaagacttacttgtgcttctttacttttttgttttgttttgtttttatttttgtatttgctattacttagggagtacagacgccataccttcatttatctgcaatgcaggaaggagattatacatttcagctcacaggattgcagacttaatgcaaagagataatactttttcacactgtttctgtaattccagaaaacaatagacctccagtggctgtggccggccctgataaagagctgatcttcccagtggaaagtgctacctgcctgtcatattcaaaaccccatgccccctcccttatgttaaccacttctatgttttatagaggccccagtgcagtggagatggaaaatattgacaaagcaatagccactgtgactggtctccaggtggggacctaccacttccgtttttattctatcactggtgttttaaatcaatctctttgctttcattttgctatatttgacttagaaaataatagtcctcccagagcccgggctggtggcagacatgttcttgtgcttcccaataattccattactttggatggttcaaggtctaagaagcccagaaattgggacccgaggattgacagctgccctgtgatccgtgttctttcgcaggatgtcatcgatggctctgaccacagtgtggctctgcagcttacgaatctggtggagggggtgtacactttccacttccttatgctctaaagcctgtgcaaatgtccaagtgcaaatcctgtatcttctctttccccagaccctaggaagagtggcctggtggagctgaccctgcaggttggtgttgggcagctgacagagcagcggaaggacacccttgtgaggcagctggctgtgggcgtgtcatggtagtcaccatctgaccatgtggctgtcctctctcattgtctcctccacagcaccgtgattgtgttttatgtacagagcaggccgcctttcaaggttctcaaagctgctgaagtggcccgaaatctgcacataagctgaatccagggattcccttttctgcatgctgccctcagccctacacacctctttgcaggttgccttctgaagtgttctggccatggtcactgcgaccccctcacaaagcgctgcatttgaaaataaagttgttctacaaatagcctgtaactatgtccactttggttttcttgtgtttcagagtggagtatattctatgtgacagtgttgaaatcctagctctcagttacctttctaaagatctgagttgagcttttcattgttcctttcagacaaaaaaggactaaaatcaggaaaaaaacgttgaatatgtactaggtacatctcaagtactttacccattgaattctaatcctgcccatagcggtacgaggtatgtgcaatgattatccccacgactgacagctggaagtgaatcacggcgttcctcctcagatgcttctgtgcttctctctaggtatcaagcaccgaagcacagagcacaactccagcctgatggtatccgagtctgtgaggagttttgacagggactgtctgcaaagcctaaactatttactatctggccttttacagaaagaaaaaaatttgcagaaggctggactaacatcccctgctccttccctgtgggaagacaagtgttccggaagaactgagcatgctcagtcagctcgccttcctctgaaggaagacacggagaagacgctgatgcaattctgaaaggattacatctacgactccatcaggacccttgcttgggcttggggtgatgttaccaaggaacgtataaatgacatctggaagaagacactcaagaggttcatccgtgatttcaaaggatttgccaaggacaaggaggttgcaaaaaccaacaaggctgtggttgagatggcaaacaattttaacctgggggtggaagaagaagacattgaggagctcctacaggtggttcctgaggaactgactaatgaggagttgttggaactggaacaggaacacatacctc

SEQ ID NO: 123099 - DNA, 456 bp, Homo sapiens
tttttttttttttttttaaacccaacatccattgatctttatttgatttgacaaaatctgcatttttaaaagacaggtaacaaaatctgaggttatactgaatctgacaaattgagttctatagtatctagaatatcatataagaaatatcaactgagggaaaagagaagtaccacatgcagatgctcctggcaaggggggaactgtatctgcaggtgaggtccagagtgtgcagtgcataagaaaatcctacagaaaatgccgttaacttacttggatgaaatgtttttcctttgagggggaggaagaggtggtaaagagcggccgctccaacatcagaatggtaataaaaatatttaaatcatggcactagggcacctttgaggaaaagaacatcttaaccagagtaggctcattgcataattctttagtaatatgtacaattttcaagtaatt

SEQ ID NO: 123100 - DNA, 396 bp, Homo sapiens
atggctaccgctaaagatcgaattcagtattatcaactagatgaagtctttgtttttccatatgatatgggaagtagatggaggaactttaaacaggtatttacgtggtcaggggtccctgaaggagatggacttgagtggccagtaagagaaggctgtcaccaatacagcttaacagttcgctataaagtaatagaagattatagtggtgcctgctgccctctgaataaaggaatcaaaaccttcttcacaagtccctgcaccgaagagcctcgaatacagctgcaaaaaggggaattcattttagccacaagaggtttacgatactggttatatggagacaaaattcttgatgattcctttatagaaggtatggaaatggaagggcatgtttaa

SEQ ID NO: 123101 - DNA, 502 bp, Homo sapiens
ggtgtgccaaaaacacctttcctgatcatacacatataagtaaacacccataccgagttccccctgactctagttaggagctgtctttaaccacattagtccctattcgggatcatcaaatttgggaaatacctgttcctagcttgttatgaacatttaaaaatcttatttttttccccttcaaactgtgcttataatagatagcaaagtggggaataaaagtctaactacaagcttattaatttgaagtaataggacttactgctttcagtaatgtcactgtcatccatcagactatttcacctcaatttcattttctccctcaggtgtttcaagaataaggggttggttccctagaaaatgtgtggaaaagtgtccctgtgatgctgaaacagatcaagccccagagggggagaagaaaaatagatagctgctgttaaaacaaaattatcctttaagtctgcttaattacttgaaaattgacatattactaaagaaatat

SEQ ID NO: 123102 - DNA, 1089 bp, Homo sapiens
ctaaatgagggccacatggtcactctcttgacatgtcactctcttgttctcttgacgtttaggaaccagcctgagacttctgtcttcagtcaagtcctcctgtctgttttccactttgagttgagaggaaactccttggttctctcctcttgttcccttacttggactcataaacctctttaagacatcatccatctcctccagaactaactggggacaggcgggagtcgtgggaccctcgcaatcttgctggtgatctctgcagtgagcaccgcgaagtcctgctcgtaaccttcgaagtcggacgacatggcggctccggaacgagtagcccaggccaaagccggggacagctctcaacccagccgcttcctggttgttcgtcgcaatctcggttctccggaaattgggttgcgtgcgtgctttattttccgctccgactttaagataagtaagttcgcaaaggaaaagcgccccaattagtgcctccccccagaaaagcgtatgaaaatatgcaagttctgagggatcattagaagcgttttttccccccttcgtgttctgggaatcggctccggatccacacgctacaaggcacagcagcttgcttccggagggaggtttgaggcggcgaacctccggaagtgacagtaacagagactgcgcagggggcctgagcgggagagtcctggcgagggcgctggccgagaggtgctcggcttgtagcaggtcccgcactccagcctctcgctgccagggtttgctctctgcttgtcctgggatacaactggaggaagtgtgaatttcatcatgttgataaattggactgtcatgattctttataattacttcaatgccatgtttgtcggtccgggctttgtccctctggggtggaaaccggtaagaaagattcataaccaaacattttgtgcgtgtgctattgttgctgcgatagctctcctttgggtggaacacagtgaagatcgacatgagtgcagcccggagagatcctcttccaattgttccatttggattagctgcatttgctaccaccttgtttgccttgggattagctttaggaacaaccat

SEQ ID NO: 123103 - DNA, 817 bp, Homo sapiens
ggactaccgctatagcgatagaccctaccattgcacttactgattgattgactgggcctgcagcttcatggtcctggggcttaaatgtggacagaattaaggcccctctactcattcgactgactcttcactggtactcccaatcacatcaataaccgtcacaatctaaactgatgtggatgggaatatgggaattaggcaggataccatggatgaacagtattgtaaagtctgccaagcatacaaggcaccacgttcacatcactgcacaaagtgtaacacatgtgtgatgaagatggaccatcactgtccttggatcaacaactgttgtggttaccaaaatcatgcttcgttcacactgattctccttttagcaccactgggttgtatccatgctgctttcatttttgtgatgactatgtacacacagctttattcattcgggatggaaaataatttcttcaggaaacaaaacttctatttgagttcatgggattggaaggaggaagggctaaaggatccggatttcagtattatccaactaggatggaagtcttttgtttttttccatatggatatgggggaagtagatggggaggggactttttaaacagggtattttacgtgggttcagggggtccctgaaggagatggacttgagtggccagtaagagaaggctgtcaccaatacagcttaacagtgagtatttttgttcaaatagcccttcctttttgcctcgccttctttcccttaactccccctcaactcaagtgacattttgtagtaaaataagtaatatgaatgttttcactatgg

SEQ ID NO: 123104 - DNA, 1581 bp, Homo sapiens
  misc_feature (1)...(1581): n = a,t,c or g
catgaaggccactaaatttaatgggagctgtttgtctttttatacccaacatccattgatctttatgtgatttgacaaaatctgacatttttaaaagacaggtaacaaaatctgaggttatactgaatctgacaaattgagttctatagtatctagaatatcatataagaaatatcaactcgagggaaaagagaagtaccacatgacagatgctcctgggcaaggggggaactgtatctgcagggtgaggtccagagtgtgcagtgcattaaggaaaatcctacaggaaaatgccgttaactttactttggatgaaaatgtttttcttttttgagggggggagggaagagggtgggtaaagagggggcagggattttcaaagggcatatggcaggaatgggctttcttccctttttccaaaatgggtaataaaaatattttaaatccatgggcactagggcacctttggaggaaaagaacatcttaaccagagtaggctcattgcataattctttagtaatatggtacaattttcccggtaattaagcagacttaaaggataattttggttttaacagcagctatctatttttcttctcccccctctggggcttgatctgtttcaggcatcacagggacacttttccacacattttctaggggaacccaaccccttattcttggaaacaccttctataaaggaatcatccaagaattttgtctccatataaccagtatcgtaaacctcttgtggctaaaatgaattcccctttttgcagctgtattcgaggctcttcggtgcagggacttgtgaagaaaggttttgattcctttattcagagggcagcaggcaccactataatcttctattactttatagcgaacacttctgactctcttatctgcttttttgtttcaactgttctattgttaagctgtattggtgacagccttctctttactggccacgtcaagtccatctccgttcagggacccctgaccacgtaaatacctgtttaaagttcctccatctacttcccatatcatatggaaaaacaaagacttcatctagttgataatactgaattcggatctttagccttctcttcaatccatgactcaatagaagttttgtttctgagaattattttcatctggataaaaaacaacatcccaacagctatggttgttcctaaagctaatcccaaggcaaacaaagtggtagcaaatgcaagctaatcccaaatggaacaatttggaaggaggatctctccgggncttgcacttcatgtcgaatcttcacctgtgttccaccccaaaggagagccgatgataaagctgtgtgtacatagtcatcacaaaaatgaaagcagcatggatacaacccagtggtgctaaaaggagaaacagtgtgaacgaagcatgattttggtaaccacaacagttgttgatccaaggacagtgatggtccatcttcatcacacatctgttacactttctgcagtgatgtgaacgtggtgccttgtatgcttggcagactttacaatactggagatacatggtatcctgagaaattctcgg

SEQ ID NO: 123105 - DNA, 789 bp, Homo sapiens; identical to SEQ ID NO: 117480

SEQ ID NO: 123106 - DNA, 984 bp, Homo sapiens; identical to SEQ ID NO: 117481
  misc_feature (1)...(984): n = a,t,c or g

SEQ ID NO: 123107 - DNA, 867 bp, Homo sapiens; identical to SEQ ID NO: 117482

SEQ ID NO: 123108 - DNA, 1740 bp, Homo sapiens
atgaaagagaaacctgctgttgaggttcgactggataaatggctatgggctgcccgtttttataaaacccgcgcgctggcccgtgaaatgattgaaggcggtaaggtgcattacaacgggcagcgcagcaagccgagcaaaatcgtcgagctgaatgccacgctcactctgcgccagggaaatgacgaacgcacggtgattgtaaaggcgattactgaacagcgtcgccccgccagcgaggcagccttgctgtatgaagagactgcggaaagtgtagagaaacgcgaaaaaatggcgctggcacagatgattatgccgcaacatgaccaattacatcgctatctgtttgaaaactttgccgtgcgcggcgaactggtaaccgtttcggaaaccctgcaacagatccttgagaaccacgattatccgcagcccgttaaaaacgtgctggcagaactgctggttgcgaccagcctgttaaccgctacgctgaaatttgatggtgatatcaccgtacagctgcagggcgacggtccgatgaatctggcggttattaacgagataaatgaacgtgcccagaatcctctgctctgtgccttccgatgtgtgaacacttatgggtcatatgaatgcaaatgtcccgtgggatatgtgctcagagaagaccgtaggatgtgcaaagctgtattcccatattgtcagaatgagagctcagatgttttatggcaatttgactccactagtcagatcttcctaaagggtactcctaaaaccacggtaaggagaggtggagagcacaacctgaagaaccccgatgagtgtgaagataatcccaatatctgtgatggtggtcagtgcgcgggtatccctggaagaaacaggtgcttgtgttatgatggattcatggcatctgaagacatgaagacttgtgtagatattgatgagtgctcccttccgaacatctgtgtctttggaacttgccacaacctccctggcctgttccgctgtgagtgtgagataggctacgaactggacagaagcggcgggaactgcacagaggaccccgaccactcaaaatcacggagtggaagatcacaaaacgattggggacggaggaggaaaacatataaaaacgttcagcagtttatcgatgaaggcaattatacatccggcgacaaccatacgctgagagaccctcactacgttgaagacaaaggccataaataccttgtattcgaagccaacacgggaacagaaaacggatgcggaggcgaagaatctttatttaacaaagcgtactacggcggcggcacgaacttcttccgtaaagaaagccagaagcttcagcagagcgctaaaaaacgcgatgctgagttagcgaacggcgccctcggtatcatagagttaaataatgattacacattgaaaaaagtaatgaagccgctgatcacttcaaacacggtaactgatgaaatcgagcgcgcgagtgttttcaaagtgaacggcaaatggtacttggtcactgattcacgcgggtcaaaagtgacgatcgatgggattaactcaaacgatatttacatgcttgggtatgtatcaaactctttaaccggaccttacaggccggttgacaaaacagggcttgggctggaaatgggtctggatcccaacgatgtgacattaacttactctcactttcgagtgccggaagccgaggcggcaatgtgggtgtcacacgcgacgtga

SEQ ID NO: 123109 - DNA, 1746 bp, Homo sapiens
  misc_feature (1)...(1746): n = a,t,c or g
atgacgacaagtacgatgacacatatgatgacgatgcactttcctatcatcgtctgtgctgacagtagagatgatgtcgatgtcactaatgatgtgaacgatcacgacgacagcgcgaaaagaaagtcacatagagagagaccaatcgcagccaagagaacggagacaaagaacgacgacgacgagcgcgaccgaaacgagcacaaaagcgcgttcatagagcgcgaaataacagacggcacaacatacgcgaacaacggcggcgattataatgcgcgacacacaagcgaggcgcgtataaaggccgacaaaacacgccgcagaacaacggcaaaataccacgggcaaacagaggcgctaaacaaagcgcgtaaaagcggcgaagaaggagggcgaataacgacggcgaaaaatggcgcgacgaacgacgccacaaacgcggcgataaacacgcgcgaaacgacgcataaatcggccgagacacggcgcgaaaaagcgcgcctaaaatggcgcctaaaaagcgcgccaaagaggcaccgcgtaaatagacgcgacgaaaacgcgcggacaacaacgcggcataagaaacggcgaaacaggcgcgtaaaacgagccgaaagaagcggagctgaacgaacgccgtacaaacagcggcaccaacagacgcgcgaaaagagaacgtgtaaacgacggcaaacaaaggtcgaacgaaggcgaaatagacgtgaagagaccacgaaaacgacggaacgagagcgtacaacaagacaccaaagaaagccgcgaaaagaacgcgtaacaatctacggatacataacgccacaaaaggcggcgacaataggggccagacgagacgcgcgtgaacaaagccgcgcaaataccgacccgacgaaaatcggtataacacaagctcgcctgaacgaacgccgagaaagcggcgcggaaaaagtgagcaagagacaagactgcacaaagggcgcaataagcggaccggtacaactccaggaagacacaacaacgactataaaagggacacacacacaccgagcggtaaagacaggcgaggatgcacacaagacacgctcaaaacctcgatactcaacactctacacgactctgcaatgcgtgatcgacgttcacgatcgacgctcttcgtctacgatgtgtcatcgatatgatcaactatattcgcggtctcacgctctcactatgatcatcgttaacaaanctcttcgacaatgtatacgtatgctgtctttccatgatcgtcatcgatcactagcgatcgacggtgactccgcctctacaggatcccctgccttccgatgtgtgaacacttatgggtcatatgaatgcaaatgtcccgtgggatatgtgctcagagaagaccgtaggatgtgcaaagacacgtgtacggaaaaggcgtttcctgctggtggttgcgaggtcgacaagacacatacggtgccacaagagcgggcgtacatccatcgtacaagattaggccgcgcgcgcacaaagaagagagacctataccggcgcgcacataacgaccgtcgacgacaaaagagcgccgcttactatgagagcaccagtgtacgacgcgcgcacaaatataatagcgggaagtccgacacccagaatggaagtcaccaccgtcaaaaattgcgtcagtatggggatgccggaaaaagtcattatctgcagtacaacatccattttatgtatcctttattcaatacatga

SEQ ID NO: 123110 - DNA, 1675 bp, Homo sapiens
ttttttttgagatgaagtctcactctgttgcccaggctggagtgcagtgcagtggtgtgatcttggctcactgcaacctccacctcctggagtcaagtgattctcctgcctcagccttcagagtagctgggatcatagatgcccgtccccatgcctggttaatttttgtatttttagtagagacagggtttcaccatgttggccaggctggtctcgaacttctgagctcaagtgatccacccaccttggcctcccaaagtgctgagattacagcatgagacaccatgcccagctgtgagcctgtatcttaatcaaagtcctgagaataaccttgaagaagactcccttgcaatgagcaacaacagaagaagcaagggacctggaatctggcaaaaccctgggtttgaaatcctggctctgtcaactttcctggttgaaagtgacttgaagtaatgaaacatgaaccctttcctgggtagcgttttacagcacaaagcaaatttgaggaataaatgaaagaagcacgtctaagtgcctaagcaatgcgctggacacagtgccggtgctcagccatcatgtcacaccagcactgaccggtgagcataaacccctggggatgcccagagctggtacagccaggagctccagaagcgtgggattctcagagggaagtggagctcactgctctacaggtcctattcaagttagaaagtaagatacaatgcacacaaagccaaattgtcatcattcagctcctattacaggggaactaagagctgcattgaaaattacttgcaaagcttgtaagtggttctgccacttattagccgtgtgaaccttagcaaattacctagcatctctgagtttcaacttcctcatctgcaaaatagaaatgataataatagctgcatcgcaagagttgttggaaaaataaaaatgaggtatcataggaggtaacatgtatggagcatttaccataggccaagcactgttctaagaacttcggacatgttatctcactggtataagtacttaggtgcctacaacataaacagcacctggtaaattaagtattgaaaaaaatgctatggggcagaggaaggaatgctaagcttctgtgagaagagaaggcagcttgttgcacaggtgaaaagaacaagctgcagttgagagaagaaaagtataagagttgctaggtgtgacgatctcaggacttttcaaccactacaaatttaaacagccaccctaaatcaccccaaaggacagactcgagttgttctttttgtctttaatgtttgcgcctctccgaatcagagaagaagctgccaggattcccagtacatacccaaaccatgatgacaataccctcgaactgtgcaaacttttgtgcatctaccgctatgtaaaggaagctgatgtcagtaagactgggggtgtaccagtaggccatgtttgtgaccgaagctcaatttgccatcacagtgtggccacacctacctcactaatattttaatagtgggataaataattcaatagggataaagcctggattttcctcttattctctcttagtgcttacattcttggcatgatatcgatgtgccatagacaagccaatatgtgagtgtactctatttgaataaagtatagcctttttacattgaaaaaaaaaaaa

SEQ ID NO: 123111 - DNA, 447 bp, Homo sapiens
  misc_feature (1)...(447): n = a,t,c or g
gttggggcattccgacgaggagaagatggcggcggcgggggaagcagcgtgagcagccggaggatcgcggagtcccaatgaaacgggcagccatggccctccacagcccgcaggacaagaatatcagagaattgagtttggtgtcgatgaagtcattgaacccagtgacactttgccgagaacccccagctacagtatttcaagcacactgaaccctcaggcccctgaatttattctcggttgtacagcttccaaaataacccctgatggtatcactaaagaagcaagctatggctccatcgactgccagtacccaggctatgccctctgtatggatggaagntctaatgtggaggcggaagttttggacaatgatggtgtctcaagtggtcttggacaagggagcgtaaaagaagaaaagcggcacctggatattacagtatttgg

SEQ ID NO: 123112 - DNA, 559 bp, Homo sapiens
ttaggtaaattaatgtttattcataaggatttttaatgttatttgttattctaaaacttgcaaaaattccatctgttataggagttattgaaatagtcatagatgggtgtatgtgcgggggagaagatggcggcggcgggggaggcagcgtgacagccggaggagcgccgagtcccattgaaaccggcagccatggccctccacagcccgcagtatatttttggagattttagccctgatgaattcaatcagttctttgtgactcctcgatcttcagttgagcttcctccatgcagtggaacagttctgtgtggcacacaagctggggataaactacctcctgctgacggcacgggctctgcatcaggcacccttcctgtcagccagcccaggtcctgggccagtctctttcacgattctaagccctcttcctcctggccggtggctaatgtggaaactaagtatttccctcccgccatatctccctggtttctgtaagcaggttgagttcaagaaggggttttccagtttaaggggtcctgtagcaggattggtggtt

SEQ ID NO: 123113 - DNA, 1491 bp, Homo sapiens
tcataaatttttctgtctgtgttttggctcgttttttcctcggcgtcgttgtgctttgtgtgtcgtgctgttggtttcgttgcgtctgtgcttgtgtgtgtgctctggccttcccgttctgctcgtgttgtgtggtggtgctgtgtcctgttggttgtcggtggtactctgttcgcggtgtctgctgtttgtcgtttgtgcgctcttctgtggcttcttgcttcggttcctcttctgtttgtgtgtgttccttgttcggttcggctcgttgtcggtgtggtgcttggctcttggtgccgtggtgtgctttccaccttgctctgttgtcgcgtcctgtggttgctgtgattgggtctggctttgctgtggcgctgtggtggctttggttgggcttctgtgttgtgtgctcgtgtgtgcttggtcctttcgctgtggttcgtggcttgtgtggtgtgtggtggtggttctggtggttcgttgctgtggtgttggtgtggttcgtgcgtagtggactgtgctggagtggttctggtctgttgtttcgttggtggtccttatgatgtcgttggtgggtgccgcgtgtattcctggtatggggtctgctgggtctgcagtgttgtgtgtcgtgtcattgatctcgtccctgttgtttgtgttgggtgtcacatagcgaggatgttggtctgtgtggtgtatgtcacttgttgtgggtggtctgtggtctggcggtgatgtagttggtgtcggtgtgttgtgcggcttgtgtgcctgtgtgctgtttgattcatattgcgcgtgtgtatgcttcgagtgtgcggtggggggttttgtcggtggttgcttccttgggagttgcctgatatgattgctggctgcgggctgtggagggccatggctgcccgtttcattgggactcgcgatcctccggctgctcacgctgcttcccccgccgccgccatcttctgcccgcacatacacactcgcatcggccgccgcgcctgcgcactggccgccgccgcggggcgcggggaggccggcccgctgctgcgcccaccgcagataaccctgtgaacatgtgatgctgttgttgcgtccatctatcgtaagaagttgcgcggtgtgagttactccatgtcgggtgcccgctgttgcgccaaaaccggtccatactcggaaacaggacgcgggcctaaatagtatagtgggaatccgcactgatacagaatttgatgcctcggtggttgttggacattgatgcgcgcttgtaacgggttgtggtgaagtatgtctccagacgttgaatctggattgtggtactgggcgccatacgagcacaccataaccgattgttgtgctaacaaaggtgatgcacgcctttcgcactggtggtgtaacgcgcccaaagccaaccaaggccatccattgaaccataattttaacccaccaggctcttggcgatagagcttggcggtcgtgaaaaattgcccccat

SEQ ID NO: 123114 - DNA, 2629 bp, Homo sapiens
ttacagcaggtccactcggcggtaatacaggaggtaggctgtgcgttcagcagttggtttcaccacctggtactggttgatcaccttgactgtctggtcatcgatgcgcagccagccattcagaccgatctggaagacgtctgtagtgtaatggccgcccgtcgcactgttgccgtgatggtagaccactgcaaagagccgataggttcggtggcatttaaaattcttatttttaacccctggagaaagcagttctttactaatttccaagtccacaggatattcaatatttttgataagcttctggcacccaccagtcttctcataaacgaatcgtttcaggtgcagcacgaggacaggagggagtttttccagagtcactcttcgacttatctcaacctcttgtttggtttttgtggtataaccttggacagattctcttgccaccaagctctccagtgcatcctggactgtgcgtatcttgtctgactggatatccaactgcaacgtgaaaaatggctgcaaagtggcagattcttttgaactctgctggtaaaccacagacctgatgtgtccaccaaaaatgccggtgattggagtctgaacaaaatccgcctggcgggtgacggaagtcttgttccgggggcccacttgttcccattcatcctcgcttccttcaccttgttcttcctgctcttcttcattgaccgagtggtttttggggccgttggaaatcgtaagtttttcattacttggtgagagaagcttctttaggttcaacatttcctcatgaagtccatttagaatgaagcctaagtattcctcagcatcttcttgtcgacccttttcagacaggcttgacttgttaactgtcaggagtctgtaaatatatgtgggctcaaaggcagctccagggcgaatatccctcacgattttatctccaagagcttgtcggggttttggaggtactggcatattagtgaactcattcattagccgaacaaagctgtctatcatgggtgttgacgtacaaggcctttgcactttggaatacagaggaatgaacttcatcaggtggtacatcggcgggcaagcaaccaatgcctgcagtgtagcattaatgtagcaccagttccctttattgatcagcccacggggttgcaacgacactggtttatggattagggttacattctccagcaactctgcaatctttatggctacaggatcctctgaaaccggaacaagcccttctttgacttcaacctgcttttcagaaaccaggggagatatggcgggaggggaatacttagtttccacataggccaccggcgaggaggaagagggcttagaatcatgaaagaggctggcccaggacttgggctggctgacaggaagggtgcctgatgcagagcccgtgccgtcagcaggaggtgatgcactctcgggtttggttgggtccaagtctatgctttccgtggtgtgcaactccaccccgttggtagctgtgccctcacccgaggattcaagtatttgtccattagcaactccaaggttttcagtagtatcggtaccaacgcagggctgagccccagctgtccttgacagggtgtctctgccagcctctgcagggaagcaggactgaccaaaatcagccccggggcccccctctggctgccctgcagtcctggtgtcactgccgagtgctccggggaaaggactgtcaggcacaatgtcactgacagagtctgtggagttctgggggctgttacaagtcctgggcgtaactgacgggggcatgtcacccataaattctgcatcctctgcactgacactgttcgggactgctgaattggcatggccattgaccagggcttctgtggagatactatcatcgccaccatctttcaaatagctgtaatatccaggtggccgctttttcttctttttacgctccctttgtccaagaccacctgagacaccatcattttccaaaacttccgcctccacattagaacttccatccaaagcgagggcagagcctgggtactggcagtcgatggagccatagcttgcttctttagtgaaacccacaaggggttattttggaagctgtacaaccgagaataaattcaggggcctgagggttcagtgtgcttgaaatactgtagctgggggttctcggcaaagtgtcactgggttcaatgacttcatcgacaccaaacctcaattctctgatattcttgtccatcaggtagtttatccacagcactgtgtgccacacagaactgttccactgcatggaggaagctcaactgaagatcgaggagtcacaaagaactgattgaattcatcagggccaaaatctccaaaaatatactgcgggctgtggagggccatggctgccggtttcaatgggactcggcgctcctccggctgctcacgctgcctcccccgccgccgccatcttctcccccgcacatacacccatctatgactatttcaataactcctataacagatggaatttttgcaagttttagaataacaaataacattaaaaatcgttatgaataaacattaatttacctaaaagaaaaaaaaagacaaagaaaaaaaagttttgccg

SEQ ID NO: 123115 - DNA, 747 bp, Homo sapiens
agctcttgaagcagtatttggcaaatatggacaaatagtggaagtacacttgatgaaagactgtgaaaccaacaaatcaagaggatttgcttttatcacctttgaaagaccagcagacgctaaggatgcagccagagacatgaatggaaagtcattagatggaaaagccatcaaggtggaacaagccaccaaaccgtcatttgaaagtggtagacgtggaccgcctccacctccaagaagtagaggccctccaagagttcttagaggtggaagaggaggaagtggaggaaccagggaacctccctcacggggaggacacatggatgactgggaagagatagttaccgaggtccacctcgaagggaatcgctgccctcttgtagagagctccacctacacgagggcgcccccatcttatggtggaagcagtcgctatgatgattacagcagctcacgtgacggatatggtggaagtcgagacagttactcaagcagtcgaagtgatctctactcaagtggtcgtgatcaggttggcagacaagaaagagggcttcccccttctatggaaagggggtaccctcctccacgtgattcctacagcagttcaagccgtggaacaccaagaggtggtggccgtggaggaagccgatctgatagagggggaggcagaagcagatactagaaacaaacaaaactttgtaccaaaatcccagttcaaagaaacaaaaagtggaaactattctatca

SEQ ID NO: 123116 - DNA, 513 bp, Homo sapiens
gttatggccagcaatggcagagtttaaaacctcccacccagttgagaaagtaaacttttaatacaagaattctgtaaattcagatttaaaatgttgtatatatacaatttatagtgttgccatattacctgaccattgaccctgcaggtaactcacgtagtgctccacctacacgagggcccccgccatcttatggtggaagcagtcgctatgatgattacagcagctcacgtgacggatatggttgaagtcgagacagttactcaagcagccgaagtgatctctactcaagttatgatagaatagtttccactcttttttttgtttctttgaactgggattttggtccaaagttttgtttgtttctagtatctgcttctgcctccccctctatcagatcggcttcctccagggccagcacctcttggtgctccgcggcttgaactgctgtaggaatcacgtgaagaagggtaccccctttctacagaagggggaagccctctttcttgtctg

SEQ ID NO: 123117 - DNA, 1582 bp, Homo sapiens
cggaaaaaaaaatggttgaagcagatcgcccaggaaagctcttcattggtgggcttaatacggaaacaaatgagaaagctcttgaagcagtatttggcaaatatggacgaatagtggaagtactcttgatgaaagaccgtgaaaccaacaaatcaagaggatttgcttttgtcacctttgaaagcccagcagacgctaaggatgcagccagagacatgaatggaaagtcattagatggaaaagccatcaaggtggaacaagccaccaaaccatcatttgaaagtggtagacgtggaccgcctccacctccaagaagtagaggccctttccaagaggtcttataggtggaagaggaagaagtggaggaaccaggggacctccctcacggggaggacacatggatgacggtggatattccatgaattttaacatgagttcttccaggggaccactcccagtaaaaagaggaccaccaccaagaagtgggggtcattctcctaagagatctgcacctcctaagagatctgcaccagttcacagcagcagtggaatgggaggaagagctcctctatcacgtggaagagatagttatggaggtccacctcgaagggaaccgctgccctcttcgtagagatgtttatttgtccccaagagatgatgggtattctactaaagacagctattcaagcagagattacccaagttctcgtgatactagagattatgcaccaccaccacgagattatacttacccgtgattatggtcattccagttcacgtgatgactatccatcaagaggatatagcgatagagatggatatggtccgtgatccgtgactattcagatcatccaagtggaggttcctacagagattcatatgagagttatggtaactcacgtagtgctccacttacacgagggcccccgccattcttatggtggaagcagtcgctatgatgattacagcagctcacgtgacggatatggtggaagtcgagacagttactcaagcagccgaagtgatctctactcaagtggtcgtgatcgggttggcagacaagaaagagggcttcccccttctatggaaagggggtaccctcctccacgtgattccctacagcagttcaagccgcggagcaccaagaggtggtggccgtggaggaagccgatctgatagagggggaggcagaagcagatactagaaacaaacaaaactttggaccaaaatcccagttcaaagaaacaaaaaaaagagtggaaactattctatcataactacccaaggactactaaaaggaaaaattgtgttaccttttataaattccctgttaagttcccctccataatttttatgttcttgtgaggaaaaaagtaaaacatgtttaattttatttgactttcgcattgcttttcaacaagcaaatgttaaatgtgttaagacttgtactagtgttgtaactttccaagtaaaagtatcccctaaaggccacttcctatctgatttttcccagcaaatgaggcaggcaattctaagatcttccacaaaacatctagccatctaaaatggagagatgaatcat

SEQ ID NO: 123118 - DNA, 631 bp, Homo sapiens
gagttcctccattgaagacttagcactggggagatgcatggaaattatgaatgtagaagcaggagattccagagataccattggaaaagaaacttttcatccctttgtgccagaacaccatttaattaaaggttatctacctagaacgttttggtactggaattacaactattatcctcctgtagagggtcctgggttgctgctctgatcttgcagtttcttttcactatgttgattctacaaccatgtatggagttaggaatacctcgtttatcatcttcgtccatatgggttatttatacaggatattcaacctaccttacctgaacgtatactaaaggaaattagtccaagcaaacaaaaatggaaggatacaaaagtgaagtttagggaaatccttgaaagaaaatcatgaatgaacaaaggtaatatgtcttagcactgcactgaaaaaggacttctgcatttctgacatagaacactggaatcccagtgaggaattctaagtgaacattccttatagaaacctttcacatgaatgactataaactgaagctttaaatgagctgtgaagtgtgttaaaatgtgttttgatacagtaatatataaatatatctatatatatgaggaa

SEQ ID NO: 123119 - DNA, 1424 bp, Homo sapiens
gatacactttcgggaaatggcctctaaatcctggctgaattttttaaccttcctctgtggatcagcaataggatttcttttatgttctcagctatttagtattttgttgggagaaaaggttgacacccagcctaatgttcttcataatgatcctcatgcaaggcattcagatgataatggacagaatcatctagaaggacaaatgaacttcaatgcagattctagccaacataaagatgagaacacagacattgctgaaaaggctcgaggagaaagttagaattctttgctgggttatgaccggccctcaaaaacctagagaaaaaggccaaacacgtcaaagctacttgggcccagcgttgtaacaaagtgttgtttatgagttcagaagaaaataaagacttccctgctgtgggactgaaaaccaaagaaggcagagatcaactatactggaaaacaattaaagcttttcagtatgttcatgaacattatttataagatgctgattggtttttgaaagcagatgatgacacgtatgtcatactagacaatttgaggtggcttctttcaaaatacgaccctgaagaacccatttactttgggagaagatttaagccttatgtaaagcagggctacatgagtggaggagcaggatatgtactaagcaaagaagccttgaaaagatttgttgatgcatttaaaacagacaagtgtacacatagttcctccattgaagacttagcactggggagatgcatggaaattatgaatgtagaagcaggagattccagagataccattggaaaaggaaactttttccatccctttgtggccagaaccaccattttaatttaaaaggttatctacctagaacgttttggtactggaattacaactattatcctcctgtagagggaggagagctcaggttccttttctctacagtgaccattagacattccaaagcactgtcacttggtgtagctcagtgctcttggttactgaagcaacaagtgatctctgatgacaaaacaaagagaccagactttcctgaccgttccagaataatgaaagaaagggtccagatagtactttatgagagcggccaagctccagtggaatcctctccacccttaccaggctactgctctgccctctttgctacctgtttccaggtcaccaaaggtaatttctctcaagatccaacccaagctattctatatacacaagctgataagattgaaggctggatgagagcctctggggaaagggttgctgaacagcaaagtggacagacagctatggatggtgggaagaaggaagcagaatggaaaagaactaggaaagccaagtacagagatgatgtgtgttccaagcaccacccaccttaccccacccctgtcccgcccagcttagaggactga

SEQ ID NO: 123120 - DNA, 479 bp, Homo sapiens
cgctggagtggcatcactcggcagcacatgcgcaaggctgtccccttccaggtggcccagaaagagatccttaagctcctgaagggcaaggtggtggtggggcacgcgctgcacaacgacttccaggcgctcaagtatgtccaccctcggagccagacccgggataccacgttccacaaacttggggtcatagattgtccagtcactggctccctccctgtcagcacagcacagaggaaggggctaactgaatcttttaccacttctggcctggctccagaactttgttctagattccttaaaagtcggtagctgatgtcaaactcaattgagcagtagctttgatcccttggtctgggggtcgaaggaagatggcgctgttatcagcggggaaatgtactatttaagatcagctttgttgtaaaaccatttgttctagaataaaactcaattggaaacgtgaaaaaaaaaaaaaaaaa

SEQ ID NO: 123121 - DNA, 1650 bp, Homo sapiens
atcactcggcagcacatgcgcaaggctgtccccttccaggtgcccagaaaagagatccttaagctcctgaagggcaaggtggtggtggggcacgcgctgcacaacgacttccaggcgctcaagtatgtccaccctcggagccagacccggggataccacctatgtcccaaacttcctcagcgagcccggcctccacacccgggcccgggtctctctaaaggacctggccctgcagctgctgcacaagaagatccaggtgggccagcacgggcactcatcagtagaagatgccacgacagccatggagctctaccggctggtggaggtgcagtgggaacagcaggaggcccgcagcctctggacctgccccgaggacagagaacctgacagcagcacagacatggaacagtacatggaggaccagtactggcccgatgacctggcccacggcagcagaggaggagccagggaggcacaggacagaaggaattgagaagggggcggggctccctggctgggcttccggtgtggccggtaggaagtgggggccaggaagacagcgggcactccttcctgggcagggtggggcaggatgcagtgagccagccccaaggccaagaggaagtgggggcatctgttaccttgacaccctctgcacacagcatagccctctctctctccagggctgtgggttctttctcctgactcctgtggttttgctaatggcactttacagactccatggagatgtcaggtggaccatcttctagggcccagcaggagtagggaatgtgccaacagactgcccaggttgccgtggccttccccaccccccagatctcctgagtcatcatgctgtgctaatgaaagggatcatatcatcctctctggggatggtgggtggggatgtcaatatcctggagctcccttaccccaactcaatgacttgggggtaaagttctcttccttttgttgcctacctcttcctccactcatttgggttcagaataaacatgccctgaagttaaagaggagttaagtcctaaaggaggcatttcttccccacctccctgacctggaactctggctacagccattgtaggaactccgtgcctggcctgtcagctccctgctaggctacagtggaatagcagagcccacaggcttctcgtggggagttggctccttaacatttcttggcaacagaaagccccaggcacagctcatggaggagggaaggcaggtaagctttggatgagaactggcatatttattttgacccaaatcagggatttccccagtccacccagtaatgggctcttaagcaaaagtctgagaaacaagacagtggtttgaattctggggcctttgtgtaggattgtgcctgacctttatttatttattaacagcagggccactcgtctagggcagtggagtctgcgtgtctcctggggctggggcagggcattggcagttatgcagtggccctgaacctggtctggtgcccccgaacctggtctgatgccccctcagctctgtgacaatcactgtggctgttgggttttctcctatttctaaaaatgttctcttctttcctaagtgacagttttgaagtattggataacccaatagctcaggtcacacgggacg

SEQ ID NO: 123122 - DNA, 402 bp, Homo sapiens
atgctggagcctggccggcagtgctggggagcgtgtggacctgaaaccaggcagccgcgtccaggccccactgcgctgcgcgtactatggccggggaagaacaggcggcttgtgtgcatgaagacaggacccagtgtcggggggacaaagctgccccgcaagctgcccatctctgtgggccgccgcgagggtctggctcggtcagcacggcccccagagctagataatgtcctgtctgctccagttgccctggccctggggccccggaagacaccccagaggaagtggatgtcggtgctgcctccgcacacaggagcccccggctctgctgcagccacctcacccaccgatggcccaaacactgagagaggaagtcggaagacgtgggtggaccccagctga

SEQ ID NO: 123123 - DNA, 2073 bp, Homo sapiens; identical to SEQ ID NO: 120766

SEQ ID NO: 123124 - DNA, 1956 bp, Homo sapiens
tcaggcttcactgaggggtgagaagcgcaggtttacaaagctctggctgggaagaaattgagtaaccactcctcgcgattcctgctcacagcacgtttcctgctcgaaaaccagaagagcctccacgtcccgactagctctgtccacacatccattgcgcagctgtatgaggtgaaatccgcactgtcccatgaagactgtgaggggagttgccacccgcacacggcccaggagcgccagcagcttggggaccaccacaggcctcagggtctcttcagtccgacgggtccagctgtcgataaaaccaggctgctctcgggttaatgaaaactcgtcaaattctccatgcagcagcagccagccgggcacatgctgtcctgccctgcccgactgtgtgcagggaagcaggtcccctgggccatgaccaccaggataggcgctgagcctcccggcagcaggattcacaacagccacggagtggaagcagagccagctgtccagtggaggatgaacacacagcggggaagacatgggccgtgcaaccgcggctgccacagagaaagcgcaggagcagtgcatgctgcgtgagaagctgggcaccaggcagaaagcagagtccgggagccgaggggcagactggcttgcagcacttctgttcagcaccacgcactgcctggcagccacgagcgagcagagccctgctggggtgagggcctggccgtgcgcagatcctatgtagccaccgtcccacagcccttcattcccaaagcccttcattcctgcagcacaggggcacagactcttggagcagctggggttgagcacgttgcggggagcgcaaggatcccatgctgccgtactggacttgagctcatccccattctcctcgtcggactctagagcgacaggcaaggatttctggggcggggagaaggtcaagtcccaacgcagcaaccggggctcggccccgcccagccgcaggctcgccagtttctgcacggcgggctccgcggaggaggccggcctgaagttctccttgttctgggccttggaccgcagtctctgcaccccgaagccccggtcctcggggcggtggtcgtcccccaagccccggcaggcgccgcccttgctgtagcgtcttttctgggggtgcgtctccatcctcagcaagggtttcatctccatccggtagttgctcagcttctcctcctgcagctccagcagcctggagcctccggggctgtggttgctggcccggtggtgggaagtccacgtgaacacggggggtgactccgtccgccgctcccgcggcttggggttcccgggctgcttgcggcccgaacctcgggtgcggaagtcatccacgagcaggccgccgcgcagggcaccgctgcggacacccctggagcccccggcctgctcctcgccccagctgctgcgggcgcagtccccggcccggccctccaggagcatctggatgtccccgccccgctcctcgtccaccgacacctgcctcgagaagtgggcgaccttgttcctggcggcgggcgcgggcggcggggtggccgcggggctggtggggaagctctgcagggggctgtcgtcgggggtcaggtcggagggagtggtgcccttgcggtacagctcggggctctcctgctgcaggggtgtcccggtggacagcacctcgatgtcgtcacaggaggtctgacgcttcggcctctggtactccagcccgttttcccggtgctggaaggaaggggagaactctttggcagtgatcctggcgatccgcgcctcctcctgggctttctgagctgctgtgagggctgcctcggcctttgcccgagagtgggaggtccaaggctccgcttccttctgggtccacaccgcttccttccgggcgcacaccgcttccttccgggcgcagcccctccacacgccgcagcccttcat

SEQ ID NO: 123125 - DNA, 2280 bp, Homo sapiens
atgacacggccagggcatacacgaacaaagagcgccgaaatcaaggcacaactgggagacaaccaagtgacggggcgcgccaagactcacatgaggactcgaaaacaaaagggcgaagggcacagaggcccacacgagggcatgcccgtagggcaagagtacagaacaagacaccacctggaccaacacgggaagaaacgaacaacaggggcccagaccaaagggagaacagacacaacgcaaaacagagagaaaaccaggaagagagcgacaggtgcaggtgttatcctcaccaccagggcgatggtgctaggatgtggggcctttgggaggactcccatctcgggcaaaggccgaggcagccctcacagcagctcagaaagcccaggggaggcgcggatcgccaggatcactgccaaagagttctccccttccttcagcaccgggaaaacgcacccgccccggggccacctcttggtgcctctgcccagcccatactacccagcactgctctcgcagcacccgccccagggcccgccctgtggtgcctctgccccgccttctgctctgctgcagagggcaccacctcccggaacacgcacactccacacgacctccaggaccaagggtgacctgcggaaccacaccctggctgccaaggcaaagtctcaaagcaatgctccgcgaggatcactattaaaaaagtctaatagcttctacaatatacctttaaaacaggtctcctgtttaattaccattagcaagcattcgaggaatgaggtgtctgtttatcagacatccagacccagggcagctgccacggatgtcccgcgtacgaccgagcctcagtgtgggatgcagctggagctgcacacgaggccattggccatcgtcctgctgtcctacagccccgagaggccaggggctttgagaacacagtcagggacccggatctcgcagcaaactcccgtggccgacagggccttgtggaggcctgaccccgtcatgctggagcctggccggcagtgctggggagcgtgtggacctaaaccaggcagccgcgtccaggccccactgcgctgcgcgtactatggccgggaagaccctctcaggagggtgtggctgcgtggatgtcggtgctgcctccgcacacaggagcccccggctccgctgcaccacctcacccaccgatggcccaaacaccgagagaggaagtcggaagactgggtggaccccagggcctccaggcttctggccttgcccacggcctcctacgagcaataccacaaccccactggggctcatggacagcgcacggcctggaaaagcaccggctcctttcacggacttccgcaccccttcggggctgctgctgcctggttgggccgtgagggcacggagagaggaggatggatgcgggtgagcgtcctcacaaagaagcgaggacgctggatgcccccacaccggcaaggatgctgaatgctcccacactggcgagaacgctggatggacgccctcacaccggcaaggatgctggacgccctcacactggtgaggacactggatggacgccctcacaccgagagacagacaaaaagaagtgtcaaagaagatgtggagaaactggaacccctgtatgctgctggtgggaaggaaggatgatgcagccccagtggaaacagtttggcagctccttaaaaggctgtgacaaaccctgtgcccacgctgcctccactgccgggagactcagggctgggggagacatgccctggtcaccactgcggagactcagggctgggggagacatgccctggccaccagtggtgagccagcgagacaggaccccacgcgcgctgacccggggacgccatggaactcactcgcgattcctgcacgcgcgctgacccggggacgccatggaactcactcgcgattcctgctcacagcacgtttcctgctcgaaaaccaggagagcctccacgtgccgactagctctgtccacacatccattgcgcagctctgcagcggaaggaccttcagtaaagacgctggtttgtaacgagagaagcgttccaaagtgtcacacgacattgtttattactaaaaggagcagaatttctttttaatcttgacagtgttgttttcgtaacagtatgatttaaactgttacattcatttaggaaaactttttttcatttcataagtaatcaagctatctttccagcttaaaagcaaagaaaaaaggctcagggtaactttttaaaccacttcatcaataag

SEQ ID NO: 123126 - DNA, 423 bp, Homo sapiens
  misc_feature (1)...(423): n = a,t,c or g
ggggccacgggtgctgtcctggagccgagagctgcnncnttcttggcgcgccctgcacacctccccggtctgcgccaagaaccgggcggcccgagtacgcgtaagcaagggggtaaccagttggagatctgtgccgtggtcctgaggcagttgtctccacacaagtactacttcctcgtgggctacagtgaaactttgctgtcctacttttacaaatgtcctgtgcgactccacctccaaactgtgccctcaaaggttgtgtataagtacctctagaacaatccccttttttccatcaagctgtagcctgcagagaatggaaacgtgggaaaggaatggtatgtgggggaaatgcatcccctcagaggactgaggcatagtctctcatctgctattgaataaagaccttctatcttgaaaaaa

SEQ ID NO: 123127 - DNA, 347 bp, Homo sapiens
gacctcgctgcgctcatgggtcgccgggcattcagatttgggagaagtagccccagaaataaaagcatcagagagacgaacagctgtggccattgcagatttggaatggagagaaatggaaggagatgattgcgagttccgttatggagatggtacaaatgaggctcaggacaatgattttccaacaggtgctgtcctggagccgagagctgccttgcgcttggccccccctgcacacctccccggtctgcgccaagaaccgggcggcccgagtacgcgtaacgagggggacaagccggtgacctacgaggaggcacacgcgccgcactacatcgcccaccgtaaag

SEQ ID NO: 123128 - DNA, 374 bp, Homo sapiens
gcggccgcgggaggaagcgaaggaggcgggagcggagacctcgctgcgctcatggcgtcgcccgggcattcagatttgggagaagtagccccagaaataaaagcatcagagagacgaacagctgtggccattgcagatttggaatggagagaaatggaaggagatgattgcgagttccgttatggagatggtacaaatgaggctcaggacaatgattttccaacagatcaggatactgggcccagagcttccaaacaacctgccaagggccacacactgggcagaagtgttttctttgtctttttcccattgccttttactaccatgctacttaaaaaataaaaagttattccatgtctggacaagaaaaaaaa

SEQ ID NO: 123129 - DNA, 883 bp, Homo sapiens
  misc_feature (1)...(883): n = a,t,c or g
ggaattcggcccatagacaagagacagctcctggatccacctggtgacctgagcagggctgcagcccagatggagaaacagggcgacggcttccgggcactggcaggcctggccttctgcgaccctgagaagcaacacatctggcacatcccaggcctgtggcacggagcacctcccatggccgcagggagcttggcctacagtgaagccatatttgaattgaagagatgcctactcgaaaacatcaggaacggcttgtcgaaccaaaacaaaaacatccagcacctcattgagctggatgagcgcggttgtgagtgtgaagagaaacccagttcaggtgtaggaggctgctgtgggaagccctgtctgatggggaacccgtgtggggctgtgctctggtgcctgagaatggctggtgcccaatcgacatgagaagacgagcaaaagacagagggtttggagtctcctcaaccagtgtttaaaagaggaagttgaccttcacagaccagcttcaggagatgttaccaagaatatcacagcccccagggtagggagacaagcagcagtttgttctgtctcagctcctgtcaaggatcctgcggggtgggccctctgtatagctgctctctgtcactggcccctggagtgggagcagcgtccttagtcactgcaggcccagncgggcaggtggtcccaggacaagaggtggggaagnttgncctgaaggaaggagaagtaggccttggttccccgccaaacccaangggctnccagggggncccagaattcaaggttgggggngtgcccctggggggtnaaagnaanccccnaaaggnanccgtttttttggctttnncnttnnnaagggttcccccnnancccc

SEQ ID NO: 123130 - DNA, 3719 bp, Homo sapiens
  misc_feature (1)...(3719): n = a,t,c or g
tttttttttttttttttcaagatagaaggtctttgttgaagagcagatgagagactgatgcctcactcctctgaggggaggcgttgtcgcccacataccattcctttcccacagtttccattctctgcaggctcaaggcttgatggaaaaaaaggggattgttctagaggtacttatacacaacctttgaagggcaacagtttggaggtggagtcgcaacaggaacatttgtaaaaagtaggacagcaaaagtttcactgtagccccacgaggaagtaagtaacttgtgtggagacaaactgcctcaaggaccacgggcacagatctcccaactgggttaccccggcggctttaaaaccagctgggtcaagccaggcagcctggggaagggtacccccacatgaactttgcgaaggaaaacatcctcccaccgtttcgctctgggggcatgggtcctctccatcccaggttacctgtgtgccagcgacagaccagcctttgacggtggggcgatgtgagtgcggcgcgtgtgcctcctcgtaggtcaccggcttgtcccccttgcatacgcgtactcgggccgcccggttcttggcgcagaccggggaggtgtgcagggcgcgccaagcgcaagagcagctctcggctccaggacagcacctccgactcgcagggacctgccgagtcgccccactcacccgtggccccagcaacccgctgcacacggaggccgccatcttgggccaagcggagcgcgggacgtaccacagcgcgcaagtccttggccaagcctctggttcgaatggtggcaagtgggctgtggatgaggtcgggggggatgtaagaggaggcgctggcactgacatggctgcccaggggtgagcccagaagccatgggagtagccgtctcaccagctcaatgagctgctggatgtttttgttttggttcgacaagccgttcctgatgttttcgagtaggcatctcttcaattcaaatatggcttcactgtaaggcaaagctcactgcggcccatgggaggtgctccgttccacaggccctgggatgtgcccagatgtgctgcttctcagggtcgcagaaggccaggcctgccagtgcccggaagccgtcgccctgtttctccatctgggctgcagccctgctcaggtcaccaggtggatccaggagctgtctcttgtctctgggcctagggccgggaacagatacatcatgaaggtgtctggtatacaaactggtagttgggcatgtgccccgttttttctaacctcagaaatgcatgcagaatagctgctggaatgtccttggtttcagctagactgatcacggtgacattgctcagtcccaggagcagagtggccaaggaagcctccagctcaaatctgtccccagctgacgtcaaggccccacctatcaagcccccggagtctatcaccaggatgtggtcacagcccaggtcctggctgaagccctcagccacctgtgatgagcttgcatgaagggccccctcgaggacctcaagttcttcccctgtggcaaacccgcagcccaaaccatggttgttgaggagtgtggacttgcccgtgccatggcacntcccgacggttgacagaaccaccagccttgaccgtctctccagtcggacgtgcagctccttcaggagccctgtgacccagcggacgggcatgttcaggcgtgctcccatcgattaggctccagaggcagccctgtcagcagcagctccgaggccaagcctgggaagtgggcaaaacgcctctggcctgccggcagcctccctgcctccacaagacagctctcagcctcataaaactgtcccatctcccgcaagaagtgttccacccctaggggctcaggccagagcggctcccccacgtctgtggtgcccccatgctttggtctcagggtgagaagcgtctccggaggctgtctcagtcgcggctgggccacccgtgccaggccccactccatccacctcaggaagtactgcttctcactcaaggaggggctgctgatccccgagatgaactcctgcacccccgaggagggatcatggccgttctgctgcattcgaagttctagcagccgccgcctcagctcagccctgtgcttctcaggggggtccacggcccactggagctggcagaactccttctccacttgggctgcctttctccaggggtccccctgcagcctcagctcgtcccttctgtaggcatccgagtctttgattttcctggtaatcctctccatccggtctttcgctttctgacactcctcacagtcctcgtcgacctttaggcccagtttgcgggctgcgtgcgccatgtcctccacagatacccgcctgcagggtgcccgcagcacattcccaacgatggcccggatcctcttcacgaagctgtcgctgtcagtgctgctgacctttaccaggacatgtgagtggtctattttcagcacaggaattaacttattcagaaatctcaggtttgtgttgcgcttcccacggtagggactcaggatgaagtagtattttgtggttgactccttcatggagtacagcaatttgtattccttcttactgatattgtcagtcaatataaacacagcggaggagatttctgtcaagagcttaaactgcagccagtgagacccgatgtcacctctcaggttcagaaaggccacaggttctgggaaaatgtccaagtcctcccttccgctgggaaaaaaccaggaaatttctaccaacccatccgaaatctcccgggcattggtgcccaagttgaggtcccgatgccagaagcagtcccactgcctgtggcccgggctgaggacggcgttgagaagctgggacttggagttgctactgacgtccatgcgcacgaaggcgaaggcgggcgccctggacaagaccacgctgtcttcccggaagctccccatgccccttgggggctgggaccaccatgtcctcacaatgccccgcatggcccacagcagaaatgtatggtagtggttctccgagtcaggcaacacgagtgggagtgcaaactggcagagggccattttcaacgctatttcttgttgcaggaaactgtctgaggagagcagcagggcacagagaaggtctaaggggttcactggcgtatcaggggtgggcagctcagaaaaggaataaatgtcggcagcaaggtcatcagctgggtcccagtagatgatctcctcttccatctggctctccttctccacaggcctggcgtctgggagcacgtccagcaccatagtggtattcctggcatcagcattgagggcctgcaacttcctgaggaaattccagggcaagtctttgggaacctgaggggcccagttcttcatactgtcaaaactgatctgcagagagtcctggaggctgagtttctggacctggtacgtctctaggcccaaaagtgacagcatttcttgaagcctgcttctctccactgttggaaaatcattgtcctgagcctcatttgtaccatctccataacggaactcgcaatcatctccttccatttctctccattccaaatctgcaatggccacagctgttcgtctctctgatgcttttatttctggggctacttctcccaaatctgaatgcccgggcgacgccatgagcgcagcgaggtctccgctcccgcctccttcg

SEQ ID NO: 123131 - DNA, 742 bp, Homo sapiens
  misc_feature (1)...(742): n = a,t,c or g
aagnagcantagattatgggaanaaaantctgggaaaacggaaaccggtaatccccctccggggttaaaccngccttgaacccaagngtccaggngaaagccctttatatggantatccggcatttatccaaccccgttngtcgggaaatgggattacancgtgtgagcccacaatgcccagcctgtaaatttttacacatttaaattcctgacaangtgagggatatgtataatgtatacatatataccaaagtgaggtaaatgtataatgacatttgcattatacagatacatgccaagggttccagtaaagtttggccagcttcccttagattgtattgcccagtggaatggccagaggccatttatttaaacctccgaccttacccctatagccggggagacccatggccagagtctcagtaggtggttgattgttgttactgatggctcttcctgagcatgtgaacccatggtcctcttctgcctcctagcactgctgctgcaggacttgttcctcgggtcttatcccagagttctggctgcatttgacattcaggtattcttcttgggcacttcagatagaatgtaaaacacaggttcttgagtactttatgcttaactcatggctttggctactcaataggttatgatcttggggtgaattatgccattttatcccacttcactcacctgtaaaacggggattaaatttttacctccaagagttctttatttaaa

SEQ ID NO: 123132 - DNA, 678 bp, Homo sapiens
ggcacgagagtgaatatgatactaatgaagatgggtttttcagggattgtggtccatcaggagtctgtgtgtgccacctatggaagtggcttaagcagcacgtgtattgtagacgttggggaccagaagacaagtgtatgctgtgtggaggatggggtgtctcatcggaatactcggctttgtctggcatacggaggatctgatgtgtcaagatgtttttactggctaatgcagcgagctgggttcccttacagagaatgccagttaacaaataaaatggattgtcttcttctgcaacaccttaaagaaactttttgtcatttagatcaaggacatctctgggcttcaggaccatgagtttcagattccgacatcctgattctcctgccctgctttaccagtttcgattaggagatgaaaaactgcaggctccaatggctttgttttaccccgcaactttttggatttgttggacaggaaaatgacgacctttgcacacagatctcagggcgatcctgaagatcctcacgatgaacattacctgctggccacacaaagctcacgagaacagtctgcagaagctactgctgaccgaaagtctgcatccaaacctattggatttgaaggggatcttcgtggccagtcctctgatcttccagaaagactccattcccaggg

SEQ ID NO: 123133 - DNA, 2226 bp, Homo sapiens
atggtcctcttctgcctcctagcactgctgctgcaggacttgttcctcgggtcttatcccagagttctggctgcatttgacattcagcccctgcgccgggcagccccacccccgccttttcggagccctctggggcgactccgcggcggccatcttgactgtgggcagccggccgtgcgcctgcgcggtggcccttccatcccggcagtcgtggctgcagcgctgaggcgagaggctgagatatggtgttacggagaacggaaaggagaagggcggcgagaaggagaaggagcagcgcggcgtgaagcggcccatcgtgcccgcgctggtgccggagtcgctgcaagagcaaatccagagcaacttcatcattgtcatacatccaggttcaacaactttaaggattggtcgagccacagacactcttcctgccagcattcctcacgtcattgcccgaagacacaaacaacaagggcagcccctatacaaggacagatggctcctaagggagggactaaataaaccagaaagtaatgaacaaagactaaatggccttataatggtggatcaagcaatatggtctaataagatgtccaatggtacaagacgcaatcctgtgtcccctgaacaggcacgctcctacaataagcagatgcgacctgcaattttagatcactgttcgggaaataagtggacaaatacatctcatcaccctgagtatttagtaggagaagaggccttgtatgttaatccactggactgttacaatattcactggcctatcagaagaggtcagttaaatattcacccaggccctgggggctctcttacagctgttctggcagatattgaagtaatatggtctcatgcgatacaaaaatacttggaaatcccactgaaagatttaaagtattatagatggatcttggtaattcctgatatctataataagcagcatgtgaaagaactagtgaatatgatactaatgaagatgggtttttcagggattgtggtccatcaggagtctgtgtgtgccacctatggaagtggcttaagcagcacgtgtattgtagacgttggggaccagaagacaagtgtatgctgtgtggaggatggggtgtctcatcggaatactcgcatcttttcctggagatcaggacatctctgggcttcaggaccatgagtttcagattcgacatcctgattctcctgccctgctttaccagtttcgattagaagatgaaaaactgcaggctccaatggctttgttttaccccgcaacttttggaatcgttggacagaaaatgacgactttgcagcacagatctcagggcgatcctgaggatcctcacgatgaacattacctgctggccacacagagcaaacaagaacagtctgcaaaagctactgctgaccgaaagtctgcatccaaacctatttgaatttgaaaggggattcttgtgggccagccctctgatcttccagaaagactccattcccaggaggtagatttggggtctgcacagggagatggcctgatggccggcaacgattccgaggaggcccctcactgcactgatgtccaggaagactgccatctcgctgtttgaaggaaaagccctgggcctgggataaagcccatcctccatagccatagactgctgttcatctgacgacaccaaaaagaagatgtacagctccatcctagtggtgggaggtggttttgatgttttcattaaagcttcaagaattttttgcagcacagaattctcaacaaaatgcccaccatcccttcaggccgattatttgaaaatgtggatgtgatcacaaggcctaaaggacatggacccccggctgattgcatggaaaggaggggcagtgttggcttgtttggatacaacacaggaactgtggatttatcagcgagagtggcagcgctttggtgtccgcatgttacgagagcgggctgcgtttgtgtggtgaatggggaggaaatgtcactgccgaagaccaaaaacattgcttcttggtataaaagactcttacagaatatgtgtattgtaatttattgatctggatgcttaagtgtcatggacagtaaatgaatttgaactttatgttgaggacatgacattggtttgaaaatataaactgcttttgagcagtttagtcatggcatttgagaataaataggaactttctcttcagttgtaaaaaaaaaaaaaa

SEQ ID NO: 123134 - DNA, 759 bp, Homo sapiens
atgagacggattgtggcactggtggaaacgggagagcagccctttggagcagccacagtgggaagcaggtttgggtgtttggaggatttggggactgatcaaagagaaagacatgaccatgagatggcagcagcacacacatattttattggtgatggtgacactctgacagaagacgaggatgaagacacttggggaatggccaaagggcaccatgccattaacattgaaggtttcaagttggccagggtggaagatgaaatgcagtttcaagaacgtgaacctgagaaggtgaaaatcagagggagaacaaggggctataccttcatcatgctggcggccctcgcagctgcggaagcagaggacatgcaggttggggaagaactctggctgaaaggtgagcctcaaagccagtcagctggggcagatggccctcatgctgcagtcagttactgtgcagatcggcatggtgtatggtctgccggcctgtggggctcaggtcaacctccaggacgacaagggctccatggtcctcattgtgccagcaagcacgggcacatggagatcatcaagctgctgctggcccagctgggctgcaacgtccacctgcaggacaatgatggcagcaccatgctctcgatcgccctggaagtggggcacaagggcatcactgttcttctgtatgcccacatcagctttgcaaaagctcagtctccgggcacccctaggcttggaatgaagccacagagtttcatttga

SEQ ID NO: 123135 - DNA, 5440 bp, Homo sapiens
caacatgaccccttctgaattgatggatgagatcatcagcatccgggtttataattctcactctctgcgggcagattgtctgatgggggaatttaagattgatgttggatttgtttatgatgaacctggccatgctgtcatgagaaagtggcttcttctcaatgacccggaagataccagttcaggttctaaaggttatatgaaagtcagcatgtttgtcctgggaaccggagatgagcctcctcctgagagacgagatcgtgataatgacagtgatgatgtggagagtaatttgttactccctgctggcattgccctccggtgggtgaccttcttgctgaaaatctaccgagctgaggacatcccccagatggatgatgccttctcacagacagtaaaggaaatatttggaggcaatgcagataagaaaaatctcgtggatccttttgtagaagtttcctttgctggaaaaaaggtttgtacaaacataattgagaaaaatgcaaacccagagtggaatcaggtcgtcaatcttcagatcaagtttccttcagtgtgtgaaaaaataaaactaacaatatatgactgggaccgtcttactaaaaatgatgtagttggaacaacatatctacacctctctaaaattgctgcctctggtggggaagtggaagatttctcatcttcgggaactggggctgcatcatatacagtaaacacaggagaaacagaggtaggctttgttccaacgtttggaccttgttacctgaatctttatggaagccccagagagtacacgggattcccagacccctatgatgagctgaatactggaaagggggaaggagttgcctacagaggcaggatcttggttgaattagccacttttcttgagaagacaccaccagataaaaagcttgagcccatttcaaatgatgacctgctggttgttgagaaataccagcgaaggcggaagtacagcctgtctgccgtgtttcattcagccaccatgttgcaagatgttggtgaggccattcagtttgaagtcagcattgggaactatggcaacaagtttgacaccacctgtaagcctttggcatcaacaactcagtacagccgtgctgtatttgatggcaactactattattacttgccttgggcccacaccaagccagttgttaccctgacttcatactgggaggatattagtcatcgcctggatgcggtgaacactctcctagctatggcagaacggctgcaaacaaatatagaagctctaaaatcagggatacaaggtaaaattcctgcaaaccagctggctgaattgtggctgaagctgatagatgaagttatagaagacacgagatacacgttgcctctcacagaaggaaaagccaacgtcacagttctcgatactcagatccgaaagctgcggtccaggtctctctcccaaatacatgaggcggctgtgaggatgaggtcggaagccacagatgtgaagtccacactggcagaaattgaggactggcttgataaattaatgcagctgactgaagagccacagaacagcatgcctgacatcatcatctggatgatccggggagagaagagactggcctatgcacgaattcccgcacatcaggtcttgtactccaccagtggtgagaatgcatctggaaaatactgtgggaaaacccaaaccatctttctgaagtatccacaggagaaaaacaacgggccaaaggtgcctgtggagttgcgagtgaacatctggctaggcttaagtgctgtggagaagaagtttaacagcttcgcagaaggaactttcaccgtctttgctgaaatgtatgaaaatcaagctctcatgtttggaaaatggggtacttctggattagtaggacgtcataagttttctgatgtcacaggaaaaataaaactcaagagggaattttttctgcctccaaaaggctgggaatgggaaggagagtggatagttgatcctgaaagaagcttgctgactgaggcagatgcaggtcacacggagttcactgatgaagtctatcagaacgagagccgctaccccgggggcgactggaagccggccgaggacacctacacggatgcgaacggcgataaagcagcatcacccagcgagttgacttgtcctccaggttgggaatgggaagatgatgcatggtcttatgacataaatcgagcggtggatgagaaaggctgggaatatggaatcaccattcctcctgatcataagcccaaatcctgggttgcagcagagaaaatgtaccacactcatagacggcgaaggctggtccgaaaacgcaagaaagatttaacacagactgcttcaagcaccgcaagggccatggaggaattgcaagaccaagagggctgggaatatgcttctctaattggctggaaatttcactggaaacaacgtagttcagataccttccgccgcagacgctggaggagaaaaatggctccttcagaaacacatggtgcagctgccatctttaaacttgaaggtgcccttggggcagacactaccgaagatggggatgagaagagcctggagaaacagaagcacagtgccaccactgtgttcggagcaaacacccccattgtttcctgcaattttgacagagtctacatctaccatctgcgctgctatgtctatcaagccagaaacctcttggctttagataaggatagcttttcagatccatatgctcatatctgtttcctccatcggagcaaaaccactgagatcatccattcaaccctgaatcccacgtgggaccaaacaattatattcgatgaagttgaaatctatggggaaccccaaacagttctacagaatccacccaaagttatcatggaactttttgacaatgaccaagtgggcaaagatgaatttttaggacgaagcattttctctcctgtggtgaaactgaactcagaaatggacatcacacccaaacttctctggcacccagtaatgaatggagacaaagcctgcggggatgttcttgtaactgcagagctgattctgaggggcaaggatggctccaaccttcccattcttccccctcaaagggcgccaaatctgtacatggtcccccaggggatcaggcctgtggtccagctcactgccattgagattctagcttggggcttaagaaatatgaaaaacttccagatggcttctatcacatcccccagtcttgttgtggagtgtggaggagaaagggtggaatcggtggtgatcaaaaaccttaagaagacacccaactttccaagttctgttctcttcatgaaagtgttcttgcccaaggaggaattgtacatgcccccactggtgatcaaggtcatcgaccacaggcagtttgggcggaagcctgtcgtcggccagtgcaccatcgagcgcctggaccgctttcgctgtgacccttatgcagggaaagaggacatcgtcccacagctcaaagcctcccttctgtctgccccaccatgccgggacatcgttatcgaaatggaagacaccaaaccattactggcttctaagctgacagaaaaggaggaagaaatcgtggactggtggagtaaattttatgcttcctcaggggaacatgaaaaatgcggacagtatattcagaaaggctattccaagctcaagatatataattgcgaactagaaaatgtagcagaatttgagggcctgacagacttctcagatacgttcaagttgtaccgaggcaagtcggatgaaaatgaagatccttctgtggttggagagtttaagggctcctttcggatctaccctctgccggatgaccccagcgtgccagcccctcccagacagtttcgggaattacctgacagcgtcccacaggaatgcacggttaggatttacattgttcgaggcttagagctccagccccaggacaacaatggcctgtgtgacccttacataaaaataacactgggcaaaaaagtcattgaagaccgagatcactacattcccaacactctcaacccagtctttggcaggatgtacgaactgagctgctacttacctcaagaaaaagacctgaaaatttctgtctatgattatgacacctttacccgggatgaaaaagtaggagaaacaattattgatctggaaaaccgattcctttcccgctttgggtcccactgcggcataccagaggagtactgtgtttctggagtcaatacctggcgagatcaactgagaccaacacagctgcttcaaaatgtcgccagattcaaaggcttcccacaacccatcctttccgaagatgggagtagaatcagatatggaggacgagactacagcttggatgaatttgaagccaacaaaatcctgcaccagcacctcggggcccctgaagagcggcttgctcttcacatcctcaggactcaggggctggtccctgagcacgtggaaacaaggactttgcacagcaccttccagcccaacatttcccagggaaaacttcagatgtgggtggatgttttccccaagagtttggggccaccaggccctcctttcaacatcacaccccggaaagccaagaaatactacctgcgtgtgatcatctggaacaccaaggacgttatcttggacgagaaaagcatcacaggagaggaaatgagtgacatctacgtcaaaggctggattcctggcaatgaagaaaacaaacagaaaacagatgtccattacagatctttggatggtgaagggaattttaactggcgatttgttttcccgtttgactaccttccagccgaacaactctgtatcgttgcgaaaaaagagcatttctggagtattgaccaaacggaatttcgaatcccacccaggctgatcattcagatatgggacaatgacaagttttctctggatgactacttgggtttcctagaacttgacttgcgtcacacgatcattcctgcaaaatcaccagagaaatgcaggttggacatgattccggacctcaaagccatgaacccccttaaagccaagacagcctccctctttgagcagaagtccatgaaaggatggtggccatgctacgcagagaaagatggcgcccgcgtaatggctgggaaagtggagatgacattggaaatcctcaacgagaaggaggccgacgagaggccagccgggaaggggcgggacgaacccaacatgaaccccaagctggacttaccaaatcgaccagaaacctccttcctctggttcaccaacccatgcaagaccatgaagttcatcgtgtggcgccgctttaagtgggtcatcatcggcttgctgttcctgcttatcctgctgctcttcgtggccgtgctcctctactctttgccgaactatttgtcaatgaagattgtaaagccaaatgtgtaa

SEQ ID NO: 123136 - DNA, 4845 bp, Homo sapiens
tgggctgtatttgatggcaactactattattacttgccttgggcccacaccaagccagttgttaccctgacttcatactgggaggatattagtcatcgcctggatgcggtgaacgctctcctagctatggcagaacggctgcaaacaaatatagaagctctaaaatcagggatacaaggtaaaattcctgcaaaccagctggctgaattgtggctgaagctgatagatgaagttatagaagacacgagatacacgttgcctctcacagaaggaaaagccaacgtcacagttctcgatactcagatccgaaagctgcggtccaggtctctctcccaaatacatgaggcggctgtgaggatgaggtcggaagccacagatgtgaagtccacactggcagaaattgaggactggcttgataaattaatgcagctgactgaagagccacagaacagcatgcctgacatcatcatctggatgatccggggagagaagagactggcctatgcacgaattcccgcacatcaggtcttgtactccaccagtggtgagaatgcatctggaaaatactgtgggaaaacccaaaccatctttctgaagtatccacaggagaaaaacaacgggccaaaggtgcctgtggagttgcgagtgaacatctggctaggcttaagtgctgtggagaagaagtttaacagcttcgcagaaggaactttcaccgtctttgctgaaatgtatgaaaatcaagctctcatgtttggaaaatggggtacttctggattagtaggacgtcataagttttctgatgtcacaggaaaaataaaactcaagagggaattttttctgcctccaaaaggctgggaatgggaaggagagtggatagttgatcctgaaagaagcttgctgactgaggcagatgcaggtcacacggagttcactgatgaagtctatcagaacgagagccgctaccccgggggcgactggaagccggccgaggacacctacacggatgcgaacggcgataaagcagcatcacccagcgagttgacttgtcctccaggttgggaatgggaagatgatgcatggtcttatgacataaatcgagcggtggatgagaaaggctgggaatatggaatcaccattcctcctgatcataagcccaaatcctgggttgcagcagagaaaatgtaccacactcatagacggcgaaggctggtccgaaaacgcaagaaagatttaacacagactgcttcaagcaccgcaagggccatggaggaattgcaagaccaagagggctgggaatatgcttctctaattggctggaaatttcactggaaacaacgtagttcagataccttccgccgcagacgctggaggagaaaaatggctccttcagaaacacatggtgcagctgccatctttaaacttgaaggtgcccttggggcagacactaccgaagatggggatgagaagagcctggagaaacagaagcacagtgccaccactgtgttcggagcaaacacccccattgtttcctgcaattttgacagagactacatctaccatctgcgctgctatgtctatcaagccagaaacctcttggctttagataaggatagcttttcagatccatttgctcatatctgtttcctccatcggagcaaaaccactgagatcatccattcaaccctgaatcccacgtgggaccaaacaattatattcgatgaagttgaaatctatggggaaccccaaacagttctacagaatccacccaaagttatcatggaactttttgacaatgaccaagtgggcaaagatgaatttttaggacgaagcattttctctcctgtggtgaaactgaactcagaaatggacatcacacccaaacttctctggcacccagtaatgaatggagacaaagcctgcggggatgttcttgtaactgcagagctgattctgaggggcaaggatggctccaaccttcccattcttccccctcaaagggcgccaaatctatacatggtcccccaggggatcaggcctgtggtccagctcactgccattgagattctagcttggggcttaagaaatatgaaaaacttccagatggcttctatcacatcccccagtcttgttgtggagtgtggaggagaaagggtggaatcggtggtgatcaaaaaccttaagaagacacccaactttccaagttctgttctcttcatgaaagtgttcttgcccaaggaggaattgtacatgcccccactggtgatcaaggtcatcgaccacaggcagtttgggcggaagcctgtcgtaggccagtgcaccatcgagcgcctggatcgctttcgctgtgacccttatgcagggaaagaggacatcgtcccacagctcaaagcctcccttctgtctgccccaccatgccgggacatcgttatcgaaatggaagacaccaaaccattactggcttctaagtgcttaagcagtatgtcaacagcactcagcaaaatggcttctccagcgacagtgcatctgacagaaaaggaggaagaaatcgtggactggtggagtaaattttatgcttcctcaggggaacacgaaaaatgcggacagtatattcagaaaggctattccaagctcaagatatataattgtgaactagaaaatgtagcagaatttgagggcctgacagacttctcagatacgttcaagttgtaccgaggcaagtcggatgaaaatgaagatccttctgtggttggagagtttaagggctcctttcggatctaccctctgccggatgaccccagcgtgccagcccctcccagacagtttcggggattacctgacagcgtcccacaggaatgcacggttaggatttacattgttcgaggcttagagctccagccccaggacaacaatggcctgcgtgacccttacataaaaataacactgggcaaaaaagtcattgaagaccgagatcactacattcccaacactctcaacccagtctttggcaggatgtacgaactgagctgctacttacctcaagaaaaagacctgaaaatttctgtctatgattatgacacctttacccgggatgaaaaagtaggagaaacaattattgatctggaaaaccgattcctttcccgctttgggtcccactgcggcataccagaggagtactgtgtttctggagtcaatacctggcgagatcaactgagaccaacacagctgcttcaaaatgtcgccagattcaaaggcttcccacaacccatcctttccgaagatgggagtagaatcagatatggaggacgagactacagcttggatgaatttgaagccaacaaaatcctgcaccagcacctcggggcccctgaagagcggcttgctcttcacatcctcaggactcaggggctggtccctgagcacgtggaaacaaggactttgcacagcaccttccagcccaacatttcccagatactacctgcgtgtgatcatctggaacaccaaggacgttatcttggacgagaaaagcatcacaggagaggaaatgagtgacatctacgtcaaaggctggattcctggcaatgaagaaaacaaacagaaaacagatgtccgttacagatctttggatggtgaagggaattttaactggcgatttgttttcccgtttgactaccttccagccgaacaactctgtatcgttgcgaaaaaagagcatttctggagtattgaccaaacggaatttcgaatcccacccaggctgatcattcagatatgggacaatgacaagttttctctggatgactacttgggtttcctagaacttgacttgcgtcacacgatcattcctgcaaaatcaccagagaaatgcagattggacatgattccggacctcaaagccatgaacccccttaaagccaagacagcctccctctttgagcagaagtccatgaaaggatggtggccatgctacgcagagaaagatggcgcccgcgtaatggctgggaaagtggagatgacattggaaatcctcaacgagaaggaggccgacgagaggccagccgggaaggggcgggacgaacccaacatgaaccccaagctggacttaccaaatcgaccagaaacctccttcctctggttcaccaacccatgcaagaccatgaagttcatcgtgtggcgccgctttaagtgggtcatcatcggcttgctgttcctgcttatcctgctgctcttcgtggccgtgctcctctactctttgccgaactatttgtcaatgaagattgtaaagccaaatgtgtaacaaaggcaaaggcttcatttcaagagtcatccagcaatgagagaatcctgcctctgtagaccaacatccagtgtgattttgtgtctgagaccacaccccagtagcaggttacgccatgtcaccgagccccattgattcccagagggtcttagtcctggaaagtcaggccaacaagcaacgtttgcatcatgttatctcttaagtattaaaagttttattttctaaagtttaaatcatgtttttcaaaatatttttcaaggtggctggttccatttaaaaatcatctttttatatgtgtcttcggttctagacttcagcttttggaaattgctaaatagaattcaaaaatctctgcatcctgaggtgatatacttcatatttgtaatcaactgaaagagctgtgcattataaaatcagttagaatagttagaacaattcttatttatgcccacaaccattgctatattttgtatggatgtcataaaagtctatttaacctctgtaatgaaactaaataaaaatgtttcacctttaaaaaaaaaaaaaaaaaa

SEQ ID NO: 123137 - DNA, 339 bp, Homo sapiens
atggctgtgcttcctcttccatccaatcctcatgaccagccacagaacagcatgcctgacatcatcatctggatgatccggggagagaagagactggcctatgcacgaattcccgcacatcaggtcttgtactccaccagtggtttcctagaacttgacttgcgtcacacgatcattcctgcaaaatcaccagagaaatgcaggttggacatgattccggacctcaaagccatgaacccccttaaagccaagacagcctccctctttgagcagaagtccatgaaaggatggtggccatgctacgcagagaaagatggcgcccgcgtaatggctgtatga

SEQ ID NO: 123138 - DNA, 2305 bp, Homo sapiens
caagttgtaccgaggcaagtcggatgaaaatgaagatccttctgtggttggagagtttaagggctcctttcggatctaccctctgccggatgaccccagcgtgccagcccctcccagacagtttcgggaattacctgacagcgtcccacaggaatgcacggttaggatttacattgttcgaggcttagagctccagccccaggacaacaatggcctgtgtgacccttacataaaaataacactgggcaaaaaagtcattgaaagaccgagatcactacattcccaacactctcaacccagtctttggcaggatgtacgaactgagctgctacttacctcaagaaaaagacctgaaaatttctgtctatgattatgacacctttacccgggatgaaaaagtaggagaaacaattattgatctggaaaaccgattcctttcccgctttgggtcccactgcggcataccagaggagtactgtgtttctggagtcaatacctggcgagattcactgaggaccaacacaagctgcttcaaaatgtcgccagattcaaaggcttcccacaacccatcctttccgaagatgggagtagaatcagatatggaggacgagactacagcttggatgaatttgaagccaacaaaatcctgcaccagcacctcggggcccctgaagagcggcttgctcttcacatcctcaggactcaggggctggtccctgaggcacgtgggaaacaaggactttgcacagcaccttccagcccaacatttcccaggggaaaactttcagatgtggggtgggatgtttttccccaagagtttgggggccaccaggccctcctttcaaacatcacaccccggaaagccaagaaatactacctgcgtgtgatcatctggaacaccaaggatgttatcttggatgagaaaagcatcacaggagaggaaatgagtgacatctacgtcaaaggcttggattcctggcaatgaagaaaacaaacagaaaacagatgtccattacagatctttggatggtgaagggaattttaactggcgatttgttttcccgtttgactaccttccagccgaacaactctgtatcgttgcgaaaaaagagcatttctggagtattgaccaaacggaatttcgaatcccacccagggctgatcattcagatatggggacaatgacaagttttcctctggatgactacttgggttttcctagaactttgacttgccgtcacacgattcatttcctgcaaaaatcaccaggaggaaattgcagggtttggacatgatttccgggaccttcaaaggccatgaacccccttaaagccaagacagcctccctctttgagcagaagtccatgaaaggatggtggccatgctacgcagagaaagatggcgcccgcgtaatggctgggaaagtggagatgacattggaaatcctcaacgagaaggaggccgacgagaggccagccgggaaggggcgggacgaacccaacatgaaccccaagctggacttaccaaatcgaccagaaacctccttcctctggttcaccaacccattgcaagaccatgaaagttcatcgtgtggcgccgctttaagtgggtcatcatcggctttgctgttcctgcttatcctgctgctcttcgtgggccgtgctcctcttactcttttgccgaactattttgttcaatggaagattgtaaagccaaatgtgttaacaaagggcaaaggcttcatttcaagagtcatccagcaatgagagaatcctgcctctgtagaccaacatccagtgtgattttgtgtctgagaccacaccccagtagccaggttacgcccatgtcaccgagccccattgatttcccagagggtcttaggtccctgggaaaagtcagggccaacaaggcaacgtttggcattcatgtttatctctttaaggtatttaaaagttttatttttctaaagtttaaatcatggtttttccaaaatatttttccaaggtggctgggtccccatttaaaaatcatcctttttatatgtgtccttcggttcctagacttcagcttttggaaattgctaaatagaattcaaaaatctctgcatcctgaggtgatatacttcgatatttgtaatcgaactgaaagagctgtgcattataaaatcagttagaatagttagaacaattcttatttatgcccacaaccaatgctatattttgtatggatgtcataaaagtcatatttaacctctgtaatgaaactaaataaaaatgtttcccctttaaaaaaaaaaaaaaaaaaa

SEQ ID NO: 123139 - DNA, 407 bp, Homo sapiens
gaatgcagtggagacgcaatataagctcatggccgagcagaaccggaaggatgctgaagcctggttcaccagccggactgaagaattgaaccgggaggtcgctggccacacggagcagctccagatgagcaggtccgaggttactgacctgcggcgcacccttcagggtcttgagattgagctgcagtcacagctgagcatgaaagctgccttggaagacacactggcagaaacggaggcgcgctttggagcccagctggcgcatatccaggcgctgatcagcggtattgaagcccagctgggcgatgtgcgagctgatagtgagcggcagaatcaggagtaccagcggctcatggacatcaagtcgcggctggagcaggagattgccacctaccgcagcctgctcg

SEQ ID NO: 123140 - DNA, 762 bp, Homo sapiens
atgatggtccctgatcagccaggccctcccatgactacagccactactacgggaccatcgagtacctgtgctacaagattcttggtgacatcattgagaattccaggattgtcctgcagatcaacaatgcctgtctggctgcagatgacttctgaactaagtatgagagggagcagactctgctcgaccgacctggagatgcagaccgaagggctgaaggaagagctggcctacctgaagaagaaccatgagggggaaattaatgccctgaggggccaggtgggaggccagatcagtgtggaagtggattcggctctgggcgctgatgccaccaatatcctgagtgacatgcagagccaatatgagaaccgaaaggatgctgaacgctggttcaccagctgcactgaggaactgaactgggaagttgttggccacatggagcagctccagatgaacaggtcccaggtcaccgacctgcggtgcaacctccagggtcttgagattgagctgcagtggcagcttagcatgaaagccgccttggaagcacgctttggaccacagctggcgcagatccaggcgctgatcagcagtattgaagctcagctgggcgatgtgcgagctgacagtgagaggcagaatcaggagtaccagctgctcatggacatcaagttgtggctggagcaggagctcgccacctacctcagcctgctcgagggccaggaagagcactacaatagcctgtccacctccaagatcctctaa

SEQ ID NO: 123141 - DNA, 2723 bp, Homo sapiens
cagctggtccctgggacaggatgggggccatggggtcactggtagggggagacctggggttggtgtgggggtgtgctggggaggggtttgctgggatccctttctcgccatgtgctctcactcaatgcgaagggaaccaaggtaccagggccaagtgggtccagacatccacacggattctgaaagggcaggtcaagcaggcacgtggggcccaggttaccccttattccccgctgtggcatgggaagctgggaagggctgctcctaccttcaatgccccaggtcggtggctgcttcccctcctgctgcctcctcccctgctctgaatcaccacctgcttgctcgggaagaggaccctgcaggaggccctgagcctgaaacttcaggagctccgcaaagtgtgtctccaggaggcggtgagggcctggccctaggggtatcaggcggggaggttgggaggaggtgaggagctggggcccctaggtaggccccccacagcccgcgcctaccctccaccgcaccccaaccaagcacaccactccttgtgccctgctgaggtgagcagatgggtgtggagagcaagagggtgggaagaggggacaggtacagaggagtagccaggaggaatggccttggcccctgatctgagcaccgagcagcgccggcgccggcgccaggtccaggcagatgcactgaggaggctgcatgagctagaggagcagctcagggatgtccgggcccgccttggcctcccagtgctcccgctgccccagccactgccactgtccacggggtcagtgatcaccacccagggagtctgcctgggcatgcgtcttgctcagctcagccaaggtgagcatcccctggtgagggtgggagagtggacactggcaaatggacgtggtagggctgggatgggtgactcctatcccccaaacctgcccccgactcctacgtccctttagcccatcccctttattcatccagtatctggggggagccctgagcggcgaaccccatggaaaccacctccatcagatctttatggggatctgaagagccggcggaactctgtggccagccccaccaggtgagaatgagcccctcctcccctccgcaggagctgggaatgggatagcaagcctgggctggcagagggtcctgcctccgatcgcgcctccctcttcgtagctcgcacccgccgcagcaacagttctgaggccctgctggtggaccgggccgctggtgggggagctggctccccgcctgcccctctggctccctctgcctctggccccccagtctgcaagagcagtgaggtgctgtatgagcgcccccaaccaacccctgccttctcctcccgcacagcaggccccccagaccctccccgggccgcccggcctagctcagctgcccctgcctcccgaggtgccccccggctcccacctgtgtgtggagacttcctcttggactattccttggaccggggcctgccccgcagtggcggtggaacaggctggggggagctgccgcctgcagctgaggtcccaggacccctctcccgccgggatgggctcctcaccatgctccccggcccaccacctgtgtatgcagctgacagcaacagccccctcctccgcaccaaggacccccacacccgtgccacccgcactaagccctgtggcctgcccccagaggctgccgaaggccctgaggtgcatccaaaccctctgctgtggatgcccccacccacccgtatcccctcggctggtgaacgcagtggccacaagaacctggctctggaggggctgcgggactggtacatccggaactcgggactggctgcggggccccagcgccggcctgtgctcccttccgtgggcccgccacacccacccttcctccatgcccgctgctatgaggtgggccaggcgctgtacggggcccccagccaggcgccactcccacactcgaggagtttcacggcgccccctgtctctggcaggtatggggggtgcttttactgatgggtaggggtctcgtaaggcagatggcgaagatatccaggccagggagtggctagtcatgatagctaatgaattggaccatgaggaaactagctgctgtgatggcacagggtcactctactgcacatgacctgcattagtccatggggtcctggtggaggggatcttgggcactggtagcagcaattctttatcaagttataggctgaagatgagccttgaagccagggtgccgggaggaagggacatctcatgccccttgctgttttcttccttttttctccatgccccagagcctgaaagtgctgtcctgtgcctgcctccacctctttaacgagcctcttttcctttctttttctgtgtcttgtctgtcttttcttcttcttgtcttccccgccctgtcctccggattcctgctaccccttctaaagatactacgcggacttcctgtatcccccggagctgagcgctcgtttaagtgacctgacgctagagggggagcagtcctccagttctgacacccagaccccggggacactggtctgaccccagttggtccgcggcggccccccacagcccgcgcctaccctccaccgcaccccaaccaagcacaccactccttgtgccctgctgaggagctggctcttgaggccctggaacgcgaggtgtcagtgcaacagcagatcgcggcggccc

SEQ ID NO: 123142 - DNA, 427 bp, Homo sapiens
  misc_feature (1)...(427): n = a,t,c or g
aaaggagagggaagctggaagcacctttggcccgggacagaaatctggagagcttggctacctccatcctccagcctcactctcagtcttcccgggagttcgtgggatttggaccttagattattagtattattttgagggcctcctgtgtgtaagcactggttgtgcgcagatggctgtgcagagggccatgaggtagaggctggggaaatgagggcttggaggtgcttgaggtatggtctttacctacgtgaaatgttggaggttgagatgaaaactcttgctttgaattcttcatggaggactacatcatttcaatcctgaatctggctcaattctattattcacttattactggattaaaaacgtttaattnnnnnnnnnnnnnnnnnnnnnnnnnnnnnnnnnnnnnnnnnnnnnnnnnnnn

SEQ ID NO: 123143 - DNA, 1443 bp, Homo sapiens
catggttaattaaacatttttatttatttattttttttttactgagacagagtctcactctgatgccaaggcttgagtgcagtggtgtgatctcggctcactgcaacctccacctcctgggttcaaacaattctgccacctcagcctcctaagtagctgtgattacaggtgcgtgccaccacgcctggctaatttttgtatttttagtagaggcggggttttgccatgttggccacggctggtgtcgaactcctgacctcaagtgatccgcctgccttggcctcccaaagtgctgggattacaggcgtgaaccactgtgcctggccaattaaacgtttttaatacagtaataagtgaataatagaattggagccagattccaggattgaaatgatgtagtcctccatgaagcaattcaaagcaagagttttcaatttcaacctccaacatttcacggtaggtaaagaccatacctcaagcaccttccaagccatcatttgccccagcctctacctcatggcccttctgcacagccatctgcgcacaaccagtgcttacacacaggaggccctcaaaataatactaataatctaaggtccaaatcccacgaactcccgggaagactgagagtgaggctggagccaaggcttgaaccaaacacccaggaaggaatctgcagcccgcttttctaagtcgtaaaacttcctacgacctggactctctcaggaagcctgctccggcctgaggaggatggaggtagccaagctctccagatttctgtcccgggccaaaggtgcttccagcttccctctcctttgcttctccgcccggctcaggtcttacagcctagcgcggctctcgccgaacaaccaatcccacggcggccatcgggtcacgtgggcgcccctgaggcggggctggtgggaggagcagccaatcgaaggccgaggccaacgtcaggggtggagcaaaagggatggcggacgcatcttttccgtcacttctttgcgtcgcggtctctatcctgagagaccagtcgctttccaagttctgagcaattctcccccgccccctccacaattcctcgccgtcggccgtcggggtggtcaagattctagcgatatgctcctccattacggagcagggaagaggttgtctcttaccctcaagttacccgagagacgacgttcgcccatcaatgagcaaacctttgagggaatcccttttccctttggcttgctggacacgtctcagcctctcagtgaacgacgccgagcggggaagaaagacggttccccccacggcctccaggctctatcagccacacccctggcctctggtccccctaaaccctcaattccgaaacacatcttcccctcctgcccccaactacctgctgccacacccgaggattccctcaccgcaccacaggcatcatggtag

SEQ ID NO: 123144 - DNA, 436 bp, Homo sapiens
gaacagacaacatggctgcgacgaaatcttgaagttatttcttctcccaaaataatggtagatggaaccaatttggaatctgatgttgaagatatgttatcacctgcaatggaaaccgcaaacataactccttctgtatatagtgtccatgcattgacattactctctgaggttttggctcatcttttggatatgggtttctatagtgatgaaaaggagcgggttattcctttacttgtaaatattatgcattatgttgtgccctacctcagaaatcacagttggagagcaattatggacaatctgatgacacatgataaaacaacatttatagatttgatgactcgtgtagcagtggctcaaagcagttcacttaatctctttgcaaaccgtgatgtggagctagaacagagagctatgcttcttataagattag

SEQ ID NO: 123145 - DNA, 410 bp, Homo sapiens
ctcgtgtagcagtggctcaaagcagttcacttaatctctttgcaaaccgtgatgtggagctagaacagagagctatgcttcttaaaagattagcatttgctatttttagcagtgaaattgaccagtaccagaaatatcttccagatatacaagtaagaccaaatgtccataccgaggtttgcagcggtagaaaggaaggtgtttatttgcagggctccaagcaaagaggttcaggcagctggtgtttaaatcctgaccccactcctctccatggcttgcaggagcttagtgtgggtgcaactatagacagcctttctggaacatatcagggtgaccgcatacctacaggaggagcatcctccaggttcaggcttgcacgagaaatagagtcacaattgctctctacttga

SEQ ID NO: 123146 - DNA, 6692 bp, Homo sapiens
atggttaacacctacagagaggttaaggaaggacctgtaattctagaagatgtcctgattgaagtgtttagaacattatattctcaatgcaaagcagagttggatcttcaaactgaaccacccttcagcaaggatcatgctcagttaagcagtaaattaagagaaaataagaaaacagcagagctgattaaaactgctaaccttctctttaattccttcgaaccttattatatgtgggattatgttgcacgctggtttgaagaatgttgtaggaggacactgcatgtgagacttcagattggacctggagatagtaatgactcatctgaattacagctgaccaatttctgcttactggtggattttttgttggacatagtttctttggagacttacattgaaatccagacagaacacttgccccagttgctgctcagaatgatttctgccttgacaagccatctccagacattgcacttatctgaactcacagattctctcagactctgctcaaagatccttagcaaggttcagcctccactgttatctgctagcactggaggtgttttgcagtttccaagtgggcagaacaattcagtcaaagagtgggaagacaaaaaggtatcatcagtttctcatgaaaatcctactgaagtgtttgaagatggagaaaatccaccaagtagtcgatcatcagagagtggattcactgagtttatacaatatcaagcagaccgaactgatgatattgacagagaactgagtgagggccagggggcagctgccatcccaattggtagcacatcctctgagacagaaacagcatccactgtgggatctgaagaaaccatcatccagaccccttccgtagtcactcaggggacagcaacccgaagtaggaagacagcccaaaagactgcaatgcagtgctgcttggagtatgtccaacagtttcttaccagacttatcaacctctacatcattcagaataactctttttctcagtctttggctacagaacatcaaggggatcttggtcgagaacaaggagagacttcaaaatgggacagaaattcacaaggagatgtaaaagagaaaaacataagtaaacaaaaaacttctaaagaatacctgtctgccttccttgctgcctgtcagctcttcctagagtgctcaagtttcccagtttacattgctgaggggaaccatacatcagagttacgttctgaaaaattggagactgactgtgagcatgtgcagcctccacagtggctccagactctgatgaatgcttgcagccaagcaagtgatttcagtgttcagagtgttgctatttcactagttatggacctggtgggactgacacagtctgtggccatggtcactggggaaaacatcaacagtgtagagcctgcacaacccttaagtccaaaccagggaagagtagctgtggttattagacctcccctcactcagggcaatctgaggtacatagctgagaagactgaatttttcaagcatgtagctttaacattgtgggaccagttgggagatgggacacctcagcatcaccagaagagtgtggaactattttatcaattacataacttagttccttcttctagcatctgtgaggatgttataagtcagcagttaacccataaagataagaaaataaggatggaagcacatgccaagtttgcagttctttggcatctaacgagagatctccatataaataaatcttcatcttttgtacgttcttttgacaggtcactgttcatcatgttagatagccttaacagtctcgatggttctactagctctgtgggacaagcctggctgaaccaagtcctacaaagacatgatattgcacgagttttggaaccattgctattgctcctgcttcatccaaaaactcagagggtttcagtacagcgtgtacaagcagaacgttattggaataagtctccctgttatccaggagaggagagtgacaagcatttcatgcaaaattttgcctgcagcaatgtgagccaagtacaactcatcacatcaaaaggaaatggtgaaaagccacttaccatggatgaaatagagaactttagtctcactgtgaatccattaagtgacagactttccctcctaagtaccagcagtgagacaattccaatggttgtgtctgattttgatcttccagaccaacagatagaaatacttcagagttctgactcgggatgttcacagtcctctgctggggacaacttgagttacgaagttgatcctgaaaccgtgaatgcccaagaggattctcaaatgcccaaggaaagctccccagatgatgatgttcaacaggtagtatttgacctgatatgtaaagttgtaagtggcctcgaagtggaatctgcatcagttacatctcaattagaaattgaagctatgcccccaaagtgcagtgatatagatccagatgaagagacgattaaaattgaagatgactccattcaacagagtcagaatgctttgctgagtaatgaaagttctcagtttctgtctgtgtctgcagagggaggccatgagtgtgtggcaaatggaatctccaggaatagctcctcaccttgtatttcaggaaccacacacactcttcatgactcttctgttgcttccatagaaaccaaatctagacaaaggagtcacagtagtattcaattcagcttcaaagaaaaattatcagaaaaagtttcggagaaggaaacaatagttaaggagtcaggtaaacaaccaggagcaaaacctaaagtaaaacttgccagaaaaaaggatgatgacaagaaaaaatcttcaaatgaaaaactcaaacaaaccagtgtattcttcagtgatggtctggatttagagaactggtatagctgtggagagggagacatttctgaaattgagagtgacatgggttctccaggatctcgaaaatctcccaatttcaacattcatcctctctatcaacatgtgctcctgtatctccagttgtatgattcatccaggactttgtatgctttctctgccatcaaagccatcttgaaaactaaccctatagcttttgtaaatgccatttcaactactagtgtaaataatgcatatactcctcagttgtctctccttcagaatctattggccagacaccggatttctgttatgggcaaagatttttatagtcacattccagtggactcaaatcataacttccggagttctatgtacatagaaattcttatttctctctgcttatattacatgcgtagccattacccaactcatgtcaaggttactgcacaagatttaataggcaatcgaaacatgcaaatgatgagcatagaaattctgacactactcttcactgagctggcaaaagtaatagaaagctcagcgaagggtttccctagttttatttctgatatgttatctaagtgcaaagttcagaaagtgattcttcattgtttgctgtcatctatctttagtgctcagaaatggcatagtgaaaaaatggcaggtaagaacctggttgctgtggaagaaggtttctcagaggacagccttattaatttctcagaggatgaatttgacaatggcagcacgttgcagtcacaacttcttaaggtgcttcagaggctgattgttcctagaacacagagtaatgaactattcctgaagagcaatgaaacaggttttgattttgttgtatcctgacttagaacacatcagtccccatcaacccatgacttctcttcagtatttgcatgctcagtcaatcacatgtcaaggcatgttcctctgtgcagtgatacgagcttttgcatcagcactgtgcatgtaagatgcacccacaatggattggtttaatcacatctactctgccttacatgggaaaagttctgcagagagtggttgtttctgtgacactacaactgtgcagaaatttagataatctaattcagcagtacaaatacgaaacaggattatctgatagtaggcctctgtggatggcatcaattattccaccagatatgattcttactcttttggaagggattacagccattatccattactgtttgttggatccaactacacagtatcaccaacttttggtcagtgtagaccagaaacacttgtttgaagcacgcagtggaatcctctcaatccttcatatgatcatgtcctctgtgacactgctttggagcatactgcatcaagctgattcttcagaaaagatgactattgccgcatccgcatctcttaccactattaatcttggagctacaaagaacttgagacaacagattcttgaattgttgggccccatttcaatgaatcatggtgttcactttatggctgccattgcatttgtgtggaatgaaagaagacagaataaaacaaccaccaggaccaagatgcgtaaggagaaaatcccgcatcaggggccattcgccattcaggctgcgcaactgttgggaaggtcgatcggtgcgggcctcttcgctatacgccagctggcgaaagggggatgtgctgcaaggcgattaagttgggtacgccagggttttcccagtcacgacgttgtaaaacgacggccagtgccaagcttgcatgcctgcaggtcgactctagaggatcccctctatttgttttccaaagtgcccataatatgctacccctatgtagcattgcagctgtttggacggtcatctgaacttgacagacatcagcagctacttctcaacaaaggtctcacttcttacatagggacttttgatccaggtgagctctgtgtatgtgcagcaatccagtggctacaggacaacagtgcatcttatttcctgaacagaaagcttgtatatgaaccatctacacaagcaaagccagtcaagaacacattcctccgaatgtggatctacagtcaccatatatatcagcaggacctaaggaaaaagattttggatgttgggaaaaggttagatgtgactggattttgcatgacaggaaagcctggtataatctgtgtggagggtttcaaagagcactgtgaggagttctggcacacaattaggtaccccaattggaagcacatttcctgtaagcatgctgaaagcgtggagacagaaggaaatggtgaggacctgcgccttttccattcttttgaagagttactccttgaggctcatggtgactatggattaaggaatgactatcacatgaatctgggccaattcttagaatttctcaagaagcacaaaaggggcgtggcgacgagccggaagccacgcagggccacgtctgcggttctgaggactgggtttgggtgcagacgttgttgcttgggcgcttctccgctgcgtgtaggtgaagggggcttcctgaccgaggtcattcctgcagccagtgaagaacagcttttattagtggaattggttcgttcaatcagtgtcatgagagcagaaactgttatccagactgtaaaagaagttttaaagcagccaccagccatagccaaggacaagaaacatctttctttggaagtctgcatgcttcagtttttctatgcttatattcaaagggttctgaatgagtttattatgaaaaaccctagtttggaaaataaaaaagaccaaagagaccttcaggatgtaactcacaaaatagtggatgcaattggtgcaattgctggttcttctctggaacagacaacatggctgcgacgaaatcttgaagttaagccttctcccaaaataatggtagatggaaccaatttggaatctgatgttgaagctcgtgtagcagtggctcaaagcagttcacttaatctctttgcaaaccgtgatgtggagctagaacagagagctatgcttcttaaaagattagcatttgctatttttagcagtgaaattgaccagtaccagaaatatcttccagatatacaaggaattcctgtgagtaaatgggtccagctgctgacagcactgtctcctgcttacaggacttcagggccctctgtggctggtctggagacaacgtacacaggaggtaatggcttctctacttcatataacagccagcggtggttaaacctctatctctctgcttgcaaatttttggatttggctctcgcattgccctctgaaaaccttcctcagtttcagatgtaccgatgggcctttattccagaagcctcagatgattcaggtttggaagtcagaaggcagggtatacatcaacgagaatttaaaccttacgtggtacgactagcaaaacttcttcggaaaagagcaaaggacaaggaggaggactttaagacagtgattttggagggattggagatggccaagcatcagaaaaatccagaggaagacaactcagggagaacattgggttgggagccagggcacttgctgctcaccatctgcaccgtgcgcagtatggagcagctcctgccgttcttcaatgtgctcagtcaagtcttcaacagcaaagtcacaagccgatgtggaggacactcagggagtcctatcctctactcaaatgccttccctaataaggacatgaaactggagaaccacaaaccatgttccagcaaagccaggcaaaaaatagaagagatggtagaaaaagattttctggaagggatgataaaaacttga

SEQ ID NO: 123147 - DNA, 2229 bp, Homo sapiens
ctgtagtaattttgtgacctagtccttggttacagtagtgagggttcagaaacctgggagctttttgagtaaatacaaagcacaacataaaacttttatgtttgactctattcctgttcaaagctatttctgttaactaagcttatctgcgcattctagttgggaactattactacaatgttagactgctccatgtaaaactaataaatggcagtaaaaggtctcagaagcaccaagggttttgatcaggtcaggagttagaaacttaatgtcatttgtattcatttcttgaccaactgccaaagtttatatattttcaatttttctaacataccacattgtctgttgtattaataccagttcactttttggttttctgcagaaaaatccagaggaagacaactcagggagaacattggggttgggagccagggcacttgctggctcaccatctgcaccgtgcgcagtatggagcagctcctgccgttcttcaatgtgctcagtcaagtcttcaacagcaaagtcacaagccgatgtggaggacactcagggagtcctatcctctactcaaatgccttccctaataaggacatgaaactggagaaccacaaaccatgttccagcaaagccaggcaaaaaatagaagagatggtagaaaaagattttctggaagggatgataaaaacttgagcaccattgctggttccatttagcttacatgtaaatgtaattatttaaaacacacacactgctctgcgttgtatagtttttccttttttgtatgtaacagaacacatttcagattgtatttaatttaaatatttgtatataagagcaaatgtctgaatgtggcctgaatcaagtttaaatattgttggctcatactgattatggtgcctaagagagctatatatatacacatagtaaagtcccattgtttttattgtccctgaagttgtccttaaacctgcaaaaatatacactacccatttttttttttccattggtttcagacttggttcaattaagattggttggggatttttctcttttccttattaaccatgttctgggtatcagaatgggtgttccttctccatcagagggctggggaaacgtattataattaggtttttctcccacatacccttcaccaagagcagtgaagaataactgaaggctggaccatgcatccttaaaagtattgcatgagcatctccacctcagtatgggaagagggatggacaaccccctattcatacctctggagttcctgatgggcattagtcatataggtaagtcatctaataatctttcttaagactctgcaatggaaaaactggttgtataaagtcttctctgccctctccatttgtatcagcaatggggaatgctgcaaaacatcatcttgctcatgtgatggtgatggcaaagatatcacaaggagttggtaataagatttaattttccagtagcctgcatgaattgttccccacataaaactgtacagttagtgactgaattgtatacttaagtcccagtattttacattagtgagactgaaattagaggtaaatttctttaacaagtgtaaggcttacctatttataaagaattattctgttagtgtttaagaaaaacagatctagagacaatccagtaggctgcattgtaaacattatgattataaatctcttagtactgccattattattgacagttttgtaaagacttgtaaaaagtccagtttctcaggaatatgaaaattatcttcagaaacctggttggggcctttctccaattcctccagccagctgaaatactgccaagctcacttcatgtgcaaggtgatctgcactttcttgtgagtctgcttctgcatatactcggacgacatcttctgtaccagagggccggacaaaagctcgagaaagcttgtacttcttcaccaggtcattgattgcctcctgtaatcctgggggtgtaactgcttgtctttcagcatcggtagtgctaataactctcctgtctgcaacctgaactttaagttgtctgtttggaagatctgtatagagagcatcccactgttgtacagtcaagcccttcagagccaagattgcttcaatcaccagcatgtcagaaatagcatcaccagctgcctggttaaacaagtcaataatgttttcaagcatcttagcagcttttcttttcttatcttccagttgttct

SEQ ID NO: 123148 - DNA, 4503 bp, Homo sapiens
  misc_feature (1)...(4503): n = a,t,c or g
caattccaatggttgtgtctgattttgatcttccagaccaacagatagaaatacttcagagttctgactcgggatgttcacagtcctctgctggggacaacttgagttacgaagttgatcctgaaaccgtgaatgcccaagaggattctcaaatgcccaaggaaagctccccagatgatgatgttcaacaggtagtatttgacctgatatgtaaagttgtaagtggcctcgaagtggaatctgcatcagttacatctcaattagaaattgaagctatgcccccaaagtgcagtgatatagatccagatgaagagacgattaaaattgaagatgactccattcaacagagtcagaatgctttgctgagtaatgaaagttctcagtttctgtctgtgtctgcagagggaggccatgagtgtgtggcaaatggaatctccaggaatagctcctcaccttgtatttcaggaaccacacacactcttcatgactcttctgttgcttccatagaaaccaaatctagacaaaggagtcacagtagtattcaattcagcttcaaagaaaaattatcagaaaaagtttcggagaaggaaacaatagttaaggagtcaggtaaacaaccaggagcaaaacctaaagtaaaacttgccagaaaaaaggatgatgacaagaaaaaatcttcaaatgaaaaactcaaacaaaccagtgtattcttcagtgatggtctggatttagagaactggtatagctgtggagagggagacatttctgaaattgagagtgacatgggttctccaggatctcgaaaatctcccaatttcaacattcatcctctctatcaacatgtgctcctgtatctccagttgtatgattcatccaggactttgtatgctttctctgccatcaaagccatcttgaaaactaaccctatagcttttgtaaatgccatttcaactactagtgtaaataatgcatatactcctcagttgtctctccttcagaatctattggccagacaccggatttctgttatgggcaaagatttttatagtcacattccagtggactcaaatcataacttccggagttctatgtacatagaaattcttatttctctctgcttatattacatgcgtagccattacccaactcatgtcaaggttactgcacaagatttaataggcaatcgaaacatgcaaatgatgagcatagaaattctgacactactcttcactgagctggcaaaagtaatagaaagctcagcgaagggtttccctagttttatttctgatatgttatctaagtgcaaagttcagaaagtgattcttcattgtttgctgtcatctatctttagtgctcagaaatggcatagtgaaaaaatggcaggtaagaacctggttgctgtggaagaaggtttctcagaggacagccttattaatttctcagaggatgaatttgacaatggcagcacgttgcagtcacaacttcttaaggtgcttcagaggctgattgttctagaacacagagtaatgactattcctgaagagaatgaaacaggttttgattttgttgtatctgacttagaacacatcagtccccatcaacccatgacttctcttcagtatttgcatgctcagccaatcacatgtcaaggcatgttcctctgtgcagtgatacgagctttgcatcagcactgtgcatgtaagatgcacccacaatggattggtttaatcacatctactctgccttacatgggaaaagttctgcagagagtggttgtttctgtgacactacaactgtgcagaaatttagataatctaattcagcagtacaaatacgaaacaggattatctgatagtaggcctctgtggatggcatcaattattccaccagatatgattcttactcttttggaagggattacagccattatccattactgtttgttggatccaactacacagtatcaccaacttttggtcagtgtagaccagaaacacttgtttgaagcacgcagtggaatcctctcaatccttcatatgatcatgtcctctgtgacactgctttggagcatactgcatcaagctgattcttcagaaaagatgactattgccgcatccgcatctcttaccactattaatcttggagctacaaagaacttgagacaacagattcttgaattgttgggccccatttcaatgaatcatggtgttcactttatggctgccattgcatttgtgtggaatgaaagaagacagaataaaacaaccaccaggaccaaggtcattcctgcagccagtgaagaacagcttttattagtggaattggttcgttcaatcagtgtcatgagagcagaaactgttatccagactgtaaaagaagttttaaagcagccaccagccatagccaaggacaagaaacatctttctttggaagtctgcatgcttcagtttttctatgcttatattcaaagaattccagtgcccaatttagtggatagctgggcgtcactgttgatacttctgaaagactctatacaactgagtcttccagctccagggcagtttcttatacttggggttctgaatgagtttattatgaaaaaccctagtttggaaaataaaaaagaccaaagagaccttcaggatgtaactcacaaaatagtggatgcaattggtgcaattgctggttcttctctggaacagacaacatggctgcgacgaaatcttgaagttaagccttctcccaaaataatggtagatggaaccaatttggaatctgatgttgaagatatgttatcacctgcaatggaaaccgcaaacataactccttctgtatatagtgtccatgcattgacattactctctgaggttttggctcatcttttggatatggttttctatagtgatgaaaaggagcgggttattcctttacttgtaaatattatgcattatgttgtgccctacctcagaaatcacagtgcacataatgcccctagttatcgagcttgtgtccagctgctcagcagtcttagtgggtatcagtacacacggagagcttggaaaaaagaagcttttgacctctttatggatcccagtttctttcagatggatgcctcttgtgttaatcattggagagcaattatggacaatctgatgacacatgataaaacaacatttagagatttgatgactcgtgtagcagtggctcaaagcagttcacttaatctctttgcaaaccgtgatgtggagctagaacagagagctatgcttcttaaaagattagcatttgctatttttagcagtgaaattgaccagtaccagaaatatcttccagatatacaagagagattggttgagagtctccgtttgccacaggtgccaactctccattctcaagtgttcctgtttttcagagtgttacttttaagaatgtctccccaacatcttacctcactctggcctaccatgattacagaacttgtacaagtatttttactgatggagcaggaactcactgctgatgaaggatatttcacgggacttcaggggncctctgtgggctgggtctgggagacaacgtacacagggagggtaattggcttcttctactttcatattaacagccagcggtgggtttaaacctctatctctctggcttggcaaatttttgggatttgggctcttcggcatttgccctctggaaaaccttcctcagttttcaggatgtaccgatggggccttttatttccagaagcctcaggtggattcagggtttggaagttcaggaagggcaggggtattacatcaacgagaattttaaaccttacgtggtacgactagcaaaacttcttcggaaaagagcaaagaaaaatccagaggaagacaactcagggagaacattgggttgggagccagggcacttgctgctcaccatctgcaccgtgcgcagtatggagcagctcctgccgttcttcaatgtgctcagtcaagtcttcaacagcaaagtccacaagccgatgtggaggacactcagggagtcctatcctttacttcaaatgccttccctaataaggacatgaaactggagaacccacaaacccatgttcccagcaaagcccggcaaaaaatagaagagatggtagaaaaagattttctggaagggatgataaaaacttgagcacccatgccgggtccccattagcctaccatgtaaatgtaattatttaaaacacaccacactgctctgccgttgtatagtttttccttttttgtatgtaacagaacacatttcagattgtatttaatttaaatatttgtatataagagcaaatgtctgaatgtggcctgaatcaagtttaaatattgttggctcatactgattatggtgcctaagagagctatatatatacacatgtaaagtccattgtttttattgtcctgagttgtcttaaacctgcaaaatatacactacccattttttttttcaaaaaaaaaaaaaaaaaaa

SEQ ID NO: 123149 - DNA, 2094 bp, Homo sapiens
  misc_feature (1)...(2094): n = a,t,c or g
gtaattcgacctggagagggttcggaacctcacttacatggtgacccgcagggaaaagattaaacggtctgtgtgcaaagtccaggaacagatattcaatctttacactaagcttttggagcaagaaagagtttcaggtgtgccttcttcctgctcctcctcctcactggaaaacatgcttttgtttaacagtccttctgttggccctgatgctcccaagatagaggacttgaagtggcattctgcatttcttcagaaaacaaatgggtacttccttgggtttcattcggctgaaaaaggcccattaagccnaggatccttttgcagaattagccctggaagtgaaggcaaaaccctgctgaagcagccagacctgtgtggtagaagggaggggatggtggtcccagagagctttttgggtttagaaaagacctttgcagaagcacgtctcatatcagcacaacagaaaaatggtgtggtgatgccagaccatgggaaaagaagagacaatcgttttcattgtgatctcattaaaggagacttaaaggacgaatcttttaaacagagtcacaagcctctcaggtccacagatgtgtcccagaggcatctggacaacacaagagctgccacctcccctggagtggggcagtcagcacctgggcacaaggaaggagatagtgcccaagtgcaatggctccctaatcaaagtaaactataatcagactgcagtcaaagtgcctacaacacctgccagcccagtgaaaaactggggaggattccggattccaaagaagggggaacggcagcagcagggagaggcccacgatggggcctgccaccagcactcagactacccatatttgggcttaggccgagttccagccaaggaaagggcaaaaagcaaattaaaatccgacaatgagaatgacgggtatgtccccgatgtggaaatgagtgactcagagagtgaggcatcagaaaagaaatgtatacacaccagcagcactatcagcagaaggacagacattatcaggagaagcatcttggcttcttgatgcaacagagatgatgcggaagccctttgggcttcgtcattggggtttgctagaggagagctctgatgtgggggagaagcagaaacccattaatcctgagctacacaaacacatttacttgcaattcagattaatttttttccagagtcatttttaaatcatttttgtgagaagtttgtgttatttgcaacttgttgaggaaacagaagagtagattgtaaccataagacactgctaagactagaacccgaactgaacactaaaataaaaatgaaatgttttaaagaaggcaaggcttaaataagcctcatgaatttttatagccctctgcattcttcccaaagcacaaactcatggttacctgaatatagggaaccagatatggttcttgagaaaccctcatggtaccattcacagcccataaagtttattttctaggactgtggtagatcttgaaatcatatttatatttggccctcaaggctatttttgttgcattatagcatataggcagcagctctgaagcttcagtaacactaagaaatttatgtgtaaatatagcagtcagggaagagaattttaaaaaaggtcattattgaagaagctgaggggacagggtagagctgctgcaatatggagatttagggtaaatatggcaaggtccctgctgccttgaaagccctgtgaagtgggttgtggatatgggactggtggagagtgagactgttaggaaagttgtatctatgaataagggcagttgaagtagaattttttaccagtccaccttgaccttcttcttccctaacccacggctcttgagcccagcttgggatttcccctgggccattgccaattacctgggccatctggctttccaattagtacagtggctactcaaagttcaagcgaagaacttccagactctggtgactgttacttcccagagccaaccactagtgcattatgtttaggggatctggggcttccaacatgaatggattccttaagaaaaaggaaaaaaaaaaaaaaagaaaaaaag

SEQ ID NO: 123150 - DNA, 1483 bp, Homo sapiens
cttttgatattccattccccaaaataggaaaactcataaaatccaatgttcctgagctgagaggacacttccctctcagcataaccctggtcctgcgactcatgctgctggcttccaagggagatgacccagaggatgccaaggcaaaggtgctatcagtgctaaagcattcattgctgtccttcaagcaacccagagtcatggacatgttaaaactttacttcctgttttctttgcagttcctgggtggaaagagggctatttagatccaagaagggtaatcctatggggtttgctgggacttggtattcacatttggcatttatccatggaacctttctaatcttgtttttgtcagttttcttgtaaatggactcttccatgatctctgtcagccaaccaggaaaggctcaaaacatttttctcaagacgttatggaaaagctagtattagtattggcacatctctttggaagaagatattttccaccaaagttccaagatgcacacttcgagttttatcaatcaaaggtgttccttgatgatctccctgaggattttagtgatgctttagatgaatataacatgaaaattatggaggactttaccactttcctacgaattgtttccaaactggctgatatgaatcaggaatatcaactcccattgtcaaaaatcaaattcacaggtaaagaatgtgaagactctcaactcgtatctcatttgatgagctgcaaggaaggaagagtagcaatttcaccatttgtttgtctgtctgggaactttgatgatgatttgcttcgactagaaactccaaaccatgttactctaggcacaatcggtgtcaatcgctctcaggctccagtgctgttgtcacagaaatttgataaccgaggaaggaaaatgtcgcttaatgcctatgcactggatttctacaaacatggttccttgataggattagtccaggataacaggatgaatgaaggagatgcttattatttgttgaaggattttgcactcaccattaaatctatcagtgtttccttgccgtgacgtattgtgaaaatgaagacgacaacgttgtcttagcctttgaacaactgagtacaactttttgggaaaagttaaacaaagtctaaaaacaaagtctatgcaaaccacttaaaaataattccatagtagtttttcaggtcacgtttttgattcttatgcttcttgccagaaatacattatgataaagtggaaatacattacgatgaagtggaaagagcaaacactttggaatcaaacagagttgcaatcaaacctgccatgttctgtcatgtcacgtttttgattcttatgcttcttgccagaaatacattatgataaagtggaaatacattacgatgaagtggaaagagcaaacactttggaatcaaacagagttgcaatcaaacctgccatgttctgtcaggtatactaaataatttgtgagtattcat

SEQ ID NO: 123151 - DNA, 522 bp, Homo sapiens
atggcccagaacattggcaggcattactgcatatctgcagtgtacgcggaacacccatggcagtgggatatatcccggaaacccacaggatgagagaaaagcttggcgcagatgtgatagaggtggcttttgggcagatgatgattattctcgctgtcagtatgcaaatgatgtcactagagttctttatatgtttaatcaggttgggataattcttcactattccacccttgccacagtactatgggtaggagtgacagctcgaaatatctacaaacaagtcactaaaaaagctaaaagatgccaggatcctgatgaaccaccacctccaccaagaccaatgctcagcagtccccagtatcagctgcctgccgcaggagctgcctgggaagacactgccctaacggctgcccttgcgtctcatggtccagtaccaaatatgagggctgttgggcaaacctcccaaccaaatcactacactgaaagctcacctggggacctgcttctggggaaatcagcctg

SEQ ID NO: 123152 - DNA, 2592 bp, Homo sapiens
  misc_feature (1)...(2592): n = a,t,c or g
gcttcctccttcccttttctcaccaaagcaaaaaagagaactcagaccaactgatgactctctttacaagcttcaactcattgcattccgcaatggaaagctttttccaagccactggaaattcaacaaatttggctgatgatggaaaacgacgtactgtggttacccctgtgattctcaccaaaatagatggtgtgaatgtagatacccaccacatccctgttaatgtgacactgcgtcgaattgcacatggagcagatgctgttgcagcccggtgggatttcgatttgctgaacggacaaggaggctggaagtcagatgggtgccatatactctattcagatgaaaatatcactacgattcagtgctactcccttagtaactatgcagttttaatggatttgacgggatctgaactatacacccaggcggccagcctcctgcatcctgtggtttatactaccgctatcattctcgtcttatgtctcttagccgtcattgtcagttacatataccatcacagtttgattagaatcagcctcaagagctggcacatgcttgtgaacttgtgctttcatattttcctaacctgtgtggtctttgtgggaggaataacccagactaggaatgccagcatctgccaagcagttgggataattcttcactattccacccttgccacagtactatgggtaggagtgacagctcgaaatatctacaaacaaggtcactaaaaaagctaaaagatgcccaggattcctgatgaaccaccaccttcaaccaagaccaatggctcagattttaccctgatttggtgggtgggtatcccccatcattggttttgcgggcataacttgcagcagcgaacattaaagaattacggcagtcggccaaaccgcacccctattgctgggatggcatgggaaccctccttgggaggccttctatgggccagccagcttcagcacttttgtaaactgcatgtactttctgagcatatttattcagttgaaaagacaccctgagcgcaaatatgagcttaaggagcccactggccagcaacagagattggcatgccaatgaaaatggcgaaataaatcatcaggaattcaatgtctttgtctctgatttctacatcagccttggaaaatgagcacacttttcattctcagctcttgggggccaggccttactttgctcttatatgttgcactgtggatgtttggggctttggctgtttctttgtattaccctttggacttggttttaagcttcgtttttggagccacaagtttaagcttcagtgcgttcttcgtgatgcaccatgtgtgttaacagggaggatgcatagacttgccgtggatcatgacttgcctgcccaggaccggagctcggtattcagtgcaaagtcaacgtcccagcccccccaacttcttaatgggacggaatggaggggccaccccaaatgccccaaatagcagtgcggaagtcttccatgcaccaaacaaaaagtgctttcaagcttcaaaaaattcctcccagggctgtcaaattaaccaaactttgcaggcgggctgcagcttcagtggccatgccaatttctttacctttggaactccaccccttcagcttgataattagttttgacagaacatttcaatgggacaatgatatttaaatggcacgttggcgccttttggaagtttcagttttcgaacaaatgtgcactcaagcccgcaccattaaaaacagaagtaaaggacacccgggcaagccgactcacagtcctgaaaagattatgcctacgatgtcccaacgaagcgtggaaggaagcgtgcagaacggcttacctaaaaagcccggctgggcaataacgaaggacactgagggaagcggaagagcttatttagcctacagagagagacagtacaacccaccccaggcaagacagcagcgatgctttgtagcacaccttcccaaaaagtagcagaaattttgaaaaagccagtttcacccacttagtaaaaaagatgcgttaagggaagcccagctgtgggtggaacttggaaaatccggccaaaaatctttatggcctccaactttgccatttcagaatggacccaattaaaaagccaatggggcagggagggacccttgcctcggtacccgatagcactggccaatgttaaggactgggattatggaaacacgaaacttactgtgtaaacatngcctgggcttccctaggcagaaattcaaatataaactgtgatactcccccatccctgaagctatgagcatttaaaaactggttttacagcccaccataaggattcaaaagaatttggaataaacttttgaagtttttggattttacttatttttatcccccaaattgttgctattttttacggatctgaaacaaaatctttctaaaacattgttttagttgtcaaagcaccaacaggacattttgggatgtgaaatgtaatttcttgggaatctggtaatttggtaccttaatatttccaggcctggtatttaatataataaataggtgtttgttattgtgtcaaaaaaaaaaaaaaaaaa

SEQ ID NO: 123153 - DNA, 307 bp, Homo sapiens
acttcacatgtatcattctccgagcctgatattccgtcctcaaaaagtactgagttacctgtggactggagtattaaaacgcgactccttttcacctcttctcaaccctttacctgggcagatcatttgaaagcacaggaagaagctcaaggtcttgtccagcattgtagggcaacagaagttactttgcctaaaagtatacagtttactgtcctgttccgagcagcaggattagctggaagtgacttaatcacagctctcatatctccaacaactcgaggtttaagagaagctatgagaaatgaag

SEQ ID NO: 123154 - DNA, 286 bp, Homo sapiens
gcgtaaagagaaacatgaagtacaaatggatcacagacctgaatctgttgtgttggtaaaaggaatcaacacctttacattgctcaattttttgattaactctaagagtttagttgctacctcaggtccacaggcaggacttcctccaaccctcttgtcccctgttgctttccgaggtgccacaatgcaaatgcttaagagtggatctttctctgcagtactgtatccacacgagccaactgctgtatttaacatctgcctgcaaatggacaaagtacttgatatg

SEQ ID NO: 123155 - DNA, 2165 bp, Homo sapiens
gccgcgtaattatccgtttttagattctaattaagaaaaggacttgctatgggaagagaagtttcctgatagaacaactgttactgaattacctcagacttcacatgtatcattctccgagcctgatattccgtcctcaaaaagtactgagttacctgtggactggagtattaaaacgcgactcctttttacctcttctcaaccctttacctgggcagatcatttgaaagcacaggaagaagctcaaggtcttgtccagcattgtagggcaacagaagttactttgcctaaaagtatacaggatcccaaactctcctctgagctccgttgtaccttccagcagagccttatctattggctccaccctgctttgtcttggctaccactgttccctcgtattggagctgatagaaaaatggctggaaagacaagtccttggtcaaatgatgcaaccctgcagcatgttttaatgagtgactgggctgtgagctttacttctctatataatttgctgaagaacaaacttttccccctatttctacgtttgtacctatcagtttactgtcctgttccgagcagcaggattagctggaagtgacttaatcacagctctcatatctccaacaactcgaggtttaagagaagctatgagaaatgaaggtattgaattttctctgcctttaataaaagaaagtggccataagaaggagacagcatctggaacaagcttgggatatggggagtatgtgattaaaataactttatatcatccactgacttatggactcatgaaatagatttgcacaggaacagcttgtgaaatagggactctaactgtagcaatttcctagggagcaagccatcagtgatgaggatgaagaggaaagtttttcctggctggaagagatgggtgtgcaagataaaattaaaaagccagacatactttctatcaagctgcgtaaagagaaacatgaagtacaaatggatcacagacctgaatctgttgtgttggtaaaaggaatcaacacctttacattgctcaattttttgattaactctaagagtttagttgctacctcaggtccacaggcaggacttcctccaaccctcttgtcccctgttgctttccgaggtgccacaatgcaaatgcttaaggcacggagtgtgaatgtgaaaacacaagctctttctgggatacagagaccaatttagtttgggagattacaggtcctattcatggcctcattctctggcattcacttgaccatgctgctcaaatctttcacagagtgggatcttttctctggcagtactgttattccacacgagccaactgctgtatttttaaccatctggcccggcaaatggggcaaagtacttgatatggaggttgttcataaggagcttactaactgtggtttgcaccctaacactctggagcaacttagtccaatacccgttacttgggaaatcatctttacggaatgtggtgctgagagactacatttataattggagatcctgaacaccaaagtaagcctaaaaggaatctttgaggaaaaaagccttctagcaaggaaattcaagattcttgaagttgaaggaatatactgaaatgtttataaacataaacttttacctacagtagcatcctaaggttttaaaatgtgttttacctattttccagattagatttttagatataaagatgaaaaactcagataactcaaatgagatatctatatccctacaacctaattgtatattgagcagaaactgaattaatatgcttccttgcaaatgggaaatcacatagcagttaccccatggcattgtgactaatggcatcagggcaaaaatatgttactttacgatttacctgttagcaggttcttgtttcataaaggtagaaaataaatacagacaacatctactgagctagttgattggtgatgcttctacccttaatatctttcctactgatttataattcctttattttcacatatactaaaactttttatatgcatgttaattcagataaaaaggcgttttggattccacatagaatagtgttaagaattgtgaagtacactgagctgtcacggcaaagtagtatttaatgtgcttataggggtgtgtgtgtgtgtgtgtgtgtgtgtgtg

SEQ ID NO: 123156 - DNA, 466 bp, Homo sapiens
  misc_feature (1)...(466): n = a,t,c or g
nnnnnnnnnnnnnnnnnnnnnnnnnnnnnnnnnnagccacatctcacatggcagcagataagagaaaaaaaggtagtgatcttttagtaaagaaacctgagactggtagtgggcttggannnnnnnnnnnnnnnnnnnnnnnnnnnnnnnnnnnnnnnnnnnnnnnnnnnnnnnnnnnnnnnnnnnnnnnnnnnnnnnnnnnnnnnnnnnnnnnnnnnnnnnnnnnnnnnnnnnnnnnnnnnnnnnnnnnnnnnnnnnnnnnnnnnnnnnnnnnnnnnnnnnnnnnnnnnnnnnnnnnnnnnnnnnnnnnnnnnnnnnnnnnnnnnnnnnnnnnnnnnnnnnnnnnnnnnnnnnnnnnnnnnnnnnnnnnnnnnnnnnnnnnnnnnnnnnnnnnnnnnnnnnnnnnnnnnnnnnnnnnnnnnnnnnnnnnnnnnnnnnnnnnnntcgtgccaagcatggagtaatt

SEQ ID NO: 123157 - DNA, 295 bp, Homo sapiens
atgaacaggttgaaaaaggagtggatgcttgagcacattgtggaaaataactccggcatggaatctcaagacattaaaggccattttcatgctgctgataaagacttacttgaaatgggctatttacaaaagagaggtttaattggacttacagttctacatggctggggaggcctcacaatcatggcggaaggcaaggaggagcaaaaccggtttacgcagtttcggcttagtgaaacaaaagaaatctccaatccgtatgccatgcgtttatacgaatccttgtgtcagtatc

SEQ ID NO: 123158 - DNA, 3205 bp, Homo sapiens
atgatctctgcaacctctacctcccaggttcaagcaattcttgtgcctcagcctccccaagtaactggggactacaggttgcacgctacccacacctggctgattttttttatgttttagtagagacagggtttcaacccatgttgcccaggttggtctcaaaactcctgagctcaggcaaatccacccgccttggcctcccaaagtgctagggattacagggtgtgagccaccacacccagctattttttctttcggttttttaattttaaagtgggggggggggggtctcaatttgttaccctggctggtctcgaactcccggacttaagcgatcctctggctccaagcccactaccaagtctcaggtttctttactaaaagatcactacctttttttctcttaatctgctgccatgtgagatgtggctttcaacttctgccatgaattgtgaaggccttcccagccacgtgggaacctgtaagtccaataaacctcttttgtaaattaaaaaaaaaaaaatcactatttaacgatactaggatggattgtgactgttgaggagtacttacatatcctacatttgactacattatttccaaaccaagtattccatccaaagggaacatactgctatcatagaggaccaagggaggggactgtttaaggttgccaagggtgaaggcgagctgagagggtttgttcctcgtggccagttaactctgaaatctctctttaattccctgctgccccgggcagcagaatgcccatggtttcccccaagtatgttatctgcttttagcagtttaaaagccccaaatggtctggttctggtgatcagaaggtctctgaatttctgaaagtggtgtttccgtttctgggtgacctgagttaatcctttacaaatccctcttgtaaaggtgtgctaatagaaaggatccaccctttcaaaagctggcagaacccagacccgtgcccctaaattgacccaacgtaggctggatgtgcctcagggaaggtctctttgccagctgtccctgtggaaggaccccccttccttccccccccagctggttgcctttgcacactggaagcatctcagactgtggcaaagccgtgttagttcatccaaggacagttaaatcccaggggcttggttaagtgctgtggtgataaccttgttttggatgagactttaacttaaaaccacttaacaataaacttggtgaaactaccgtcagctgagttcaaatttactgacggcatgatatgaggatgaaggtttattacctggtgacatcatcctgttggtgacatcatcctgttggtgacaaggtggtgatacatctctaatggggacttccctcaagtggcaggcaggctgccaagcaactaacccccatcaagtgccagaccctcccagtgttctgagagtcatctccatgctaaacagcctgcgttttatatgatttctctacccagccaaaaaaaaaaaaaaatggtccatcatgtacgcagttaatctaggtcttaagttatattctgggctttttttctcccactttattatggagcagaaagtaagccctatccatggttctttagaaaagggctctttaagaggttgtccttggagtccttgaatcactttagcatctggggtaggatgttgccaccaggaggatttggggctggagcgtgtgtgtttgcctttgacctggactgctgtctgatcttgctgaacactccaccgacatttcctaaagttgctcagtgccaatccagcaaagcagtccattttcccttggccaagattgagatgtattgttttagatacagaagagttcttggatgagccaaggacaagctggggtgtcctatattgaacagacctcgatgaaaatcttgaattcaccccagtgccctctgttggcaagggaaggtgaagattgaaaaagttaaaaaagcttttggccccctgagaggatcaggggccgcaactcttgaagaagcaaaagggctcagtgcattggggtcagcgctggtacagctgaaggatgccggccttgtgcaggtccctccacaggggcagcttccagggacagatcgtggtttgcataaaatatcaatggcttcatttttcgttcgaaatagtggtcggaaaatttccagtagttgcttgtgatgaatccataggcactgacctggtcacaggtatgcaaagctgtcagcagcatgagagccccggtactaggcatatataggtctccaaaatgtgtgttaatcaactttgatttccaagaacctttctgtccaggtagctgatgaagtccggatgtagcagcttgaatttactggcagaggcttctggtccaaaataggcgtgcggcctgtcccctttatctaggccctcagggacaggcacgcccagaatggccgatctcagcatcacatagtcgcggatgtctgaggggatgaagatatactgcaggtcctgtccttgtggcacggaggtgaagcccagattccagtaggagacgagggagttcttcatcgtgttcacagtgaaaccatagaaggaagtcttggtgcccacatcgcgctcgaagcctttgatcacagctccattgagtctgaatacatagtcatgggcatcgatgttgggaccctggcgggacccattcagaatgcctccgttgcccaccacggcacaccggatacactttggaggggtgttccctgggcggagcacaacagcttggcactctctgagccgttcagaaggctcagggtggaggcgatgacttggtgagagagcccccgccagccatacggggctttgtgttggctcaggcggtcccagagcgctggggtgaagaggtccccccacagcagcactggaatggagagattgaacaggccacggaagtgggggtgccgctgaatggccaggtgaagcaggtgtcggcaggcctggccctttcctgtccaagaattcgatgccttggattgaaagaatgcttcaaatgatgtggtgtccctggctccggccgctggccccgggtaccgctgcaccgccgagaagtacagggcaaagaggagccccgagcaggcagccgtgagcaggagcagcacccagaagaacgacccgcgcgggagccccatacagccccggcccgcgagcgccccgtccgctgacgtccc

SEQ ID NO: 123159 - DNA, 1521 bp, Homo sapiens
aaataaacaatacaaatactttcagagttttacctcatccttcttttgtttacacggctaaattccatccagctgtaagagagctagtagttacaggatgctatgattccatgatacggatatggaaagttgagatgagagaagattctgccatattggtccgacagtttgatgttcacaaaagttttatcaactcactttgttttgatactgaaggtcatcatatgtattcaggagattgtacaggggtgattgttgtttggaatacctatgtcaagattaatgatttggaacattcagtgcaccactggactataaataaggaaattaaagaaactgagtttaagggaattccaataagttatttggagattcatcccaatggaaaacgtttgttaatccataccaaagacagtactttgagaattatggatctccggatattagtagccaggaagtttgtaggagcagcaaattatccgggagaagattcatagtactttgactccatgtgggacttttctgtttgctggaagtgaggatggtatagtgtatgtttggaacccagaaacaggagaacaagtagccatgtattctgacttgccattcaagtcacccattcgagacatttcttatcatccatttgaaaatatggttgcattttgtgcatttgggcaaaatgagccaattcttctgtatatttacgatttccatgttgcccagcaggaggctgaaatgttcaaacgctacaatggaacatttccattacctggaatacaccaaagtcaagatgccctatgtacctgtccaaaactaccccatcaaggctcttttcagattgatgaatttgtccacactgaaagttcttcaacgaagatgcagctagtaaaccagaggcttgaaactgtcacagaggtgatacgttcctgtgctgcaaaagtcaacaagaatctctcatttacttggccaccagcagtttcctcacaacagtctaagttaaagcagtcaaacatgctgaccgctcaagagattctacatcagtttggtttcactcagaccgggattatcagcatagaaagaaagccttgtaaccatcaggtagatacagcaccaacggtagtggctctttatgactacacagcgaatcgatcagatgaactaaccatccatcgcggagacattatccgagtgtttttcaaagataatgaagactggtggtatgggcagcatagggaaaggggacaggaaggttattttcccagcttaatcatgtgggcttagttgaaacattgtatccaggaactgcctcctgagataaaggagcgatcccctcctttaagccctgaggaaaaaactaaaatagaaaaatctccagctcctcaaaaggtgggggataatactggtgggcagaggtcatggatgttgctcagtatcctagaatgcagaggacagctcccctcaacaaagaattctctggccaaaaatgtcaacaggatggagcttagagcagtgcccctctaa

SEQ ID NO: 123160 - DNA, 2877 bp, Homo sapiens
atggctgtgctgatttttctgggctgtctgttgggtggtattgctatcggtttgcctattgcctgggcactgttgttgtgcggggcggcgttaatgttctggctggacatgtttgatgtccagatcatggcacaaacgctggtgaacggagccgatagcttctccctgctggcgattccgttctttgtgctggcgggtgaaatcatgaatgcgggcggcttgtcaaaacgcattgttgacctgccgatgaaactggtggggcataaaccaggcgggctgggctacgtcggcgtgctggcagctatgattatggcgagcctttctggttctgccgttgcggataccgccgccgttgccgctctactggtgccgatgatgcgcagcgccaactatccggtcaaccgggcggcggggctgattgcctctggcggcattatcgcgccaattattcccccttccattccgtttattatcttcggcgtttccagcggattatccatcagtaagctgtttatggcgggcattgcccctggcatgatgatgggcgcaacgctgactttagggaagcgggcgcgcttcactgaagatgatacccgggaacgggacgccataagcgttatcaatcaccagcggaatgccgtgttgattcgccagcgcgtcaagcttcagcaactcttcgtcattcgagttttagcaatgcgaatatttgtctacggcagtttacgccacaaacaaggcaacagtcactggatgaccaatgcccagttactgggcgatttcagtatcgataactaccagttgtatagcctgggccactatccaggcgcagttccggggaacggaacggtacacggtgaagtttatcgtattgacaacgccacgctggccgaacttgatgccttgcgcaccaggggcggtgaatacgcgcgccagttgattcagacgccgtacgggagtgcatggatgtacgtttatcaacgacccgtcgatggattaaagctaattgaaagcggcgactggcgggtattgcgctggctgcgggtccactccatcgatgtgccggacccaatttttggtctgacggtaaccggggatcgtaccgaccgagcgggaaaaaccagtccggcacaagccggatgcaaactgttcctgacgaatccgctggggatcggcgttcttaccacggctgagaaaaaatcactgttgaaaccagaacatcagggactggcgacggaagtaatgtgccggatgaacatcgcaggcgcgtcctttgccaacatcgaaggcgtaaaagcgatgaccgacgttacgggctttggtctgctgggccacttgagcgaaatgtgtcagggggctggtgtgcaggcacgcgtcgactatgaagcgatcccgaaactccccggtgttgaagagtacattaagttgggcgcagtacctggcggcactgaacgtaactttgccagctacggtcatctatggcttagagcacattgccaagaagttcggatatgcgggcgcgtcttttccgcggcagtagcaggtatcgtcgaactccagcaaggctcactttcgtcgcatcaactcagctcgcgatgtgaagcgatagcaattgtcgcacagcggtcatgtaaggcaggatcggtagtgctgtaccgtaaatttgaagttggtgaagtgattaccgtgcgtccgcgagctaacgcgtttgatatcgatctgcatattaagccggagtatcgcaaccttctgaccagcaatagcgtgttctgggcagaaggcggggcgaaagttcagctgaatggtagtggtctgaccgtacaggcatccccgctctccagagcattaaagggagccattagcttcgacaacctcagcggtgccagcgccagtcagcgtaaaggcgataagcgtattctgtatgcttccgaaacagcggcccgtgcggttggcgggcagattacgcttcacgctttcgatgccggaaaactggcggtcgggatgccaattcgctatctcggtattgatatcgggcaaatccagacgctggatctgattaccgcacgcaatgaagtacaggcaaaggcggtactttacccggaatatgtccagacctttgctcgcggtgagcacaggagagtcatcgaacgactggtacttgcgacttgccgccggctcgccgatgactggggcgagcaaaccaacgtaccgaaatccgccgactggtataactccaggtacatcatcgctgggggtctaacgtaccgcagacacgtacgccggacgccccttgtttaccgaatacgctacaaaggcactaaaaccatcgccattacccctgactactctgaagtggccaaattgtgcgaccagtggctggcaccgaaacaaggcactgatagcgccctggcgatggcaatgggccatgtgattttaaaagagtttcatctcgataatcccagcgactactttatcaactactgccgccgctacagcgacatgccgatgctggtaatgctggagcctcgcgacgatggtagctacgttcccgggcgcatgatccgcgcatctgacctggtggatggactgggcgaaagcaacaatccgcagtggaaaaccgtagcagttaataccgcaggtgaattggtagtgccgaacggttcgattggtttccgctggggagaaaaaggcaaatggaatctggaatccattgccgccggtacggaaaccgaattgtcgttaaccctgctcggtcaacatgacgctgttgcaggcgtggccttcccctactttggcggcattgaaaatccgcattttcgcagcgtaaaacacaatccggtgctggtgcgccaattgcccgtctttaggcgcttgacgtag

SEQ ID NO: 123161 - DNA, 2109 bp, Homo sapiens
cccttgtattatcagccacctgactggtaagggtttctgcattctgaaaaaagcaatctacctgatttatttatcagcggggtaactttgcttttttccggcacgatcgatttctcattcgagaaattgaggacctgctattacctaaaataaagagatgaaaaatgtcaaaattaaaaattgcggttagtgattcttgcccggactgttttaccacgcagcgagaatgtatctacattaatgaaagtcgtaatatcgatgtggcggcaatagttttatcgctcaacgatgttacatgcggaaaactcgatgaaatcgatgccacgggttatggcatcccggtatttattgctactgaaaatcaagaacgtgtacccgcagagtatttgccccgtatttcgggtgtctttgagaattgcgaatcgcgacgagaattttatggtcgccagttagaaaccgctgccagccattatgaaactcaactgcgcccacctttcttccgcgcactggtcgattatgtcaatcaaggtaacagcgcgtttgattgccctggtcatcagggcggcgaatttttccgtcgccatccggcggggaatcagtttgtggaatactttggcgctgttccgtgccgacttgtgattccggcactgaagaaacagcgtaagttgagcgatcttgaaactgcgattgtggtcgtcgaccgctttagtggtgaagttcgtgcgatggtcggaggttctgagccgcagtttgcgggctacaaccgtgcgatgcaggcgcgtcgttcgattggttcccttgcaaaaccagcgacttatctgacggccttaagccagccgaaaatctatcgtctgaatacgtggattgcggatgcgccaattgcgctgcgtcagccgaatggccagcgaaagcgtcagagtgatgctggtggatgcgttgacccgttcgatgaacgtgccgacggtaaatctggggatggcgctggggctgcctgcggttacggagacctggattaaactgggcgtacccgaaagatcagttgcatccggttccggcaatgctgctgggggcgttgaacttaacgccaatcgaagtggcgcaggcattccagaccatcgccagcggtggtaaccgtgctaccgctttctgcgctacgatagacaatcgcggaacatggcaaagagctgtatcagagcttcccgcaggcggaacgcgctgttccggcgcaggcggcgtatctgacactatggaccatgcagcatggtggtacaacgcggcacgggtcgtaagcttggggcgaaatacccgaacctgcatctggcagggaaaacagggactaccaacaataacgtagatacctggtttgcgggcattgacggcagcacggtgaccatcacctgggtcggccgtgataacaaccagccgaccaaactgtatggtgccagcggggcaatgtcgatttatcagcggtatttggctaaccagacgccaacgccgctgaatcttgttccgccagaagatattgcagatatgggcgtggactacgacggcaactttgtttgcagcggtggcatgcgtatcttgccggtctggaccagcgatccgcaatcgctgtgccagcagagcgagatgcagcagcagccgtcaggcaatccgtttgatcagtcttctcagccgcagcaacagccgcaacagcaacctgctcagcaagagcagaaagacagcgacggtgtagccggttggatcacggatatgtttggtagcaatgaacatctaagcgggtacgagctcgattcgtaccctctaagctcagcacgccgccgggcgcgcttcactgaagatgatacccgggaacgggacgccataagcgttatcaatcaccagcggaatgccgtgttgattcgccagcgcgtcaagcttcagcaactcttcgtcagtaatcacattgcctgttggattcgtcggccgggagacgcaaatcatcccggtttcttcgccaatatgcagatgctcaaaatcgacgtggtatttaaactggccttccggcagcagttcaatattcggacgcgcagagacaaacagatcttcttccagtccggcgtcacatag

SEQ ID NO: 123162 - DNA, 426 bp, Homo sapiens
atgtggctggggtttgtctcacagtggaggcaaggaattgcaccttttttctattattgtacaccttgaaggcgaggttaattaaatcctgttgtggggtttgagggccggaatttaatttttggagttttatttaatgtcgggagcagattgggtaataaaatgtatactgagaataagccggccttttgagtttttagggtctagggctgtaaagagtctcagggttgctgccaaacgagccatgaactgggctggatttttatatttgatgaaaaagagcctaaacgctatccgatttgggataaagaaaaaggagcattatccttgactatgcttttagccccagccacctttttaagagtaaattgctgggcaggagggggagggctagtcacggaacgtatctgctcgtgccgaattccc

SEQ ID NO: 123163 - DNA, 380 bp, Homo sapiens
atatttgatgaaaaacagtgtaaacactaactgatttgggagaagttggataaagaaaaaggagcattacccttgactatgcctttagctccagacacctttttaagaggagattgctgggcaggtgggagagggctagaagcggaatgaaactgtaagccagaccgggtgtgaggaggggaggtgataaaaggattatagggtggaggagccgaggctgaggaagaattgggacctagctccacctggcgaggaggggagaggtcagatgggtctgtagaaaaggaagattagaaagactcagcaacacttggggctgggactgaggggacaggcaggaggagaagaaggagggagaagaagagggaagaagaagaagc

SEQ ID NO: 123164 - DNA, 475 bp, Homo sapiens; identical to SEQ ID NO: 115057

SEQ ID NO: 123165 - DNA, 462 bp, Homo sapiens
accatcacagacgccgagcttcgggtaactctcacagtggaaggccgagacagtttaactaaattatctgcttccctgacgattcctggactacagccacatctcattgccgtccttctccccaacccaaagcctccttcgcgtcttcctctcatatccccctaccttaacccacaagtatgggacatctctactccttccctggcaactgatcacatgcccattaccatcccattaaaacctaatcacccttaccccactcaacgccaatatccaatccctcagcacgctttaaaaggattaaagcctgttatcactcgcctgctacagcatgggcttctaaaacctataaactctccttaccattcccccattttacctgtcctaaaaccagacaaggcttacaagttagttcagaatctgcgccttatcaaccaaattgttttgcctatccactccatg

SEQ ID NO: 123166 - DNA, 576 bp, Homo sapiens; identical to SEQ ID NO: 115923

SEQ ID NO: 123167 - DNA, 651 bp, Homo sapiens
agatgtcaagtaaatattattgtcagacctctgagcccaagcctgcaggtatacacccagatggcctgaagcaagtgaagaatcacaaaagaactgaaaatggccggttcctgccctccaccctataatccttctatcacctcccctcctcacacctggtccagcttacagtttcattctgtgactagccctcccccacctgcccaacaatttcctcttaaagaggtggctggagctaaaggcatagtcaaggttaatgctcctttttctttatccaacctctcccatctcagttagtatttaggctttttttcatcaaatcacccttacctgggtcaacgccagtatcccatcccacaacaggctttaaagggattaaagcctgttatcacttgcctgttacaacatgtccttttaaagcctgtaaactctccttacaattcccccattttacctgtccaaaaactggacatgccttacaggttagttcaggatctgtgccttatcaaccaaattgtcttgcctatccacgccatggtgccaaaccctgaaaccttcataccccttaccgtcctcaatccttaggaaaggtagaactgattaatggtcttttaaaaacacacctcaccaagctcagcctccaacttaaaa

SEQ ID NO: 123168 - DNA, 1404 bp, Homo sapiens; identical to SEQ ID NO: 117133

SEQ ID NO: 123169 - DNA, 482 bp, Homo sapiens
atgcatgaaatttggtgccatgagtcggatcgggggacctcccttgggagggcaatcccctgtcctcctgttctttgctccatgagaaagatccacctacgacctcaggtcctcagaccgaccagcccaaggaacatctcaccaattttaaatcgggctgctcctcgccaggcccagctaggtcccaattcttcctcagcctccgctcctccaccctataatccttttatcacctcccctcctcacacctggtctgccttacagtttcgtttcgtgactagccctcccccacctgcccagcaattgactcttaaaaaggtggctggagctaaaggcacagtcaaggaacatttctgccatgatttgccagccagctccatgcagtcaaactacccagtgcacgactctggacacctcactactggaccatccctcttcaagcccacacttaatatagaatacagcacaggacatgctccata

SEQ ID NO: 123170 - DNA, 492 bp, Homo sapiens
atgacctcaagtcctcagaccgaccagcccaaggaacatcacaccaattttaaatcaggctgctcctcgccagctgagccaggtcccaattcttcctcagcctctgctcccccaccctataatccttttatcacctcccctcctcacacctggtctggcttacagtttcattccacgactagccctcccccacctgcccagcaatttcctcttaaaaaggtggctggagctaaaggcacagtcaaggttcctgatcctgttccttcagactggatgagacctcccaacaggggtccccagccatctacagatgcattgaggctggcaataggtcagtgccctactgggatgcagcttcagaggaaggggcaggctgccatctttgctgtttctcagccttcactggtgatacctccaggtatgggaataactgaggaaactagagtctggagggcactcacagaaaactgcagcagtactacagaagagtag

SEQ ID NO: 123171 - DNA, 645 bp, Homo sapiens; identical to SEQ ID NO: 120920

SEQ ID NO: 123172 - DNA, 1312 bp, Homo sapiens
atgagcgagccaaggctcagagacaataatgagcagcccaaagtcacagagttaacaagtggagattccctcattgaagacaggtcctccttgccagaggcaatgcaatgcagtgcccgcctgcacccaggtgaaataaacagccatgttgctcacacaaagcctgtttggtggtctcttcacacggacgcgcatgaaatttggtgctgtgactcggatcgggggacctcccttaggagaccaatcccctgtcctcctgctctttgctccgtgacaaagatccacctacgacctcaagtcctcagacccaccagcccaagaaacatctcaccaatttcaaatccggctgctcctcaccaggccgagctaggtcccaatccttcctcagcctctgctcctccaccctataatctttttatcacctcccctcctcacacctggtctggcttaccgtttcgttccgtgactagccctccccctcctgcccagcaatttactcttaaaaaggtggctggagctaaaggcacagtcaagaccatcacggacatcgagcttcaggtaactctcacagtggaagcccgcctgcgcccaggtgaaataaacagccatgttgctcacacaaagcctgtttggtggtctcttcacacggacacgtgtgacatttggtgccgaagacccgggacaggaggactccttcaggagaccagtcccctgtcctcaccctcactctgtgaggagatccacctatgacctcgggtcctcagaccaaacagcccaaggaacatctcaccaatttcaaatcggatcttctcggactgacgctgcccgatcgcctcagaagcctcctggaccatcacagatgctttgggtaactcttacagtggaggcatggccttttaaatcctataaactctccttacaattcccccattttacctgtccaaaaaccggacaagccttacaggaagctggagtcattcactgcaagggccatcaaaaggcatcagatcccatcactcagggcaatgcttatgctgataagggaactaaaaagtggaagaaggaggcagaagagggagaaccagagagatggcagcctgagaaggacttgcctgagaaggactcggccgacattgctggctttgaagatggagaaatgagactgagccaaggaatgcaggtggcctctggtgctgcaaaagacaaggaaatggattctcccacagaccctccagaaggaatgcagacctgccaacactatgattttagtccagtgagacccattttggaatgctggcctccagaaccctaa

SEQ ID NO: 123173 - DNA, 730 bp, Homo sapiens
tttcgtgggggctgtctgagaagctttgaggcagtacagcctaggtaatttgctgagcttgatgggtgtcagggtcagtccaagtgaaagtggagagaggctgggatgaagggtgcaaaggaatagtaaagaaagcatgtttgacatatacgaacagaataatgcattgtgtagggaggtattgagcataggagagtatatgggtttggcaccatggggtgaataggcaaaacaatttggttgataaggcatagatcgctgaactaacttgtaaggcttgtctggtttcaggacaggtaaaatgggggaattgtaaggagagtttatagggtttaaaaggccatgctgtaacaggcgaatgataacaggctttaatctttttaaagcgtgctgcgggaatgggatactggcattgagtgcggtaagggtgattaggttttaatgagatggtaaggggtgcatgatcggtcgtcaaggagggagtagagatatcttatacttgtgggttaaggtgggggtatacaagaggaggacacaaaggaggctttggattgggaagaagggtggcaatgagatacagctgtagtccaggaatagtcagggaagcagataatttagttaaagtgtctcagcctaataagggaactgggcagatggggataactaaaaaggagtgcttaaaagagtattgtctaagttggcaccagagttggggagttttaaagaggtt

SEQ ID NO: 123174 - DNA, 1406 bp, Homo sapiens
tcaccaaacggaaccccctttaatctgatgtgaaggcaaatctctccaccgggggacccgttgggtgcggcggagacacccttcggtggctgagaaaccctcagacgccgtggaagcaccaggggtctgagcgcccagtgcgggaggtgcggggccggcttccctccccggggctggagccttcaggagcgccgcccccacccggcttcctccgagggcagtgctggactctggcctggcccctggccggccgctgcccttggcctcgtccaacccacacccgcggggcggaggctcctgctgtgcacaagcccggggcgccggggtggggcggctgggtctgggcccaggtgtcccgaatccaaaagcatcccactgcgctgcctgtaaattagcgatttcggatctggcttcagcattcttcctgggcacgggcatccttctgcccctgcagactggcagagcagcagaggcaaagtggacaatggggttctctgcctgggccactcccttctctggaccctggaccctggacagggatttgagtggggaggggcctgccttcctgtaaggcttgtctggttttaggacaggtaaaatgggggaattgtaaggagagtttataggctttaaaaggccatgctgtagcaggcgagtgataacaggctttaatctttttaaagcatgcttgactatgcctttggctccagccacctttttaagagtaaattgctgggcaggtgggggagggctagtcacggaacgaaactgtaagccggaccaggtgtgaggaggagaggtgataaaaggattatagggtggaggagcagaggctgaggaagaattgggacctagatcggcctggagaggagcagccctacaccacccagtccaaggctctatattgctggcaacactcacatccctgtccagatcttccccatcttcagaggccttgttcaccccagacctctcctccaactcctgtgacaaatgtctttggtctttgatgttggtgaccttcagatggagtttttgtggggatgtcctttttgttgatgttgatgctattcctttctgtttggttagttttccttctaacagtcagacccctttgctgccggtctgctggcgtttgttggaggtccattccagaccctgtttgcctggctatcaccagcagaggctgcagaacagcaaagattgttgcctgttccgtcctctggaagcttcgtcccagaggggcacccaccaaatgccagccagagctctcctgtatgaagtgtctgttgacccctgagctcacatgtggcacccttgtggtcccctgttgggctctccttgagctctagagcttgttgtggagttccctgagaatagaactccacttctgctgcccatgccat

SEQ ID NO: 123175 - DNA, 912 bp, Homo sapiens
gttcttgtgtgctggagatgtggctggggtttgtctcacagtggaggcaaggaattgcaacttttttctgttatttcacaccttgaaggtgaggttaattaagtcctgttgtggggtatgagggccagattctaatttttggagttttatttaatgtcgggagcagattgggtaataaagtgtatattgagaataagatggccttcctgacccttcagggtcctagggctgtaaagagtcttaagggttgctgctaaatgggccatgaactgggctgggtttttcatatttgatgaaaaagagcctaaacgctaactgattttgggagaggttggataaagaaaaaggagcattaaccttgactatgcctttggctccagccacctttttaagagtaaattgctgagcaagttgggggagggctaagtcacggaacgaaactgtaagctggaccaggtgtgaggagggggaggtgacaaaaagattatagggtggaggagcagaggctgaggaagaattgtgacctagctcggcctggagaggagcagcctggggaggaagggagaggtcagatgggtctgtagaaaaggaagattagaaagactcagcgatgcttggggttggtactgaggggacaggcgggagggaaagaaggaagatttgggacgagttgcactgggcacagagactaggaagggactgatgtgtaaaagaatgcctggacgtcaggcacctcagaccatttgcctattttacaacaagaattatttagatcttgcaagatggaaaaattcaaagtgccattttctggttatttggaactactgtcgagtttgtattggggtcaagcggcatagcagaagaaaataaggcatttaggttttaggtcaggtgtgagttgaagaggtttta

SEQ ID NO: 123176 - DNA, 7071 bp, Homo sapiens
gtgagaataatgtttgaggtacaggacttgaaatacgcgaccttggccacagtgtcgcgctgcggcatggtctggttcagtgaggatgtgctgagcaccgacatgatcttcaacaacttcctggccaggctgcgcacatcccgctggatgaaggggaggatgaggcacagcggcggcatccaaagagatgcagctacgatcatgcaaccgtacttcacgtccaacggcctggtcaccaaggcgctagagcacgccttccagctggagcacatcatggacctaacacgcctgcgctgcctgggctcgctcttctccatgctgcaccaggcctgccgcaacgtggcgcagtataacgccaaccatcccgacttccccatgcagatcgagcagctggagcgctacattcagcgatatctggtttatgccatactctggtccctgtctggagacagccggctaaaaatgagagcagagctgggtgaatacatcagaagaatcacgaccgtgcctctgcccactgcgcccaacatacccattatcgattatgaggtgtccatcagcggagaatggtctccgtggcaggccaaggtgcctcagattgaagtggagacgcacaaggtggcagcccctgatgtcgtcgtgccaacgctggacacagtccgccacgaagccctcttgtacacttggctggccgaacacaagcccctggtcttgtgtggccctcctgggtctggcaagaccatgacactcttcagcgccctccgggccttgcctgacatggaggtggtgggtctcaacttctccagtgctactactccagagctgcttctgaagacttttgatcactactgcgagtacaggcgcacacctaatggggtggttttggctcctgttcaacttggaaagtggctggtgttgttctgtgatgaaatcaacttgccagatatggataaatatgggacccagagggtcatatccttcatcagacagatggtggagcacggaggcttttaccgtacctcagatcaaacatgggtgaagctggagagaatccagtttgttggggcttgtaatccccccacagaccctggaagaaagcccctctcacacaggttcctgcgccacgtgcctgtcgtgtatgtggattacccgggccccgcctccctcacacagatctacggcaccttcaaccgcgccatgctgaggctcattccatccctgcggacgtatgcagagccgctcactgctgccatggtggagttctacaccatgtctcaggagagattcacccaggatacacaacctcactatatctattcaccccgtgaaatgactaggtgggtgagaggcatctttgaagcgctgagacctctggagaccctgcctgttgaaggcctcattcggatttgggcacatgaagctctgcgtctcttccaagatagactcgtagaggatgaggagaggcgttggactgatgagaacatcgacacggttgctctgaagcacttccctaacatcgacagagagaaggcaatgagccgacccatcttgtacagcaactggctgtcaaaggattacatcccagtagaccaagaagagttaagagattatgtcaaagctaggctgaaggtcttttatgaagaagaacttgatgttccgctggtgctgtttaatgaagtcctagaccacgtgctgaggattgacagaatattccgtcaacctcaaggccacttgcttctgattggtgttagtggagcaggaaaaactaccctgtctcgtttcgtcgcctggatgaacggtttgagtgtgtaccagattaaggtccataggaagtacacaggggaagactttgatgaagatctacggacagtgttgagacgttctggctgtaaaaatgaaaagatagcatttataatggatgaatctaatgtgttagattctggattcctggagcgaatgaatacccttctggccaatggagaggtgcctggtctctttgaaggagacgagtatgccaccttgatgacgcagtgcaaagagggggcacagaaggaaggcctgatgctggactcgcacgaggagctctacaagtggttcactagccaggttatccgcaacctccacgtcgtgttcaccatgaacccgtcctcggagggactcaaggaccgggcagctacatcaccagcacttttcaacaggtgtgtgttgaattggtttggagactggtccaccgaagcactgtatcaggttggcaaagaattcacaagtaagatggatctggagaagccaaattacatcgtgcctgattacatgccagttgtgtatgataagctgccgcagccaccatcccatcgggaagccattgtgaacagctgtgtgtttgttcatcagactcttcaccaggcgaatgctcggctagcaaagcgaggcggcagaacgatggccatcacccctcgccactacctggacttcatcaatcactatgccaacctgttccacgagaagcggagcgagctggaggagcagcagatgcacttgaacgtggggctcaggaagatcaaagagacagtcgaccaggtagaagaactgcgtcgtgacttgaggataaagagccaagagctggaggtgaagaatgcagcagccaatgacaagctgaaaaagatggtgaaagaccagcaggaggctgaaaagaagaaggttatgagccaagaaatccaggaacagctgcataagcagcaggaggtaattgcagacaaacagatgagtgtcaaagaagatcttgataaggtggaacctgccgtcattgaggcccagaatgctgtgaagtcgatcaagaagcagcacctggtggaggtgaggtccatggccaaccctcctgctgctgtgaagctggcgctggagtccatctgcctgctgctgggggaaagcaccacagactggaagcagatccgctccatcatcatgcgggagaacttcatccccaccatcgtcaacttctctgcagaggagatcagtgacgccataagggagaagatgaagaaaaattacatgtccaatccaagttacaattatgaaattgtgaatcgggcttccctggcttgcggccctatggtgaaatgggcaattgcacagcttaactatgcagacatgttaaagagagtggagcccctacgcaatgagctgcagaagctggaagatgacgccaaggacaaccagcagaaggccaacgaggtggagcagatgatccgagacctggaagccagcatcgcccgctacaaggaggaatacgccgtcctgatctcagaggcccaggccatcaaggcagacctggcagctgtcgaggcaaaagtaaaccggagcactgctcttctgaagagcttgtctgctgaacgtgaacgatgggaaaaaacaagtgaaactttcaaaaaccagatgtccaccattgctggggactgtctcttgtcagctgcgttcattgcctacgcgggttactttgaccagcagatgcgtcagaacttgttcactacctggtcccatcacctacagcaagccaacatccagttccgtacagatattgccaggacggaatacctttccaatgctgatgagcgtcttcgctggcaggccagctccttgcctgctgatgacctttgcacagaaaatgccatcatgctgaaacgattcaataggtatccgctgatcattgacccctctggacaggccacagaattcattatgaatgaatataaggatcgtaagatcacacggaccagcttcctggatgacgccttcagaaagaacttagagagtgcactgagattcggtaacccccttctggtccaggatgtggaaagctacgatccagttttgaacccggtgctgaaccgtgaagtgcggcgaacaggggggagagtgctgatcactctcggggaccaggacatagacctgtcgccatcgtttgtcatcttcctgtccacccgggatccaactgtcgagttcccaccagatctctgttcccgggttacttttgtaaacttcacagttacccgtagcagtttacaaagccagtgtctaaatgaagtacttaaagcagaaagacctgatgtggacgagaaacgatctgatcttcttaaacttcaaggggaatttcagctccgtttgcgtcagctggaaaaatctctactacaagctctgaacgaggtgaaagggcgcattttggatgacgacacgatcataaccactctggagaacctgaagagagaggctgcagaggtcaccaggaaagttgaggagacggacattgtcatgcaggaggtggagaccgtgtcccagcagtacctcccgctctccaccgcctgcagcagcatctacttcaccatggagtccctcaagcagatacacttcttgtaccagtactccctccagtttttcctggacatttatcacaacgtcctatacgagaacccgaacctgaagggtgtcaccgaccacacacagcgcctgtccattataacaaaggacctcttccaggtggcgtttaaccgagtggctcgaggcatgctgcatcaggaccacattacctttgccatgctgctggcaagaatcaaactgaagggcaccgtgggggagcccacctacgatgcagaattccagcacttcttgagaggaaatgagattgtcctgagtgctggctccacccccaggatccagggcctgactgtggagcaggcggaggcggtgcaatttggcatctggctggacagcagctccccggagcagactgtgccctacctctggagtgaagaaacacctgcaacacccattggccaggccatccaccgcctgctcctgatccaggctttccggcccgatcgcctgttggccatggcccacatgtttgtttcaacaaaccttggggagtctttcatgtccatcatggagcagccgctcgacctgacccacattgtgggcacagaggtgaagcccaacactcctgtcttaatgtgctctgtgcctggttatgatgccagtggacatgtcgaggaccttgcagccgagcagaacacgcagatcacttcaattgcaatcggctctgcagaaggctttaaccaagcagataaggcaataaacaccgctgtaaagtcgggcaggtgggtgatgctgaagaatgtgcatctggccccagggtggctgatgcagctggagaagaagttgcattccctgcagccgcatgcctgcttccgactcttcctcaccatggagatcaaccccaaggtgcctgtgaatctgctccgtgcgggccgcatctttgtgttcgagccaccgccaggggtgaaggccaacatgctgaggacgttcagcagcattcccgtctcacggatatgcaagtctcccaacgagcgtgcccgcttgtacttcctgctggcctggtttcatgcgatcatccaagaacgcttacgatacgcaccactggggtggtcaaagaagtatgaatttggagagtctgacctgcggtcagcttgcgatacggtggacacgtggctggatgacacggccaaggcaagtggcaggcagaacatctcaccggataagatcccgtggtctgcactaaagaccttaatggcccagtccatttatggcgggcgcgtggacaacgagtttgaccagcgtctgctcaacaccttcctggagcgcctgttcacaaccaggagtttcgacagtgagtttaagctggcatgcaaggtcgacggacataaagacattcaaatgccagatggcatcaggcgagaggagtttgtgcagtgggtggagttgctccccgacacccagacgccctcctggctgggcctgcccaacaacgccgagagagtcctccttaccacacagggtgtggacatgatcagtaaaatgctgaagatgcagatgttggaggatgaggacgacctggcctacgcagagactgagaagaagacgaggacagactccacgtccgacgggcgccctgcctggatgcggacactgcacaccaccgcgtccaactggctgcacctcatcccccagacgctgagccacctcaagcgcaccgtggagaatatcaaggatcctttgttcaggttctttgagagagaagtgaagatgggcgcaaagctgcttcaggacgttcgccaggaccttgcagatgtcgtccaggtgtgcgaaggaaagaagaagcagaccaactacttgcgcacgctgatcaacgagctagtgaaagggatcttgcctcggagctggtcccactacacggtgcctgccggcatgaccgtcatccagtgggtgtccgacttcagcgagaggatcaaacagctgcagaacatctcactggcagctgcatctggtggcgccaaggagctaaagaacatccacgtgtgcctgggtggcctgttcgtgcctgaggcgtacatcactgccaccaggcagtatgtggcccaggccaacagctggtccctggaggagctctgcctggaagtcaacgtcaccacctcacagggcgccacccttgacgcttgcagcttcggagtcacgggtttgaaacttcaaggggccacgtgcaacaacaacaagctgtcactgtccaatgccatctcaaccgcccttcccctgacgcagctgcgctgggtcaagcagacaaacaccgagaagaaggccagtgtggtaaccttacctgtctacctgaacttcacccgtgcagacctcatcttcaccgtggacttcgaaattgctacaaaggaggatcctcgcagcttctacgagcggggtggtggccatgcccctcgagctctgcttggcacgtgtctgccagtctcagggggctccatgggagtgaggaagggctcggcggccctgggggtctggtcctcctccgccatcctcgagtcctcgggctacgtgccctcatctttggcttccagggacacgggcccagctggccacttctatgacaagaatggcctgaagggcgttctggggagcctccaccttcacaccgaaggccgccaaggtggttggcaagaagctgaaatgggcgtttaa

SEQ ID NO: 123177 - DNA, 505 bp, Homo sapiens
gctattaaaaagggaattaaactttgatttttataaaatttcaacaacaaaagaaagacacttacagcaaagttaacctaaagacagtggttcccagtcttcttgcatcacagacacccaatgcacctttcctagcccctcaacgaaggctctgcctcgcctaggagagagcgcacatccccacaggtgcagcatttcagaggtcctcagacctgtggtctggcgcagtggtgagctctgtgaagcccctgatgccccctgacctgaatgtagcgctccagctgctcgatctgcatggggaagtcgggatggttggcgttatactgcgccacgttgcggcaggcctggtgcagcatggagaagagcgagcccaggcagcgcaggcgtgctaggtccatgatgtgctccagctggaaggcgtgctctagcgccttggtgaccaggccgttggacgtgaagtacggttgcatgatcgtaggaattccgccactctggaatagtggtc

SEQ ID NO: 123178 - DNA, 497 bp, Homo sapiens
  misc_feature (1)...(497): n = a,t,c or g
attcggcacagtgtgaatctgctccgtgcgggccgatctttgtgttcgagccaccgccagggttgaaggccaacacgcagagaacgtttgagtctgggatgaagcatgtacgtattatttatatgatggaatttcacgtttttatgtaagcatgaaacacaggcagtatgagagaaagcaaggcccgtcatgctgtccgtacactacgtatgctgtagagccattttgtatgttgtgtaaaacaaaaaggcattgatgaaaaagcaaaaggtgatgtatgtatatgaggaaaattaattgttacgatatcattccagtacgttttgttgttacatttttagtcttgtttactttctcttcattgtttaaggggggtggcgaactgttacagttttcccagctagtttacccctttttaggaggaggaattaggagagtttttagggagggaaacnggggagaggaaggaccatttgtggnatttgccngtttnttcc

SEQ ID NO: 123179 - DNA, 2343 bp, Homo sapiens
caatttggcatctggctggacagcagctccccggagcagactgtgccctacctctggagtgaagaaacacctgcaacacccattggccaggccatccaccgcctgctcctgatccaggctttccggcccgatcgcctgttggccatggcccacatgtttgtttcaacaaaccttggggagtcttgtcatgtccatcatggagcagccgctcgacctgacccacattgtgggcacagaggtgaagcccaacactcctgtcttaatgtgctctgtgcctggttatgatgccagtggacatgtcgaggaccttgcagccgagcagaacacgcagatcacttcaattgcaatcggctctgcagaaggctttaaccaagcagataaggcaataaacaccgctgtaaagtcgggcaggtgggtgatgctgaagaatgtgcatctggccccagggtggctgatgcagctggagaagaagttgcattccctgcagccgcatgcctgcttccgactcttcctcaccatggagatcaaccccaagggtgcctgtgaaatctgctccgtgcgggccgcatctttgtgttcgagcccaccgccaggcggtgaaggccaacatgctgaggacgttcagcagcattcccgtctcacggatatgcaagtctcccaacgagcgtgcccgcttgtacttcctgctggcctggtttcatgcgatcatccaagaacgcttacgatacgcaccactggggtggtcaaagaagtatgaatttggagagtctgacctgcggtcagcttgcgatacggtggacacgtggctggatgacacggccaaggcaagtggcaggcagaacatctcaccggataagatcccgtggtctgcactaaagaccttaatggcccagtccatttatggcgggcgcgtggacaacgagtttgaccagcgtctgctcaacaccttcctggagcgcctgttcacaaccaggagtttcgacagtgagtttaagctggcatgcaaggtcgacggacataaagacattcaaatgccagatggcatcaggcgagaggagtttgtgcagtgggtggagttgctccccgacacccagacgccctcctggctgggcctgcccaacaacgccgagagagtcctccttaccacacagggtgtggacatgatcagtaaaatgctgaagatgcagatgttggaggatgaggacgacctggcctacgcagagaccgagaagaagacgaggacagactccacgtccgacgggcgccctgcctggatgcggacactgcacaccaccgcgtccaactggctgcacctcatcccccagacgctgagccacctcaagcgcaccgtggagaatatcaaggatcctttgttcaggttctttgagagagaagtgaagatgggcgcaaagctgcttcaggacgttcgccaggaccttgcagatgtcgtccaggtgtgcgaaggaaagaagaagcagaccaactacttgcgcacgttgattcaacgagctagtgaaagggatcttgccttcggagctggtcccactacacggtgcctgccggcattgaccgtcatccagtggggtgttccgatttcagcgaggaggattcaaacagctgcagaacatctcactggcagctgcatctggtggcgccaaggagctaaagaacatccacgtgtgcctgggtggcctgttcgtgcctgaggcgtacatcactgccaccaggcagtatgtggcccaggccaacagctggtccctggaggagctctgcctggaagtcaacgtcaccacctcacagggcgccacccttgacgcttgcagcttcggagtcacgggtttgaaacttcaaggggccacgtgcaacaacaacaagctgtcactgtccaatgccatctcaaccgccctttccctgacgcagctgcgctgggtcaagcagacaaacaccgagaagaaggccagtgtggtaaccttacctgtctacctgaacttcacccgtgcagacctcatcttcaccgtggacttcgaaattgctacaaaggaggatcctcgcagcttctacgagcggggtggtggccatgcccctcgagctctgcttggcacgtgtctgccagtctcagggggctccatgggagtgaggaagggctcggcggccctgggggtctggtcctcctccgccatcctcgagtcctcgggctacgtgccctcatctttggcttccagggacacgggcccagctggccacttctatgacaagaatggcctgaagggcgttctggggagcctccaccttcacaccgaaggccgccaaggtggttggcaagaagctgaaatgggcgtttaa

SEQ ID NO: 123180 - DNA, 6601 bp, Homo sapiens
  misc_feature (1)...(6601): n = a,t,c or g
cgcacaaggtggcagcccctgatgtcgtcgtgccaacgctggacacagtccgccacgaagccctcttgtacacttggctggccgaacacaagcccctggtcttgtgtggccctcctgggtctggcaagaccatgacactcttcagcgccctccgggccttgcctgacatggaggtggtgggtctcaacttctccagtgctactactccagagctgcttctgaagacttttgatcactactgcgagtacaggcgcacacctaatggggtggttttggctcctgttcaacttggaaagtggctggtgttgttctgtgatgaaatcaacttgccagatatggataaatatgggacccagagggtcatatccttcatcagacagatggtggagcacggaggcttttaccgtacctcagatcaaacatgggtgaagctggagagaatccagtttgttggggcttgtaatccccccacagaccctggaagaaagcccctctcacacaggttcctgcgccacgtgcctgtcgtgtatgtggattacccgggccccgcctccctcacacagatctacggcaccttcaaccgcgccatgctgaggctcattccatccctgcggacgtatgcagagccgctcactgctgccatggtggagttctacaccatgtctcaggagagattcacccaggatacacaacctcactatatctattcaccccgtgaaatgactaggtgggtgagaggcatctttgaagcgctgagacctctggagaccctgcctgttgaaggcctcattcggatttgggcacatgaagctctgcgtctcttccaagatagactcgtagaggatgaggagaggcgttggactgatgagaacatcgacacggttgctctgaagcacttccctaacatcgacagagagaaggcaatgagccgacccatcttgtacagcaactggctgtcaaaggattacatcccagtagaccaagaagagttaagagattatgtcaaagctaggctgaaggtcttttatgaagaagaacttgatgttccgctggtgctgtttaatgaagtcctagaccacgtgctgaggattgacagaatattccgtcaacctcaaggccacttgcttctgattggtgttagtggagcaggaaaaactaccctgtctcgtttcgtcgcctggatgaacggtttgagtgtgtaccagattaaggtccataggaagtacacaggggaagactttgatgaagatctacggacagtgttgagacgttctggctgtaaaaatgaaaagatagcatttataatggatgaatctaatgtgttagattctggattcctggagcgaatgaatacccttctggccaatggagaggtgcctggtctctttgaaggagacgagtatgccaccttgatgacgcagtgcaaagagggggcacagaaggaaggcctgatgctggactcgcacgaggagctctacaagtggttcactagccaggttatccgcaacctccacgtcgtgttcaccatgaacccgtcctcggagggactcaaggaccgggcagctacatcaccagcacttttcaacaggtgtgtgttgaattggtttggagactggtccaccgaagcactgtatcaggttggcaaagaattcacaagtaagatggatctggagaagccaaattacatcgtgcctgattacatgccagttgtgtatgataagctgccgcagccaccatcccatcgggaagccattgtgaacagctgtgtgtttgttcatcagactcttcaccaggcgaatgctcggctagcaaagcgaggcggcagaacgatggccatcacccctcgccactacctggacttcatcaatcactatgccaacctgttccacgagaagcggagcgagctggaggagcagcagatgcacttgaacgtggggctcaggaagatcaaagagacagtcgaccaggtagaagaactgcgtcgtgacttgaggataaagagccttgagcttttggggaagaacgcagcagccaatgacaagctgaaaaagatggtgaaagaccagcaggaggctgaaaagaagaaggttatgagccaagaaatccaggaacagctgcataagcagcaggaggtaattgcagacaaacagatgagtggcaaagaagatcttgataaggtggaacctgccgtcattgaggcccagaatgctgtgaagtcgatcaagaagcagcacctggtggaggtgaggtccatggccaaccctcctgctgctgtgaagctggcgctggagtccatctgcctgctgctgggggaaagcaccacagactggaagcagatccgcttcatcattcatgcgggagaacttcatccccaccatcgtcaacttctctgcagaggagatcagtgacgccataagggagaagatgaagaaaaattacatgtccaatccaagttacaattatgaaattgtgaatcgggcttccctggcttgcggccctatggtgaaatgggcaattgcacagcttaactatgcagacatgttaaagagagtggagcccctacgcaatgagctgcagaagctggaagatgacgccaaggacaaccagcagaaggccaacgaggtgggagcagatgatctcgagacctgtaagccaggattggcctgctacaaggaggaatacgccgtccttatctcagaggcccaagccatcaaggcagaccttgcagctttcgaggcaaaagtaaaccggagcactgctcttctgaagagcttgtctgctgaacgtgaacgatgggaaaaaacaagtgaaactttcaaaaaccagatgtccaccattgctggggactgtctcttgtcagctgcgttcatttgcctaccccgggttactttgaccagcagatgccgtcagaacttgttcactacctggtcccatcacctacagcaagccaacatccagttccgtacagatattgccaggacggaatacctttccaatgctgatgagcgtcttcgctggcaggccagctccttgcctgctgactgacctttgcacagaaaatgccatcatgctgaaacgattcaataggtatctcgctgatcattgacccctctggacaggccacagaattcattatgaatgaatataaggttcgtaagatcacacggaccagcttcctggatgacgccttcagaaagaacttagagagtgcactgagattcggtaaccccccttcgtggtccaggatgtggaaagctacgatccagttttgaacccggtgctgaaccgtgaagtgcggcgaacaggggggagagtgctgatcactctcggggaccaggacatagacctgtcgccatccgtttgtcatcttcctgtccaccccgggatccaactgtcgagttcccaccagatctctgttcccgggttactttttgtaaactttcacagttacccgtagcagtttacaaaagccagtgtcttaaattaaagtacttaaagcaagaaaggacctgatgtggacgagaaacgatctgatcttcttaaacttcaaggggaatttcagctccgtttgcgtcagctggaaaaatctctactacaagctctgaacgaggtgaaagggcgcattttggatgacgacacgatcataaccactctggagaacctgaagagagaggctgcagaggtcaccaggaaagttgaggagacggacattgtcatgcaggaggtggagaccgtgtcccagcagtacctcccgctctccaccgcctgcagcagcatctacttcaccatggagtccctcaagcagatacacttcttgtacacagtactccctccagtttttcctggacatttatcacaacgtcctatacgagaacccgaacctgaagggtgtcaccgaccacacacagcgcctgtccattataacaaaggacctcttccaggtggcgtttaaccgagtggctcgaggcatgctgcatcaggaccacattacctttgccatgctgctggcaagaatcaaactgaagggcaccgtgggggagcccacctacgatgcagaattccagcacttcttgagaggaaatgagattgtcctgagtgctggctccacccccaggatccagggcctgactgtggagcaggcggaggcggtggtgaggctgagctgccttcccgcgtttaaggacttgattgcaaaggttcaggcagacgagcaatttggcatctggctggacagcagctccccggagcagactgtgccctacctctggagtgaagaaacacctgcaacacccattggccaggccatccaccgcctgctcctgatccaggctttccggcccgatcgcctgttggccatggcccacatgtttgtttcaacaaaccttggggagtctttcatgtccatcatggagcagccgctcgacctgacccaaattgtgggcacagaggtgaagcccaacactcctgtcttaatgtgctctgtgcctggttatgatgccagtggacatgtcgaggaccttgcagccgagcagaacacgcagatcacttcaattgcaatcggctctgcagaaggctttaaccaagcagataaggcaataaacaccgctgtaaagtcgggcaggtgggtgatgctgaagaatgtgcatctggccccagggtggctgatgcagctggagaagaagttgcattccctgcagccgcatgcctgcttccgactcttcctcaccatggagatcaaccccaaggtgcctgtgaatctgctccggtgcgggccggcatcttttgtgttcgagccaccgccaggggtgaaggccaacatgctgaggacgttcagcagcattcccgtctcacggatatgcaagtctcccaacgagcgtgcccgcttgtacttcctgctggcctggtttcatgcgatcatccaagaacgcttacgatacgcaccactggggtggtcaaagaagtatgaatttggagagtctgacctgcggtcaactttgcgattacggtgggacacgtggcttggatgacangggccaagggcagggcagaacatctcaccggattaagatccccgtggtctgcacttaaaagaccttaatggcccagtccatttatggcgggcgcgtggacaacgagtttgaccagcgtctgctcaaaaacctttcctggaagcgcctgttcaaaaccaaggagtttccgacagtgagtttaagcttggcatgcaaggtcgacggacataaagacattcaaatgccagatggcatcaggcgagaggagtttgtgcagtgggtggagttgctccccgacacccagacgccctcctggctgggcctgcccaacaacgccgagagagtcctccttaccacacagggtgtggacatgatcagtaaaatgctgaagatgcagatgttggaggatgaggacgacctggcctacgcagagaccgagaagaagacgaggacagactccacgtccgacgggcgccctgcctggatgcggacactgcacaccaccgcgtccaactggctgcacctcatcccccagacgctgagccacctcaagcgcaccgtggagaatatcaaggatcctttgttcaggttctttgagagagaagtgaagatgggcgcaaagctgcttcaggacgttcgccaggaccttgcagatgtcgtccaggtgtgcgaaggaaagaagaagcagaccaactacttgcgcacgctgatcaacgagctagtgaaagggatcttgcctcggagctggtcccactacacggtccctgccggcatgaccgtcatccagtgggtgtccgacttcagcgagaggatcaaacagctgcagaacatctcactggcagctgcatctggtggcgccaaggagctaaagaacatcacgcgtgtgcctgggtgggcctgttcgtgcctgaggcgtaacatcactgccaccaggcaagtatgtgggcccaggccaaacagactggtccctgggaggagctctgcctgggaagtcaacgtcaccaccttcacaggggcgccacccttgacgtcttgcagctttcgggagtcacgggtttgaaacttcaagggggccacgtgcaaccaacaaacaagctgtcactgtcccaatcccatcttcaaaccgccccttccacctgaacgcagctgcgctggggtcaagccagacaaaacaccgagaaagaaggcccagtgtggttaaccttaacctgtctacctggaacttcaacccgtgccagacctcaatcttcaccgtgggactttcgaaattgcttacaaaaggaggatcctcgcagcttctacgagcggggtgtcgcagtctttgttgacagaggtgaactttttctagccgccccctttctgtaatagtgaaagttcggtatttaacatttatttcatttttaaaatatttggaaggtctgagcttgtgaaaagaaagtgcgtggtctgacgttggaggaagctgaatggaatctgcacggttgggagtggtggaaattggaaggataccaggaggtatttgggaaggccaatggcggtggctccctttgaggaaaataaaaccctaagcatgaaaaaaaaaaaaaaaaagg

SEQ ID NO: 123181 - DNA, 1453 bp, Homo sapiens
tcagctggttccaaccaccttcaggtcccccatggcctggagcagccgccacctcccccgctggcacgcgtcaatcctggcgtccgcatcactcaccacctccctgatggatgttgagccctgagcccaagtggaactgcccagccatccccgggtccccagcccagcaccaggcccggccccatgagtgcttgagccaccaaggagcctccttacttctgtagtgggtccacagggcccctcctgggctggtgggggaatggctgtcaggcaggcacttgaggaagcagcttgcagggacccgtgcattgctatctcctcctgggctggaggggacaggccattatggtggctggatggtctccttctgaggcgggtgtatcctgactcatgccctccgtgcccttctcgtattcctgcaatttttggagcatccctacagggtagtattaaccccattttgcagatgaggaaacttttcccccatgacatggacttattgtagggccaggacccattttcctgtagaaggcccgagtcctggaaccgtgacgtgggctggctggcgctgggtgttttctgtcttgttcctttctcccttgtggggtctttgaactgaactgtgatctggaagctcagcgggaacacccggttcctccacgggaccacagccttagtgccgtggggggggcgtgaggactgggtctctccaatgtgaaggttcatttcctccctctgtaattagtaagtagtctgtaggggtgatcattccacacgctcgaaataaactgcccggcacaactgttcacctaatggttttagcgtccatcaatgatctttgcatgagttggtgatatcgggattgtcaaggtggccgtaaacccgacaatctttctgtaagtattagccagtgttctgttaagagcagcatcttcccactcttatctttagtgtcgcccttgtgtcatggattttgttgttcaaatgttataaccagtgacaaaactagcagacatgtaattacatttctgggtcataaagcaggaggacctcttgcagtgcacatgtgccggatacatgctttgcgtgcccgctatacgaagagctcctgcagattaagaaaacgatttgaaaaacccaagagaaaaacaggccaaaagaaaagaaagacaggcaaagagtaggatcaagacaaatgaaagaagaggaaatgctttgtgttgctgatgaacatgaaaaggcgcaacctcactagtaatcaggggcgtgcccatcagaagcgccagggactggttccccggatggaagagcagactgctggcgcacagggtgcaccgacatccccacccacggctggtggagagcaggagaagggattgctacgaccaacctggaaaagtaacggcgttatccattcacatgaagcattcacatgccttcggaagaacacact

SEQ ID NO: 123182 - DNA, 705 bp, Homo sapiens
atggccatgggattgttcttcattccctttctcaactgcacccagcagcagtggtttttgctaggccttttgaagacagcaggaatctgggagaaggaacatcatcgtctttcacagcatggaaacatcaatcttattccagagaagggaagaagtccccaaagccaaaagctgggtctcttggatcgggttcgcctttctaatcctcgtggtagcaatactaaaggaaagctatttacccctctgaatgtagatgccatagaagaaagtccttctaaagaaccaaagcctgttggcttaaacaataaagagcgtttccgcacggccttccgcatgaaagcctacgctttctggcagagttctgaagatgccgggacaggtgaccccatggcggaagacaggggctatgggaatgacttccccatcgaagacatgatccccaccctgaaggccgccatccgagccgtcagaattctacaattccgtctctataaaaaaaaattcaaggagactttgaggccttacgatgtgaaggatgtgattgagcagtattctgccgggcatctcgacatgctttccaggataaagtaccttcagacgagacatcaagaagctgtgcagtgcggccagcaggaccgcgaagataagaagctacttgcggacctgctgcacttgaggtccaagtggaaatctccatccggctga

SEQ ID NO: 123183 - DNA, 1320 bp, Homo sapiens
atgactcaaaggttcctgattgtcctggggtgcttgattctggctgtcctgaccacattcaaggagtatgagactgtctcgggagactggcttctgttactggagacatttgctattttcatctttggagccgagtttgctttgaggatctgggctgctggatgttgctgccgatacaaaggctggcggggccgactgaagtttgccaggaagcccctgtgcatgttggacatctttgtgctgattgcctctgtgccagtggttgctgtgggaaaccaaggcaatgttctggccacctccctgcgaagcctgcgcttcctgcagatcctgcgcatgctgcggatggaccggagaggtggcacctggaagcttctgggctcagccatctgtgcccacagcaaagaactcatcacggcctggtacatcggtttcctgacactcatcctttcttcatttcttgtctacctggttgagaaagacgtcccagaggtggatgcacaaggagaggagatgaaagaggagtttgagacctatgcagatgccctgtggtggggcctgatcacactggccaccattggctatggagacaagacacccaaaacgtgggaaggccgtctgattgccgccaccttttccttaattggcgtctccttttttgcccttccagcgggcatcctggggtccgggctggccctcaaggtgcaggagcaacaccgtcagaagcactttgagaaaaggaggaagccagctgctgagctcattcaggctgcctggaggtattatgctaccaaccccaacaggattgacctggtggcgacatggagattttatgaatcagtcgtctcttttcctttcttcaggcaagtggggactcacctgaatgctcagggcgtgaccagccatctctcctgcgaggaatctaactttgatcctgaaggcaatgagaagctagatgagccagagaatgacatcagtagatctacttttcaggaagatgatagcaaagagtgtggaggatggatctatggactcaagtcaaagcaagaagatcagctagcaaatattgcagggttcagagtaagaggaaatgagggcctagaccaaggaaagaacagctggaggcagcatccagatttcagtgcctacatctgtgaaatgaaggaattaaagcagatggtccccaaggcctgtcagggctattatcatgggttcagactttcagccaataaccctgaattagctccacgtttaagtttcatgtggtcacaccagttatacgagttcaatatgaatgcagagaaggaaccaaatggcaattag

SEQ ID NO: 123184 - DNA, 2911 bp, Homo sapiens
atggggctcaaggcgcgcagggcggcgggggcggctggcggcggcggcgacgggggcggcggaggcggcggggcggctaacccagccggaggggacgcggcggcggccggcgacgaggagcggaaagtggggctggcgcccggcgacgtggagcaagtcaccttggcgctcggggccggagccgacaaagacgggaccctgctgctggagggcggcggccgcgacgaggggcagcggaggaccccgcagggcatcgggctcctggccaagaccccgctgagccgcccagtcaagagaaacaacgccaagtaccggcgcatccaaactttgatctacgacgccctggagagaccgcggggctgggcgctgctttaccacagcgttggtgttcctgattgtcctaggggtgcttgattctggctgtcctggaccacattcaaggagtatgagactgtctcgggagactggcttctgttactggagacatttgctattttcatctttggagccgagtttgctttgaggatctgggctgctggatgttgctgccgatacaaaggctggcggggccgactgaagtttgccaggaagcccctgtgcatgttggacatctttgtgctgattgcctctgtgccagtggttgctgtgggaaaccaaggcaatgttctggccacctccctgcgaagcctgcgcttcctgcagatcctgcgcatgctgcgggatggaccgggagaaggtggcacctggaagcttctggggctcagccatctgtgcccacagcaaagaactcatcacggcctggtacatcggtttcctgacactcatcctttcttcatttcttgtctacctggttgagaaagacgtcccagaggtggatgcacaaggagaggagatgaaagaggagtttgagacctatgcagatgccctgtggtggggcctgatcacactggccaccattggctatggagacaagacacccaaaacgtgggaaggccgtctgattgccgccaccttttccttaattggcgtctccttttttgcccttccagcgggcatcctggggtccgggctggccctcaaggtgcaggagcaacaccgtcagaagcactttgagaaaaggaggaagccagctgctgagctcattcaggctgcctggaggtattatgctaccaaccccaacaggattgacctggtggcgacatggagattttatgaatcagtcgtctcttttcctttcttcaggaaagaacagctggaggcagcatccagccaaaagctgggtctcttggatcgggttcgcctttctaatcctcgtggtagcaatactaaaggaaagctatttacccctctgaatgtagatgccatagaagaaagtccttctaaagaaccaaagcctgttggcttaaacaataaagagcgtttccgcacggccttccgcatgaaagcctacgctttctggcagagttctgaagatgccgggacaggtgaccccatggcggaagacaggggctatgggaatgacttccccatcgaagacatgatccccaccctgaaggccgccatccgagccgtcagaattctacaattccgtctctataaaaaaaaattcaaggagactttgaggccttacgatgtgaaggatgtgattgagcagtattctgccgggcatctcgacatgctttccaggataaagtaccttcagacgagaatagatatgattttcacccctgggacctccctccacgccaaaacacaaggaagtcttcagaaagggtcagcatttcaccttcccatcccagcaatcttcccggggattgaaccatatgtaggccagaccatccacattcagaaattcgaagaccaaaggcattgatgggggaagtttgttaaaagtttgaaaggacaggtttcagggactggggaggaagctggacttcctcgtggatatgcacatgcaacacatggaacggttgcaggtgcaggtcacggagtattacccaaccaagggcacctcctcgccagctgaagcagagaagaaggaggacaacaggtattccgatttgaaaaccatcatctgcaactattctgagacaggccccccggaaccaccctacagcttccaccaggtgaccattgacaaagtcagcccctatgggttttttgcacatgaccctgtgaacctgccccgagggggacccagttctggaaaggttcaggcaactcctccttcctcagcaacaacgtatgtggagaggcccacggtcctgcctatcttgactcttctcgactcccgagtgagctgccactcccaggctgacctgcagggcccctactcggaccgaatctccccccggcagagacgtagcatcacgcgagacagtgacacacctctgtccctgatgtcggtcaaccacgaggagctggagaggtctccaagtggcttcagcatctcccaggacagagatgattatgtgttcggccccaatggggggtcgagctggatgagggagaagcggtacctcgccgagggtgagacggacacagacacggaccccttcacgcccagcggctccatgccctctgtcgtccacaggggatgggatttctgattcagtatggaccccttccaataagcccatttaaaagaggtcactggctgacccctccttgtaatgtagacagactttgtatagttcacttactcttacacccgacgcttaccagcggggacaccaatggctgcatcaaatgcatgcgtgtgcgtggtggccccacccaggcaggggcttcccacagcctcttcctccccatgtcaccacaacaaagtgcttccttttcagcatggtttgcatgactttacactatataaatggttcccgctaatctcttctaggataaaaaaaaaaaaaaa

SEQ ID NO: 123185 - DNA, 477 bp, Homo sapiens
cattactcaactgctacacaactgcgcctagtgcacaaaaatacataagagaagagattagaattgtgtttgataaacaatcctttcaaaaaatcaagtcttttcacctgaaaagtctttatacaaatttgggttcagattaccatttagatctgaaggtaaataacatatacaaatttacaccaacttttgtaggtttttaattttaaggaatgaaggcaatgccgagtcaatctcttgacagctttaggctgtgtgtaatggctgcacacgttttccttaaaagtcaggaggccacaaattaggttaccaatctgtttaatttcaaacaaaaaaagtcagcactatataacaaaatgaaattttacctcaaatatccaaatccaataatgaaatctgaagtcgttcacctcactaaattacaagaaatttgaataacagcaacaaaatggcacataaaatgaagtttgccaactg

SEQ ID NO: 123186 - DNA, 1049 bp, Homo sapiens
  misc_feature (1)...(1049): n = a,t,c or g
ccggnccaggangggccagccaccggccgggaaaccaaacccnccagcccccacaaaaccatttaaagaaaaagcccngccgaaacaaccagatataaaaggagactgacatgaaccacaagtcacctgaaaaaacacaagaagacaaggcccccaaaaaagataaataatggccttaacaaagacatactggtttatgtttaacaactatgtttttattttccaaaagggtaaaggaaaggccttccatgttgcctatttgaaaagtacttcctcaactagccggggcatggtggccataaatccctgaaagtaggaggatcatcccccttgaaggcccaggaggtcccaggctgcagtgagctgtgaattgtgccactgcaccatagcttgggtgacagagtgagaccctgtctttaaaacaaaaagaaagtacttctctgcaagtaaattttatggatataatctttattctgattaaataaatgattaccctaatcagctattatttattattttctatttaacattcatgcctgaagtgccagagacctgcctatgtcgcataaagttaggtcagatatatgcacatgcagtgttggtgaagatcatctgaataatgatcactctcacatgccatattagttatattatagtatcactgctcattgtgcttcctctctttaataaagtataaatcaagcaattaaaagctgtgtaggcccttcccgttggctaaggttttcaaaattttttaacgtataaagagttgctgattttaacatcatattttggtcacgtttaagatgttctacagatatttttgcttcaaagcttcaaactccagctatgcctgggtctcattctatccccagaaattgacaatgcttccctacccttagggctgccccgtccccgtcccactcggtcccatttaataaatatacctcacctcccttcgccacctgctggacgcgaggggctactacgatgccatgggtgtcctgattttttatttctcagacagaactgctctgtgtgtgtctttg

SEQ ID NO: 123187 - DNA, 3228 bp, Homo sapiens
  misc_feature (1)...(3228): n = a,t,c or g
atgagctgcggccgcccccctcccgacgtggacggcatgatcaccctcaaggtggaacaacctgacctaccgcacctctcccgacagcttgaggcgcgtgttcgagaagtacgggcgcgtgggcgacgtgtacatcccgcgggagccccacaccaaggcgccccggggcttcgctttcgtccgctttcacgaccggcgcgacgcccaagacgcagaggccgtccatggacggtgcggagtgagaaggacgcgcgctgcgggtngcaggtggcgcgctatggccgccgggacctgccccgcagccgccagggacgacgccacgcggcaggtccagaggcggcggctacggacggcggagccgcagctacgggcggcggagccgcagccccaggcggcgaacaccgcaaccgtttcttttgtcccagctgctccaggtcccgcaggcgaggtcgctatagggggtctcgctatagccgttctccctacagccgatctccttacagccggtcgcgctacagccgctctccctacagcagatctcgctacagggaatctcgctacggcggatctcactacagctcatctggttacagtaactctcgctacagccgatatcacagcagccggtctcactcgaagcctgggtcctccactagctctcgctctgcatcaacctccaaatcgagctctgcgcgacgatccaagtccttctcggtctcccaggtctcgctcgcgggtccaggtcttcatctatgaccaggagtcctccccggggtatccaagaggaaatccaagtcaaggatcgcgatccaagaggccccccaagtctcctgaagaggaaggacagatgtcctcttaagaaaatgatgcatcactgaagcaacgtgatggaggacttgacggaaaaggatcacatactcagtctatggaagcaacgtccctggaagaagaggctgcctattgagacggttgtgtcacactgttgtaccttattgccagtttgaagctttgcatcacgtgggcaaaattcattctatgtgccgagtttgttggtattcacattttattgtaacttaggaggtgaaccgacctaagattacgttattgggtttggatatttgaggcaaaaatttatttttatttctatagtgatgactgttttggtttgaaatgaacagattggtaacctaatttgtggcctcctgacttttaaggaaacgtgtgcagccattacacacagcctaacgctgtcaagacattgcttcaacattgccttcattccttaaaaacctacaaaagggggggtaaattaatatggataattttatttacctccaggtctaaaaggtagggggacccaaatttgtataaagatttttcatgtgaaaggactggggttttagcaaaccacaggtctaatctcttttgtgttttttgtgcaccaggcccggctgtgtgagcacttgagggatgctggttagctattaaggaggccctgttgccagtgccaaagtgcctgaagctgcttcccgtttccctcctgattgcccccccggggaaaacacgcccttgtccctgaaggaacaaatggctgtcccagtttattaaaatgccctgtcaacctgcacttcccagtcacccccggccttgccagataaataatggagcatgcagtgagcacatcctagctgacggataatcacaccttttccccccgtcttttcctgaaaaaattgaaaatctgattcatattcaacatgtatggaacttaaaatatgggggaatgtttatggggaaggaaatagtttataagtttgtgaaggtacttataacatcggtttatctttttgattattaatgttttacgctaacccattgtgtctgtagttaaaaattgttttcttggtgttatcttttctcagaataaaaattagaaacttttggatgggaaagtagggttggttttattttcccgtatgacttttggatatttgtacttttgaggaaaattattagcaccaagtgtttctcaaaatataatttttaaaaaaatccttaataggcttttagctatgtgctttattgttttatcacaatgcagtttatttgtagtttctctctttttttcctcacacctatggtttttttacttccaaaattattttcaaataatccgatttttggctttcgatcgattatcgctactagatgttatgtgttcttttgcaattgtttctgcttatacctttactagcaaagggaaaaataacaatttggtgtcaatgatctggtgacaataggattacattggagccaattgaataaatttattctttcaatcatatggatcttcattaaaatttttgactggaattatcaattaaaaatatttcattccctttgtgcagaaactgctaaatccagggttcgattcttgaatgaactggcaagctggctgtggtctgtagatatacatcccacatttttgttgttataacagtttagtagttagtattgcttttcatattattaggactccagaatctaaattttacgataatgacatttcttctggtcatgacaaatgtaatattttacaaatataaatctacgtagaatccaaagacacacacggagcagtcctgtctgagaaataaaaaatcaggacacccatggcatcgtagtagcccctcgcgtccagcaggtgggcgaagggaggtgaggtttatttattaaatgggaccgagtgggacggggacggggcagccctaagggtagggaagcattgtcaatttctggggatagaatgagacccaggcatagctggagtttgaagctttgaagcaaaaatatctgtagaacatcttaaacgtgaccaaaatatgatgttaaaatcagcaactctttatacgttaaaaactttgaaacctgtggccgggcatggtggctcgcgcctgtaatcccagcactttgggaggccaaggcaggtggatcacctgaggtcaggagctcaagaccagcctggtcaacggtggggaaaccccgtctctaccaaaaatacaaaaattagctgggcatggtggcgcatgctactaatcccagctacttggcaggctgaggcaggagaatcgcttgaacctgggaggcagtggttgcagtgagccgagatatcgcaccattgcacttccagccggggcaacaagagcaaaacttcatctcaaaaaaaaa

SEQ ID NO: 123188 - DNA, 500 bp, Homo sapiens
  misc_feature (1)...(500): n = a,t,c or g
tttttttttttcttgtgaaatagatttaatgaagtcgagatacattccgggctaactactctcggttacacttaatcagaactgaataaacaaatgcagtattagtcacacttgtgcaagttattccatttcactgaagccagaagagattttcatgtgatcctgtttaaaccagctaaacatctggaaatgtggaaactattccgtaaagcgcaagaggaccacacgctcggaagagacatcagttatgtggctgaggtcaggcccggggaggctggagggagagcgcatactggagatagcttacttacaatgaacccaagcttcttataatctcgcgtgtacatggacttgcgtttctccatgctgccactgctgttgttaggttcagactcagcatcaaaagcaattcttcgaagttcaaatatgatgtccctctgagcctggtcctgggggtccattttggtcatcatcctgtcttccaggaggttanaggtgag

SEQ ID NO: 123189 - DNA, 1717 bp, Homo sapiens
atgcccgagcctcccccaacccttgctgtgggctcctgtgcagcccgagcctccctgacgatcaccgtcccctgctctggggcacccagtcccatcgaccgcccaagggctgaggagtgccggcgcactgcgtgggactggaagaatgaacaagcccagacaggaggatctagtaactccagacatgtggccttaagagctgtaacactcactgcgaaggtctgcaatttcactcttgaagccagtgagaccacgaacccaccagaaggaagaaactctgaacacgtccgaacatcagaaggaacaaactccggacacaccacctttaagacactgtaacactcaccccaggcattctcaggccacagtcattgctgagtcatgtggagacacaggcgctctgcactctggtcgggaaggcctctggggacagtgggtcttcccacgtccctgtgctgcactaccccatccagcagcacatatggttcctgcagccagaggcctgcaaccagtgttggaagttctggccagggcaattaggcaggagaaggaaataaagggtattcaattaggaaaagaggaagtcaaattgttcctgtttgcagatgacatgattgtatatctagaaaaccccattgtctcagcccaaaatatccttaagctgataagcaacttcagtgaagtctcaggatacaaaatcaatgtacaaaaatcacaaacattcttgtacaccaataacagacaaacagagagccaaatcatgagtgaactcccattcacaattgcttcaaagagaataaaatacctagaaatccaacttacaagggacgtgaaggacctcttcaaggagaactataaaccactgctcaatgaaataaaagaggatacaaagaaatggaagaacattccatgctcatggataggaagaatcaatatcgtgaaaatggccatactgctcaaggtaatttatagattcaacgccatccccatcaagctaccaatgactttcttcacagaagtggaaaaaactattttaaagttcatatggaaccaaaaaagagcccacatcaccaagtcaatcctaagccaaaagaacaaagctggaggcatcacactacctgacttcaaactatactacaaggccacagtaaccaaaacagcatggtactggtaccaaaacagagatatagatcaatggaacagaacagagcccttagaaataacgtcacatatctacaactatctgatctttgacaagcctgagaaaaacaagcaatggggaaaggattccctatttcataaatggtgctgggaaaactggctagtcatatgtagaaagctgaaagtggatcccttccttacaccttatacaaaaattaattcaagatggattaaagacttaaacattagacctaaaaccataaaaatcctagaagaaaacctaggcattaccattcaggacataggcatgggcaaggacttcatgtctaaaacaccaaaagcaatggcaacaaaagccaaaattgacaaatgggatctaattaaactaaagagcttctgcacagcaaaagaaactaccatcagagtgaacaggcaacatacaaaatgggagaaaattttcgcaacctgctcatctgacagagggccaatatccagaatctacaatgaactcaaatttacaagaaaaaaacaaacaaccccatcaaaaagtgggtga

SEQ ID NO: 123190 - DNA, 748 bp, Homo sapiens
tcaggcacaggagtctggatctataatctgagccagccctggcaacccgctggggtccccttccacgctgtggaagctttgttctttcactctttgcaataaatcatgctgctgttcactctttgggtctgcactacctttatgagctgtaacattcactgcgaaggtctgcagcttcactcttgaagccagcgagaccacaaacccaccggaaggaagaaactctggacacatctgaacatctgaaggaacaaactccggacacaccatctttaagaactgttaacactcaccgtgagggtccgcggcttcattcttgaagtcagtgagaccaagaacccaccaattccggacacattagggtggtaggccaggcatgggggagatcctacattccaggtacccctagcccttcccctaagcaggctaaccttggggattccctggagatcaaccaacttccagtgagagggagtggacaaaagcctctggaccagccattccttctctctctccaagtcctttttcctctctagcatcaaaaccaagcctaagtattttgaggttacatgaacatctctccccttcttttctgtgggcagagtcccttaggcaaataggaggcactgggggcctgagtgggatagctctccaaggtacactcattgacacagggtattcaggtaggggcttgccccaggccaagggagtaaggcaaactgtcaaaacctgggccatatgggccctg

SEQ ID NO: 123191 - DNA, 2253 bp, Homo sapiens
atggttacattttatgtggttgagaatgtgaaaatttctgaagagcaaaatcgtttgtcaaccgtgtattcagtccctactctggatgtgcctcacattacgctattgtcacagtgcagagtcctagccctcaagcagctagaaggacagcgataccagaaattgcagaagatcatgaagccttgctttggagacatgctgtccttcaccctgacggccttcgttgagctgatggaccatggcatagtgtcctgggatacattttcggtggcgttcattaagaagatagcaagttttgtgaacaagtcagccatagacatctcgatcctgcagcggtccttggccattttggagtcgatggtgctcaatagccatgacctctaccagaaagtggcgcaggagatcaccatcggccagctcattccacacctgcaagggtcagatcaagaaatccaaacctatactattgcagtgattaatgcgcttttcctgaaggctcctgatgagaggaggcaggagatggcgaatattttggctcagaagcaactgcgttccatcattttaacacatgtcatccgagcccagcgggccatcaacaatgagatggcgcaccagctgtatgttctacaagtgctcacctttaacctcctggaagacaggatgatgaccaaaatggacccccaggaccaggctcagagggacatcatatttgaacttcgaagaattgcttttgatgctgagtctgaacctaacaacagcagtggcagcatggagaaacgcaagtccatgtacacgcgagattataagaagcttgggttcattaaggaagaaactctggacatgtccgaacatcagaaggaacaaactctggacacaccatctttaagaactgtaacactcactgtgagggtccatggcttcattcttgaagtcagcaagaccaagaacccaccaattccagacacattttggccacccagatgggaccatcgcccatcgccaggcggaggacaggcaagggtccaggttttcgagaatgtgtcaataaaggccactaaatctgaccttcttggtcctccttgtggtctgggaggaaaactagtgtttctgctgctgcatcagtgcttggattacaggtgtgagccatggcgcctggccataaaggggaattttaaaagggaagagaagcgaaagtgggtggcctatgaagctgctgatgggtcaagcaaaaactgtcagggagtttggttgcacacttcactgattggcagctcaaaatctccaataactctgtcccctggctgtggcggaaggagaggcaacatattaaacagtgtcaatccttcgtccctgagtgtattgtgcaaacttccttggcatcctttctttgcacatggcgctttggagcaaaagggcaccatccagcaggaagcatttttcaattggatgactccatccacgataccctttggagagtgccttggacctaggctggacagtgctaggacagaggaccaccagagtctggcagggctgagtggtgatggggtcctggtacctgggaaagggaacatgcacagagcatcgtccttcctgaatctcaagctaaacccagcaggagcaaggccacgtttctatctgggggtagaaagcaaaattgtgcttccagttttccagggatgctataaatccttcgcaaatgctcacagcaagcaagtggcagggccagtgtttggcccctttcaccctgacgccagtcctcccccacctcagcctcgaggctgtgctgtcttgctatttaaggaaaagggaacatgctgtctacaaggtctcagtcgctctttacattcaattcagcctttttccaccttatatgtgctgagagctgttctgctgccattttctctccctgcctcaagagcacatttaagtgcaagtgaatggggtgggattgtgattgttacactgagtgattgcttagaatctgccctaccgtatctgccggtgtataaaactctaccgatgttaccaaactctgagaggatgtgaagctctagttttcactgtgctgagctgattacctcatgtcgtcaccaggggggcagcaccttcccatggcctttgggacttagggagcctccgggcggttggggaagcccacaccaaaccccatggccttaggtgggtcacctttttacctttccaaggcctgattcccaggttttggggcaaaaacggatgttaaaatgtggt

SEQ ID NO: 123192 - DNA, 1169 bp, Homo sapiens
gactgccaccaactcctgtccagctgctctatccagtgtcccgattcagcaatgtcaaatccctccagcacctttgcagattccggatacgacagctcgtcaggatagatcacatcccagatctcccactgcctaagtacaatggggttgtcaggtttgggacaggaatgagtaagggggttgtggggagacctctgatctcttatatccgaaagttctactactatgatcctcaggaagaggtatacctgtctctaaaggaagcgcagctcatttccaaacagaagcaagaggtggaaccctccacgcccctgtctgttgagggacaccctggcaggggtgtagcagcagaagtagcagacgagaagctggggtacatgggcgatggggcctgggagaaggctgagtccgaggagctggaggtgcagaagccccaggtgaagctgcgccgggctgtgtctgaggtggcccgcccagcctccacaccacccatcatggcctcggccatcaaggacgaggatgacgaggatcgcatcatcgcagagctagaggtgtttgagagaagctcagtgtcttccctcccccccacgccccgccgccagctgatccccaccttgctgtccccccaggacctggggccccccgggggctcagccccaggccctacacggaagaggacccaacatcctcaagggcgccggtttaacaaactggaagggaagaagaagaggagcaaagaggaaagttgtaagcttacacatgtgaaggggacaacgggcaaaacccattctgtccttttgccatattatctgggcctggagtgcctacgacagctggcccaagcctcctgtctgcggggcaggactgctggaaccattgtgaagacccaggctccggggggcgcccctccgcccagctccttccactcgttgaagttgaggtcaggcagcgggctctgcaccaccacggtgtggcggcgccagctgctccggcgccgccgggtctcgggcgacagcggccgccgcaggcgcacggcgagcatggcggacgccgcgacaccgagcaggagacgcagcgcctccaaacgcgagggccgggaggccagcgccgccgccgggggccgcagcgactcctggctgctggacgacgccgagccgggcgcccattag

SEQ ID NO: 123193 - DNA, 1676 bp, Homo sapiens
gagcgcggcctggagactaacagctgctcggaagaggagctcagcagcccgggtcgcggaggaggagggggcggccggcttctgctgcagcccccaggccctgaattacctccggtgcccttcccgctgcaggacttggtccctctggggcgcctgagtagaggggagcagcagcagcagcagcagcagcaacctcccccgcccccgcctcctcccgggcccctccggccactcgcgggtccttctcggaagggctccttcaaaatccgcctcagtcgcctctttcgcaccaagagctgcaacggtggctccggcggtggggatgggaccggcaagaggccttctggagagctggctgcttcagctgcgagcctgacagacatgggaggctctgcgggccgggagctggacgcggggaggaaacccaagttgacaagaactcaaagtgccttttctccggtctccttcagccccctgttcacaggtgaaactgtgtcgcttgtggatgtggacatttctcagcggggcctgacctctccacaccctccaactccccctcctcctccgagaagaagcctcagcctcctagatgatatcagtgggacgctgcctacatctgtccttgtggctccgatggggtcttccttgcagtctttccccctacctccgcctcctccaccccatgccccagatgcatttccccggattgctcccatccgagcagctgaatccctgcacagccaacccccacagcacctccagtgtcccctctaccggcctgactcgagcagctttgcagccagccttcgagagttggagaagtgtggttggtattgggggccaatgaattgggaagatgcagagatgaagctgaaagggaaaccagatggttctttcctggtacgagacagttctgatcctcgttacatcctgagcctcagtttccgatcacagggtatcacccaccacactagaatggagcactacagaggaaccttcagcctgtggtgtcatcccaagtttgaggaccgctgtcaatctgttgtagagtttattaagagagccattatgcactccaagaatggaaagtttctctatttcttaagatccagggttccagaactgccaccaaattcgtgtcaacatgatctatccaatgtcccgattcagcatttacgaatccttccagcaccttgcaaaattccggatacgacagctcgtcaggatagatcacatcccagatctcccactagcctaaacctctgatctcttatatccgaaagttctactactatgatcctcaggaagaggtatacctgtctctaaaggaagcgcacgtcagtttccaaacagaagcaagaggtggaaccctccacgtagcgaggggctccctgctggtcaccaccaagggcatttggttgccaagctccagctttgaagaaccaaattaagctaccatgaaaagaagaggaaaagtgagggaacaggaaggttgggattctctgtgcagagactttggttccccacgcaagccctggggcttggaaaaagcacatgaccgtactttgcgtggggctccacctcacacccacccctgggcatcttaggactggaggggctccttggaaaactggaagaagtctcaaccctgtttctttttcagaaaaaaaaaaaaa

SEQ ID NO: 123194 - DNA, 656 bp, Homo sapiens
gaaatcgccaagtaaatatctatgctacacctttatcattagtaccgctgcgctcgtactgttgattatgctgccgcacgaaagtatgccggtctatttagggatggcatgtacgctgggctttggcgcgatagtctttacacagcgagccgttattttttgcacctatcggcgaagcaaaaattgctgaaaataaaacaggtgcggcgatggcgttgggtagctttattggttacgctccggcgatgttctgcttcagtctgtatggctacattctggatttaaatccggggattattggctacaaaatcgtgtttggcattatggcctgcttcgcattcagtggtgcggtggtttccgtaatgctggttaagcgtattagccaacgtaagaaagagatgctggcggctgaagcttaattaatgcccgaatgtgcttaatccgtccaacaaaacccgtatcaaccgtaggccggataaggcgtttacgccgcatccggcagtttcacatcagaagaaatacttcgtcccgatacggatctgggtttgctcgcggggggacggttcgaccgtgcggtctaaccagcgcaattcgaaataaaaggaggccagggtcattaatacggtaacggaaggaaaaagtgatttcccaatgat

SEQ ID NO: 123195 - DNA, 1490 bp, Homo sapiens
ggataattcgctttttaatccataaaaacctgcccaccaatgccaggtttttttttgccctgtcgtgagcgcacaccaaggcgaggttctcccttataagtctggggttacgtcaatagagagttttgtcacaattatctgcaaagtcatacgccgttaattgctttcttttttggcgtaagcgtaagatgcttcatctggtttaaaccaaaaggattaaacaatggcggagaatcaatcccccgtagaaaatgcaaaagagaaactggatcggtggttgaaagatggcatcaccacgccgggtggaaaactcccttcagaaagagagctgggagaactgctgggcattaaacgtatgacgctgcgccaggcgttgttgaacctcgaggcagaatccaaaatcttccgtaaggatcgtaaggggtggttcgtgacccagccgcgatttaattacagtccggagctgtcggcgagctttcagcgggccgcaattgagcaagggcgagagccttttctgggggtttaccgaggaaaacccgtacaggggattttccggggaccctcggcccttgatggcagtgacgccatcaactgaactctatcgcatcaccggctggggggcgctggaaggacataaagttttctatcacgaaacatatattaatcctgaagttgctccgggctttattgaacaacttgaaaaccactcattttctgcagtctgggaaaagtgctaccaaaaagagacggtagtaaaaaaattgattttcaaacccgtcagaatgccgggcgatatcagcaagtatcttggcggttctgcgggtatgccagcgatcttaattgaaaagcatcgcgccgaccagcaaggcaatattgtccaaatagatattgaatattggcgatttgaggccgtagacctcatcattaatctgtgttttatggtgacaataaataacgcaagaaagattctacaacgtgtcgacactcttcctctttatttacatgcttatgcctttcatttaaatatgcggctggaaagagtgttgcctgctgatttacttgatatcgcaagtgaaaataatctacgtggcgtcaaaatccatgttctcgatggcgagcgtttttctcttggtaatatggacgataaagaactctctgcctttggggataaagcccgccgtctgaaccttgatattcatattgaaaccagcgcctcagataaggcatctattgacgaagccgtcgccatcgcgttgaaaactggggcatcgtccgtacgtttttatccacgttatgaaagtaatttgcgcgacgtattatcgattatcgctaacgacattgcctatgtacgggaaacgtatcaggacagccgcctgacttttaacatcgagtggggcaaatcatcatgctgcagtccctatgtccacccctgggctaaactggctgctatctattatcggctgcaaccgcatatcaacgatgccttttag

SEQ ID NO: 123196 - DNA, 924 bp, Homo sapiens
atgactgatgtagcctacgatatctgcgacggaaggctctcgcccttgctcaattgcggcccgctgaaagctcgccgacagctccggactgtaattaaatcgcggctgggtcacgaaccaccctttacgatctttacggaagattctttagagcacagtgctgataaacagactcatactactagcgtctcggcaacagagggtttgggaagtggaggactaataagtggagttacaactggctcagtaggaataagaaataacatgcagactatttcatctctattgcaacccataatttggtacggctgcgctcgtactgtagatagtgctgccgccagaaatatcgccgtctcattaagggatggcatgtacgctgggcttaggcgcgatagtcttaacacagcgagcagtatttttgcacctatcggcgaagcaaaaattgctgaaaataaaacaggtgcggcgatggcgttgggtagctttattggttacgctccggcgatgttctgcttcagtctgtatggctacattctggatttaaatccggggattattggctacaaaatcgtgtttggcattatggcctgcttcgcattcagtggtgcggtggtttccgtaatgctggttaagcgtattagccaacgccggataaggcgtttacgccgcatccggcagtttcacatcagaagaaatacttcgtcccgatacggatctggttttgctcgcggtggtaggaaggctacccggggcatttcatcacaggagctagggcaggggctttcaggtgaggagcaggatggggcctctgggggtgtgactgctggggacatagccacaggggattactttcttctcactcctcacctccagatttgcactggggcaaaaggaggattagggtgtgtggtcgaggggagataa

SEQ ID NO: 123197 - DNA, 752 bp, Homo sapiens
atgagtgaactgccattcgcaattgcttcaaagagaaaagaatacgtaggaatccaacttccaaggtacaccatccaaaaattggaagaaaacctgaatgtggtcctgtttgaccgctcgggccatcgtaccaaattcaccaatgtcgggaggatgttgttggagcgagggcgcgttttgctgcaagccgcagataaactgactactgatgcggaagctctcgcgcgcggttgggaaacgcatctcaccattgtgaccgaagcgctggtaccgacacctgcctttttcccgttaatcgacaaactggcggcaaaagccaatacccaactggcaatcatcacataagtgctggcgggggcgtgggaacggctggagcaggggcgggcggatattgttatcgcgccggatatgcattttcgttcctcgtcggagatcaactcgcgcaagctctatacgttaatgaacgtctacgttgccgcgcctgatcacccgattcatcaggagccggaaccgttatctgaagtgacgcgtgtgaaatatcgtggaattgcggtggcggataccgctcgtgagcgcccggtgttgaccgtacagctgctggacaaacagccgcgcttaacggtgagcacgattgaagataaacgtcaggcattactggcggggcttggcgtggcgacgatgccgtatcctatggtcgaaaaagatattgcggaagggcggttgcgtgtcgtcagcccggaatcgaccagcga

SEQ ID NO: 123198 - DNA, 1116 bp, Homo sapiens
atgcagatggcggccagcagcacagttgccgtttcatcagcactgggcaacacacacaagctcaacgcaaggccagcaacaccaacccacaacatgttagcatcccatttccacacagtcactatatccatttgttacacagttgggcaccagcagcagcatcagtctcaatcagcaacacaacatcacacttggattcaaccatccaaggcttcattatttggggggcacatcctccgactagcccggacaaccatcgccgtgtgcacgcagctcctgaagggacttcgtcttgctcccaggtcagtccggcctacagtacatacgcttgacctggctctcgggagtcttgtcgatgatgtcggggtaacgatcgagaagtatctaatcatggagaatagatgttcaccccgtttgatatacgacccgtctatttccattcgtactcccatacatgcaaaagggtacttcgatacggacatcttcgcggcagctgctggacaaacagccgcgcttaacggtgagacgattgaagataaacgtcaggcattactggcggggcttggcgtggcgagatgccgtatcctatggtcgaaaaagatattgcggaagggcggttgcgttcgtcagcccggaatcgaccagcgagatcgatattattatggcctggcgcgtgacaaaaagaacgccgaaaaactgatggacaatgatgccggagaacataggggaatatacaaaaacaacacatatacttggctaaaccagatgccacgactaccttatgaggggacgcaagcccgccgaatttataaaaatagacgaaccggagcaaatgcggccggtccagttgctattattaaaagttatacagcggaaacctacacggattcataccattacagtaaaaaaaccaaccagctagaaggaagaacttatggaaatgcgcttacaagaaccatagaatgccgaatgacacaacgccgaaagattgaaataatagcgaaaataccaaagaaactgagcgccacaaaggcagaatatacgaccagcaaacagaaatacacccgaaccaccacgagatttaaagatgaaaaaagaactgatagaaacgaataa

SEQ ID NO: 123199 - DNA, 1674 bp, Homo sapiens
atgaccgccatggagcgctcgcgtattctgcgtcgggccgttgatattctgcgtgaacgcaatgacgaactcgcaaaactggaaaccctcgacaccggaaaagcatattcggaaacctcaaccgtcgatatcgttaccggtgcggacgtgctggagtactacgccgggctgatcccggcgctggaaggcagccagatcccgttgcgtgaaacgtcctttgtgtatacccgccgcgaaccgctgggcgtagtggcagggattggcgcatggaactacccgatccagattgccctgtggaaatccgccccggcgctggcggcaggcaacgcaatgattttcaaaccgagcgaagttaccccgcttaccgcgttaaagctggctgaaatttacagcgaagcgggcctgccggacggcgtatttaacgtgttgccgggcgtgggcgcggagaccgggcaatatctgaccgagcatccgggcattgccaaagtgtcatttaccggcggtgtcgccagcggcaaaaaagtgatggctaactcggcggcctcttccctgaaagaagtgaccatggaactgggcggtaaatcaccgctgatcgttttcgatgatgcggatctcgatctcgccgccgatatcgccatgatggcaaacttcttcagctccggtcaggcaaagaggaaggcgcgcgcgtactgtgcggcggcgatggggtacgagctagagatcgtccaaatctccggcgtgaaaaccttcgcggcaaataccattcgtgacaacggcaccgacgaccagacgcgtgctgatatcgcccgcgcctttgaagatgcggtggtcgatacgctgatgattaagtgcaagcgggcgctggatcagacgggctttaagcgactggtcatggcgggcggcgtgagtgctaaccgtacgttacgggcgaagctggctgaaatgatgaaaaaacgccgcggcgaagtgttctacgcgcgtccggaattttgtactgataacggcgcgatgatcgcctatgccggaatggtgcggtttaaagcaggcgcgacggcggatctcggcgttagccaatacgaggaatatcagcccaaaaatcgcccccagtcgccaggaagtgacaatattttgcgcgagctgcgtgtgcgggccagcggcagggccgacgggagtggcacaggtttcaccgaagacgctaacagttttaccttttacagaaaaagatactatgaccattcagaattcgaccatgacggtgatgacaagagtccgggccacgctcgtttgtggaccatgcgttcggaacttggttaccaccggggccttcgatctgccttcctcacgtggcctccgctggaaaaccgccacacgctgccgaaagtgcatcgacttatgaccattcatgccaccaaaggcaaacagccggattacgtcatcatcgttggcttgcaggagggaagtgatggttttccggctgcggcgcgggagtcgattatggaagaggcgctactgccaccggttgaggatttcccggacgctgaagaacggcggttaatgtacgtggcgctgacccgggcacgccatcgggtatgggcactgtttaacaaagagaatccctctccctttgtggaaatactgaaaaatctggatgtgccggtggcgagaaaaccgtaa

SEQ ID NO: 123200 - DNA, 507 bp, Homo sapiens
atgatcagcagcaaaatcgccagcggattgattgattgtttcccgcatgcacagtgggcaaaagaggttgatgtcagtgataaagaggcgcgctgcggtgtgcgttgtgccacccgcgatcatctgccaatggtatgcaatgtgcccgattatgaggcaacactcgtggaatatgcgtcgtcggcggagcacaaagatgacgcggtaagcgcgccggtttttgatgatctctttatcttaaggttctcgcggtttgtgttctggcccgctgtgtgccgagattctggcgacgtaaataagcggacgaaccgatgccgatggatgccagtatgctggacggcgttgatccctaatcggttatgggtgcggaaattgttgaagggtaaagcggtcaaggctggagcagttcactttaggcgttccattatctacttccacccccagcaagccaatgcacttgatttcccatccactcacatcatcaagtactgcaccatgcttctttga

SEQ ID NO: 123201 - DNA, 655 bp, Homo sapiens
atcattgggaaatcactttttccttccgttaccgtattaatgaccctggcctccttttatttcgaattgcgctggttagaccgcacggtcgaaccgtccccccgcgagcaaacccagatccgtatcgggacgaagtatttcttctgatgtgaaactgccggatgcggcgtaaacgccttatccggcctacggttgatacggttttcgttggccggattaagcacatccggccattaattaagcttcagccgccagcatctctttcttacgttggctaatacgcttaaccagcattacggaaaccaccgcaccactgaatgcgaagcaggccataatgccaaacacgattttgtagccaataatccccggatttaaatccagaatgtagccatacagactgaagcagaacatcgccggagcgtaaccaataaagctacccaacgccatcgccgcacctgttttattttcagcaatttttgcttcgccgataggtgcaaaaaatacggctcgctgtgtaaagactatcgcgccaaagcccagcgtacatgccatccctaaatagaccggcatactttcgtgcggcagcataatcaacagtacgagcgcagcggtactaatgataaaggtgtagcatagatatttacttggcgatttc

SEQ ID NO: 123202 - DNA, 1263 bp, Homo sapiens
atgaaacgcagcaatatcaccaccgcaaaagtggaacatggcgtcgataccgcgtggctggtcgatcaccacacagaagacttcaccgccagctatgccgttcaacactggctggacgttgccgcacaacagaaaacggtggccattaccctgcgcgaactggcaccgtttgacaaacgtctcggcaccactcaacaagcgtatgaaaaagcctttgccggggtggtcaatcgcattctcgatgaagggtatcaggtgattgcgctctccacctgtacgggcattgacagctataacaaagacgaccgcatggtggcgctcaacctgcgccagcacatcagcgatcctgcccgttaccacgtagtgatggatgaactcaacgatctggaaatgggcaaaattctgggggcctgtgaactcaccgtcggtacgcgcctgcactctgccattatctcgatgaattttgccactccggcaattgccatcaactacgaacataaatccgccgggattatgcagcagctgggactaccggagatgggaattgatatccgtcatttattagacggcagcctgcaagcgatggttgcggataccttaggccagcttccggcgctgaatgcgcgacttagtgaagccgtcagtcgtgagcgtcagacaggaatgcagatggtgcagtctgtgcttgagcgcatcggggaggtgaaaggaaggaaagcggcgagcaggtcgagcatgaagaatcggccgtatccgctggtcgatgatctggagcgtttttatggtcttctggaacaaacgctgctggcaaccggttttatccgtgaaaaccatccggggcaggtgatgaataaattgcgccgtctgtttacccgtgcgcgcccggaaagccaggagttgaatatcctgcgcgggattctggcttctattgagcagcagaataaaggcctacgggagcacgaatgtaggccggataaagcgtttacgccgcatccggcagtcatgcgctacataaatttttcaggagcaaataatggatcatctacccatgccgaaattcgggccgttggccggattgttctttgtcttctccggtatcgaaatcgccggaccgtttgccgggcaaatgttcgcagaatggggcgcggaagttatctggatcgagaacgtcgcctgggccgacaccattcgcgttcaaccgaactacccgcaactctcccgccgcaatttgcacgcgctgtcgttaaatattttcaaagatga

SEQ ID NO: 123203 - DNA, 729 bp, Homo sapiens
atggcgcaaaaaacgccagagaagcgatttatcacattgaaggtgacccggatcatccgtgaaaaccgtctgcgctacccggaatatcgtgcgccaggttctgacaaatggcagcgcattagctgggaagaagcattctcccgtattgcgaagctgatgaaagctgaccgtgacgctaactttattgaaaagaacgagcagggcgtaacggtaaaccgttggctttctaccgtaaacaagaagaagatcagcctgcgtaccgttggcgcggcgttagtgttacaggtcgtgattggcggcattatgctttggttaccgccagggcgttgggtcgctgaaaaagtcgcttttggcgtgcataaagtgatggcgtacagcgacgcgggtagcgcatttatcttcggttctctggtcggaccgaaaatggataccttatttgatggtgcaggatttatctttggtttcagggtgttaccggcaattatcttcgtcaccgcgctggtgagtattctctactacatcggtgtgatggggattttaattcgaattctcggcggtatcttccagaaagcattaaatatcagcaagatcgagtcattcgtcgcggtcaccaccattttcctcgggcaaaacgaaattccggcaatcgtcaaaccctttatcgatcgtctgaatcgcaatgaattatttacagcgatttgtagtggcatggcctcgattgatggttag

SEQ ID NO: 123204 - DNA, 1662 bp, Homo sapiens
  misc_feature (1)...(1662): n = a,t,c or g
atggcggaaacagcggttatcaatcacaagaaacgtaaaaatagcccgcgaatcgtccagtcaaacgacctcactgaggcggcatatagtctctcccgggatcaaaaacgtatgctgtatctgttcgttgaccagatcagaaaatctgatggcaccctacaggaacatgacggtatctgcgagatccatgttgctaaatatgctgaaatattcggattgacctctgcggaagccagtaaggatatacggcaggcattgaagagtttcgcggggaaggaagtggttttttatcgccctgaagaggatgccggcgatgaaaaaggctatgaatcttttccttggtttatcaaacttcaagagctgtttagtctcatggccatttgggcagcagttaagatgatagcaggtagtgagaccaaagtttctggactagaacctacgtttcaggtgcatgggattgaattcaaaagattgggatttgggctaagaaatggcccttcccctaaaaccggtttttcgccctttgccgttgaagtccaccgtcctttaatagtggaattcttggtcccaactggaacaacactcaacctatcctcgggctatcttttgatttataagggattttgccgatttcggacccaccatcaaacaggattttcgcctgctggggcaaaccagcgtggaccgcttgctgcaactctctcagggccaggcggtgaagggcaatcagctgttgcccgtctcactggtgaaaagaaaaaccaccctggcgcccaatacgcaaaccgcctctccccgcgcgttggccgattcattaatgcagctggcacgacaggtttcccgactggaaagcgggcagtgagcgcaacgcaattaatcctgccaggttatctgacgctgccgtcagaaaaacaggttgatttgcagtcgtatctggaagcgaacacgccgaaagcgacgctggctgatcaggtgaactactggagcaactatccgaagttcttcgttagcctgatgaaatctttctatggcgatgccgcgcagaaagagaacaactggggctatgactggctgccgaagtgggaccagacctacgacgtcatcaagtatttcaacatgatggatgaaggcaaagtcaccggttatttctgccagggctttaacccggttgcgtccttcccggacaaaaacaaagtggtgagctgcctgagcaagctgaagtacatggtggttatcgatccgctggtgactgaaacctctaccttctggcagaaccacggtgagtcgaacgatgtcgatccggcgtctattcagactgaagtattccgtctgccttcgacctgctttgctgaagaagatggttctatcgctaactccggtcgctggttgcagtggcactggaaaggtcaggacgcgccgggcgaagcgcgtaacgacggtgaaattctggcgggtatctaccatcatctgcgcgagctgtaccagtccgaaggtggtaaaggcgtagaaccgctgatgaagatgagctggaactacaagcagccgcacgaaccgcaatctgacgaagtggctaaagagaacaacggctacgcgctggaagatctctatgacgctaatgggggatnctttagagtccaacaaagcaggcattgcaagtcctga

SEQ ID NO: 123205 - DNA, 2658 bp, Homo sapiens
atggtggattgcccttcccccaccaagcctggagcattccagggtggaccttcagtactgctggtgcctggcaacgaagaattttcaaagcccttactgcgggcgtacgtggagatccagcggcgttttgctgggttcgccgccaatttctcgcgccagtttcggcaccagatatcccgacaccagtgtcagcaactcacgcataatctgccgtgcttcgtcatcactcaccataaaatgcgccgcgccctgtactttatcgagcacatgcaagtaatacgagcatacacgggcatcgaacaacgcattactcaagtttaccaacgaagtcggcttttggcgtacgcagatgttttcaacgacgtccggcgtgtagcgggaaacgtgctctttcagcaggttccacacacagcgcggatgagtcagtgtttcatcgcgtttcgcatagccgttttcatcgagctgatagttccaggacgatttatcgtattgacgtttttcagcgtcgtagccgctgaacagaccgtcttcgaaagcaaaatcatcacgcaccagcaggctggcgttggtgtaatgcttaacgtattcggcgttgattttgttgttttcgatcaggtagcgcaaaacgccagacaggaacgtaatgtccgtaccggaacgaataggcgcgtaaatatccgccacagaagcggtacgcgtaaaacggggatcgacaacgatcaaggttgcgtcgttgttgtttttcgcttccatcgcccagcggaaaccgacgggatgcgcttcagcagcgttaccgcccatcaccatcacgactggttggtcatcgcaccgcgaccaaatgttggagcaagacttgctaccgttggtccgtgtcagacgcgcgcctggttgtctaccgccagcatcccgagggagcgcagccatgttatcagtcaggggcaacgtgccgatgaccttacccgccagacggcgggtgaatttgccgagcagtttaatctgcacctgtttccacaaacctgggtgacggatatcgatgccgaagcccgtgtggtgaaaagccagaataatcagtggcaatacgacaagctagtactggcaaccggtgccagtgcctttgtcccgcctgtgcctgggcgtgagttaatgctgacgttaaatagtcagcaagagtatcgcgcctgtgaaacgcaactgcgggatgcccgacgcgtgttgattgttggcggtggtttgattggtagcgaactggcgatggatttttgtcgtgcaggcaaagcggtcacgctaatcgacaacgctgccagtattctggcgtcgttaatgccaccggaagtaagcagccgcttgcagcatcggttgacggagatgggcgttcatctgctgttgaaatctcagttacaggggctggaaaaaacggattctggcattcaggcaacgctggaccgccagcgcaatatcgaagtggatgcggtaattgccgccaccggactgcgcccggaaaccgccctggcacgacgcgccgggctgacgattaatcgcggcgtttgcgtcgatagttatctgcaaaccagtaataccgatatttacgcgctgggcgattgcgcggaaattaacggtcaggtattgccgttcctccagccgattcaacttagcgcgatggtgctggcaaaaaatcttctcggcaataacacgccgctgaaactcccggcgatgctggtgatctgcattccgcacggcggtggtggtccgggcgcggtttctgcggcaccgttcggtagcgcctctatcctgccaatcagctggatgtacatccgcatgatgggcgcagaagggctgaaaaaagcaagccaggtggcaatcctcaacgccaactatattgccagccgcctgcaggatgccttcccggtgctgtataccggtcgcgacggtcgcgtggcgcacgaatgtattctcgatattcgcccgctgaaagaagaaaccggcatcagcgagctggatattgccaagcgcctgatcgactacggtttccacgcgccgacgatgtcgttcccggtggcgggtacgctgatggttgaaccgactgaatctgaaagcaaagtggaactggatcgctttatcgacgcgatgctggctatccgcgcagaaattgaccaggtgaaagccggtgtctggccgctggaagataacccgctggtgaacgcgccgcacattcagagcgaactggtcgccgagtgggcgcatccgtacagccgcgctggtaaaaggcgaacactcgcacatctgattgaagatatccctaccggtatttacaccatcccggaaatcaactctatgggcaaaaccgaacagcagctgaccgcaatgaaagtgccatatgaagtgggccacgcccaatttaaacatctgacacgcgcacaaatcgtcggcatgaacgtgggcacgctgaaaattttattccatcgggaaacaaaagagattctagatattcactactttagcgaacgcgctaccgaaattattcatatccggcaagcgattattgaaccagaaaggtgccgccacacttttgaatacttcgtcaacaccaactttaacgaccccacgattgccgaaacctatccgggaactacctttaaccggtgtaaacccctattttaa

SEQ ID NO: 123206 - DNA, 2526 bp, Homo sapiens
atgaatatttacgtgcccacggtagagagcggacgttctaactatgttggaggcacacagtggggggggcccaccaacggaggggctaccaacgctgagccacagaagaaggtggccgcacatcaaagcagtctgcagtcagtgcgtgaagccaccaccgcttccggcgtggataatgcagcctcccccgactggcagacaccgctgaacgggattatttcaccctccgggaagactggccggataaggcgtttacgccgcatccggcagtttcacatcagagaaatacttcgtcccgatacggatctggttttgctcgcggtggatggaggatacagggctggtgctagtagatgcttcaactcgaagaagttaagcttgtttttttgggctttttgggaacgactttgcgacaaacttgggaagaagttaagacgctgccatgattgcagtgggggaagggagaaagaaaagaaggaaggaaaaggaaagaaaaggagggaagagaagagggagggaagagagagaggaggggaagaaaagagaaagggaacaacggggaacacggcgaaacaacggcgaaaccgcggggcacggcattggctcacgattcccacaaaggtatttggagaaccctcatggaaaaggacttctgcaaccctagttacacgtaggaccgccaagcggcaaggcggctgccgagcggagcacgacggcaaaggtcaagcctcccaaggagggacaaggagatcgagggtggcgtcagtcgtcaccagtgagaagaaatccccgccacaaccccgcgaaatcgccaaccatggccctagcctagtaggtggcgtcctcgctttcacgcacaatttttcagaaaaggtgtttgaaaaaccggagaggactcgggggaatagtatacatcctaattgcgaaaacacttatgggccaattaaacaaactgggaggtttcctgaggagtactctcaattgaactcaaaactcaatgatgtaccgccccaacaacaggggtattttccgttgtccgtaccagcgctgtttttctgtttccgccgtattgacccccactgtgtcgcgggggaccttgacacaaagggacttacgggtcgtataaaatacacatggacccgtatgtctggagttacaaactttcaaattgtaagagactcatcaacttgtcccatcatctcaggtaccgagcctgatataacgtttgtaaagcgcagtattagtgtgggagtgacccgattttcagctgttggagtacagcagaggaacgagccagatggccatgtctgtgacccggccaattgtgtagtgtctgtcctgggcagactgacacctcacacggctgggtactcctctgagacaaaaattcagaggaacgatcagacagcagcattcgcggttcacgaaaatctgctgtctgcagccactgctgctgatacccaggcaagcagggtccagagtggacccttgcaaactccaacagacctgcagctgagggtcctgtctgttagaaggaagctaacaaacagaaaggacatccacaccggaaacccatctgtacatgccatcatcaaagaccaaaatccctgggcccttattgccttacacgcaacacgttgccatcgtggggcaatacgttgtatgtaccaaccatgcacccatcgggccattggcattgccagtcaccggacttccacaataccaatcgcaggcgagaacatgcgaccatcggtttcgttttgcctgggcggatctggaacgggaagaaaccattgcagccaatcttttgctgatagcggtcagcgcattaagcgaaatacgataatcatcgttgtgcttttcgatagtacgcgatgttttcctgccagcgatgtttgccagatcgtgcaatttcctaacctaacaccttcgcacgtacatagtgcgcagctactgtcgcgtgaccgaaatcggcacttcaaccgttggcgtaaacggatgcgcacatcgcttcgtcgctgtgcagcagaaaagcagtttccgaatggcctaactcgcggggataagctgcatttgcgcttcgctaagattatcggcggggaaaacacacggcagaattgccgcgaaacggttttaccccagggccactggggtaagcaatacagtacaacacatcgcgtagctgtagttggcggaggcggcaaaccgttagttccgcaggcgaaggcgggtactagcaaatcctgtaagatgcaggtggtgtgggaagcttcccccaccctcctactatatcaaaacccgtggtcaccaagcaagagtgagcgcgcacgacagtctgcagacctttatcgtcatgtctacaaacgtgggggaacccccacgagccacgcgcatacaccagggaaatcaacacgggtcctaacacgcacagacgccaaacgggtaacgtcagccaaaagggcacaagggaacaccaggacgctcgccaacgctccgcaacgggtggcaggcacacccagtctctag

SEQ ID NO: 123207 - DNA, 585 bp, Homo sapiens
tcagttcactattgatttgccgacagcaatcagcaagcgttgcaaaatggcgtctaaagaccactggtgccaggtgttgttttccatcgcgatatcgctggcattaggcgttgaggcgcgggcaacaattttgccctgccgattaaccgcgatgggcctgacattggtcgcgccacagtcgagtaccaggataacttcttgtgtcataatcgctccaccgcgagcaaaaccagatccgtatcgggacgaagtatttcttctgatgtgaaactgccggatgcggcgtaaacgccttatccggcgttggctaatacgcttaaccagcattacggaaaccaccgcaccactgaatgcgaagcaggccataatgccaaacacgattttgtagccaataatccccggatttaaatccagaatgtagccatacagactgaagcagaacatcgccggagcgtaaccaataaagctacccaacgccatcgccgcacctgttttattttcagcaatttttgcttcgacgataggtgcaaaaatactgctcgctgtgttaagactatcgcgcccacaccccagcgtacatgccat

SEQ ID NO: 123208 - DNA, 1485 bp, Homo sapiens
tcagttagcagtgcaggcaccaatcaggtaaccactaaaggcctgggcgatagtgttataggccggaagattggtgtactcctcggtgccgtactgaccaaaaccggacaggtgagcgataaccagtttcgggttgtgctgccacagtacttcatcggtaatgccacgacgggcaaaggccggacctttactggcttcgatgaagatatcggtggtttccattaatttcagaaacgcttcgcggccttcatctttgaaaatatttaacgacagcgcgtgcaaattgcggcgggagagttgcgggtagttcggttgaacgcgaatggtgtcggcccaggcgacgttctcgatccagataacttccgcgccccattctgcgaacatttgcccggcaaacggtccggcgatttcgataccggagaagacaacgcgcaatccggccaacggcccgaatttcggcatgggtagatgatccattatttgctccgcacgacccagcgtcaggatctgcatttcgtcagatcccccggagacgcggtctacacgcagatcacgccagaagcggctgatgcggtggttgcccgcaatcccgacaccgcccagcacctgcattgcgctatccacaacttcaaatgccgcattggcgcagaagtatttgcacatcgctgcatcgccagaggtgatggtgccgttgtctgctttccacgctgcttcatacagcatgtttttcatggagtttaatttgatcgccatgtgggcgaatttttcctgaatcaactggaaacgaccaatagcctcgccaaactgcacgcgctgattggcgtagcgcgccgcatcttcaaaggcgcacatcgccgtaccgtagttggtgagggctaccaggaaacgttcatggtcgaactcttctttgacgcggttaaagccgttaccttcccgaccgaacatgtctttctcgtccagttccacgtcgtcaaaggtgatttcacagcagctatccatacgcagaccgagcttttcaagtttggtcactttgatgcccggtttgctcatatcaacaaaccattcggtgtagacaggttcgtccggagaagccccgtcgcgcgccatcaccacgatgtacggggtgtaggcgctgctggtaataaaacacttactaccattaagataaatcttaccatttctacgggtatcagtcggtttcaggctacccacgtcggagccccgcccggttcggaatcctgagtcccctcgcatatcaaggggcccaggggtaaggtagcggctgtccaggggtcgtgtcgcggtatggcgtattgttggggcaaaacgcatcatgccagccatgtcgggggttgggcctccccccgtgcccgtactggctcggccgggggccccccgcggggggtggcacccgcggggcccggcccgggggtccgcgcgcgcccgccagcgcgcgcgggcgcgggcggtcggtcggtcaggcat

SEQ ID NO: 123209 - DNA, 1198 bp, Homo sapiens
ttacccgaagatcaaacgcagcgcgataaaatattgatggcaattatgggttccggcaacgatctggaaattgacggtattggcggcggtaatccactgaccagtaaagtcgccattattagccgttccagcgatccgcgtgctgatgtcgattatctgtttgcgcaggtaatcgttcatgagcaacgtgtcgataccacgcctaactgcggcaatatgctgtctggtgttggggcattcgccattgaaaatggtttgattgcagcgacttcgccagttactcgcgtacgtatccgcaacgtcaatacgggtacgttcatcgaagcacaaggatttaatatcgttataacccacgccaaagatgaccggacctgccgcgccgccatagtgagtaaccatgccgccataggagttggagaacaacagtgccagcgcggttaacattaacggtgcgccggagacgttcgccagcatggcaaataccggtaacatagcaacgatataggcactaccggaagcgaagaaataacgcacgataatgctgaggaaaataataacgaagaaagcaacgttaccgtgaccatcaaatgccaggttatttttaaagacttcagctaaccattcgaagaatttaactttcgataataaggagcttaagccgataataccgccgtaccagattaaggtattccagccgcctttatttttaaccacgtcttcccaggtaacgatacccagcagcagcatggttgccataacaacgattgccacggtggattcatcaacccccagagacttactgaaaatccagcccagcagcgccagcacaaagacaccgagcagcattttttcgcggattttcatcggtcctaccattgggtacgcgaaagtattctggctggcgaacaggtgttacccgctgcgggtgatggttcattgacagtgcatcaggatatggaactgtaccggtggggcgttgctgaaagatgagcagtcgctgcatcagcttgccgctgaacgccgcgtctggatccaggtggtgaaagtcaatgtcaccattaacggcgtgaaagcctcgaccagcgatggtctggcaatcttccgctacgccaaccgccagatcacgatacaagccaatcggcatttcatagccctggcttatctcccagcaggcggcaaactggccatcatgaaccat

SEQ ID NO: 123210 - DNA, 2909 bp, Homo sapiens
atggataaaggcatcgacgccctctttcatcgagatagagttaacaatgcctttgccctggatacacttcagacctttttcaatgatgcgttggctttcagcgcgacgctcggctgtttctggatgatcctggcctggatttttattccgctggagcacccgcgctggcagcgtattcgcgcagaacataaaaacctgtatccgcatatcaacgcctcgcgtccgcgtccgctggacccggtccgttatctcattcaaacatgctggttattgatcggtgcatcgcgcaaagaaacgccgaaaccgcgcaggcgggcattttcaggtctgcaaaatattcgtggacgttaccatcaatggatgaacgagctgcctgagcgcgttagccataaaacacagcatctggatgagaaaaaagagctcggtcatttgagtgccggggcgcggcggttgatcctcggtatcatcgtcaccttctcgctgattctggcgttaatctgcgttactcagccgtttaacccgctggcgcagtttatcttcctgatgctgctgtggggggtagcgctgatcgtacggcggatgccggggcgcttctcggcgctaatgttgattgtgctgtcgctgaccgtttcttgccgttatatctggtggcgttacacctctacgctgaactgggacgatccggtcagcctggtgtgcgggcttattctgctcttcgctgaaacgtacgcgtggattgtgctggtgctcggctacttccaggtagtatggccgctgaatcgtcagccggtgccattgccgaaagatatgtcgctgtggccgtcggtggatatctttgtcccgacttacaacgaagatctcaacgtggtgaaaaataccatttacgcctcgctgggtatcgactggccgaaagataagctgaatatctggatccttgatgacggcggcagggaagagtttcgccagtttgcgcaaaacgtgggggtgaaatatatcgcccgcaccactcatgaacatgcgaaagcaggcaacatcaacaatgcgctgaaatatgccaaaggcgagttcgtgtcgattttcgactgcgaccacgtacctacgcgatcgttcttgcaaatgaccatgggctggttcctgaaagaaaaacagctggcgatgatgcagacgccgcaccacttcttctcaccggacccgtttgaacgcaacctggggcgtttccgtaaaacgccgaacgaaggcacgctgttctatggtctgcgccagtcgtgggagttcaatgcgcgtggcctggagctggtgaaagaaggtcgagcgcaagcctgtgtcagtgccggtaataccggggcgctgatggggctggcaaaattattactcaagcccctggaggggcaaaatcaccgcatgttgctgcgttgggaagcgaagctggcggcacttgtacggttgcaggaaaacaccgcgcagccagtgcctttcgcaccaaataatgcgcgtccgctgacgctggaagacgatcgtttgagctgcaccgttcgcggctacaacttcgcgatcaccttctcaaaaatgagtggcaaaccgacatcctggcagctggttgccagtgcgctagccaccaaaatcgcccatgaggttaacccgcaaaatcaggtgggctgtatgctggcgggcggtaacttctacccttacagttgcaagccggaagatgtctgggcggcgctggagaaagaccgggaaaacctgttttttatcgatgtgcaggcgcggggcacgtatccggcttactctgcccgcgtattccgcgaaaaaggggtaaccatcaacaaagcaccgggcgatgatgaaatcctgaaaaacaccgtcgattttgtctctttcagctattacgcctcgcgctgcgcctcggcggagatgaacgccaacaacagcagtgcggcgaacgtggtgaaatcgctgcgtaatccgtatctacaggtgagcgactggggctggggaattgatccactcggtctgcgtatcaccatgaatatgatgtacgatcgttatcagaagccgctgtttctggtggaaaacggcctgggcgcaaaagatgaatttgctgccaatggcgagattaacgacgactatcgcatcagctacttacgcgaacatatccgctgcaatgggcgaagcgattgcagacaggcattccgctgatgggctacaccacatggggctgtattgatttagtttccgcctctacgggtgaaatgagcaaacgctacggctttgtctttgttgaccgtgacgacgcaggcaacggtacgctgacgcgcacgcgtaagaaatcattctggtggtataaaaaagtgattgccagtaatggggaagatttagagaactgcaaggagagccagtacagcccgccggaaagcagtaccgcagccggaagggtaaacacccaggccatcagaatgctggtcacggttttacgctgtaagccgccaccatctaccaccatcgtccccgcgacagaagaggagagtttctcgggctgggtcccctgtggagggtttggacccttccggaggtttagtgaggagtcgctgtcgccatggccgtcgaggctccagttgcccggtagattctcggggagacggtttcaaagcggtcagtggcgggagaagtttcaactctgtgagatgaatgcacacatcacaaagagattcctcagaatgcttctgtgtagtttttatgtgaagatatttcctgtaaaactattggcctcaaagcgctccaaatatccacttgtagattctagaaaaagattgtttcataactgctcaattgaaagaaaggttcaactctatgagacgaatgcacacatcaaaaagaagtttcacagaattcttctgtggagttttatgtga

SEQ ID NO: 123211 - DNA, 1538 bp, Homo sapiens
tggtaattcttcgtacccttgattgctcccctggcgtagctgtatactgcgatctgatccgcttgcggcacatcccgttatacggtaccgtaagcttgcatatttatagcccgaaattgttatcctcgtccgtcgtgcgacagcgcgtgcaaattgcggcgggagagttgcgggtagttcggttgaacgcgaatggtgtcggcccaggcgacgttctcgatccagataacttccgcgccccattctgcgaacatttgcccggcaaacggtccggcgatttcgataccggagaagacaacgcgcaatccggccaacggcacgaatttcggcatgggtagatgatccattatttgctcctgaataatttatgtagcgcatgactgccggatgcggcgtaaacgctttatccggcctacattcgtgctcccgtaggcgacccagcgtcaggatctgcatttcgtcagattccccggagacgcggtctacacgcagatcacgccagaagcgggctgatgccggtggtgcccgcaaatcccgacaccgcccagcacctgcattgcgctatccacaacttcaaatgccgcattggcgcagaagtatttgcacatcgctgcatcgccagaggtgatggtgccgttgtctgctttccacgctgcttcatacagcatgtttttcatggagtttaatttgatcgccatgtgggcgaatttttcctgaatcaactggaaacgaccaatagcctcgccaaactgcacgcgctgattggcgtacgcgccgcatatcgccgtaccgtagttggtgagggctaccaggaaacgttcatggtcgaactcttctttgacgcggttaaagccgttaccttcccgaccgaacatgtctttctcgtccagttccacgtcgtcaaaggtgatttcacagcagctatccatacgcagaccgagcttttcaagtttggtcactttgatgcccggtttgctcatatcaacaaaccattcggtgtagacaggtttgtccggagaagccccgtcgcgcgccatcaccacgatgtacggggtgtaggcgctgctggtaataaaacacttactaccattaagataaatcttaccatttctacgggtataagtcgttttcaggctacccacgtcggagcccgcgcccggttcggtaatcgctgagttccacatctgcttaccggtgccgcggaaagccataattttgtcgatctgctcttgtgtgccttcgcgcaggaaggtgttgaacccgcccggcaactggtacagcacataggttggtgcccccagacgtcccagctccatccacacggcggcgagagtaacaaaccccgcgtccagaccaccgtgctcttcagggatcagcagactgtcgatacccatatccgccagtgctttgacaaaacgttccgggtagacgctgtcacggtcgcactcggcaaaataggcctcccagttttcgctggccatcagttcgcggataccggcgacaaacagttcctgctcatcatttaaattaaaatccat

SEQ ID NO: 123212 - DNA, 2858 bp, Homo sapiens
ttatttcgaattgcgctggttagaccgcaagtcgaaccgtaccaccgcgagcaaaaccagatccgtatcgggacgaagttttcttctgatgtgaaactgccggatgcggcgtaaacgccttatccggatgcaataactacacatgatatagttgatacatatccggtccagggtggtgctgttcgcgtgcttgttttctctgcttggtcgcttcgtgttgtgtctagtgtcttgttttcgcttgtgtggggtttcgtgtcgttctgtcgtcgttttgttccgtgtcgtgtctgcgtgcttctgtgttgtttgttctggtgttttgtttttggcgtgtggctgccgcgccgccatatgagtaaccatgccgccataggagttggagaacaacagtgccagcgcggtaacattaacggtgcgccggagacgttcgccagcatggcaaataccggtacatagcaacgatataggcatttgaaaaatatttaacgacaggcgcgtgcaaattgcggcgggagagttgcgggtagttcggttgaacgccgaatggtgtcggcccaggcgacgttctcgatccagataacttccgcgccccattctgcgaacatttgcccggcaaacggtccggcgatttcgataccggagaagacaacgcgcaatccggccaacggcccgaatttcggcatgggtagatgatccattatttgctcctgaaaaatttatgtagcgcatgactgccggatgcggcgtaaacgctttatccggcctacattcgtgctcccgtaggcctgcgtacaactgccggatgcggcgtaaacgccttatccgtcctacaaaatcgtctcttccgtcaaaatcccctgtgagtttcatattggacattggtggaggggtgaggaaaagaggagggcagggagatcgtcccacatctgaggctctagtgtttccttttgagtcaagcctcccaggatgtttctgaactggtccctggccaccacgtggggacctggaagatagctccctgctcctcagtcctgggggcccaagttccacagccccttggtagaccgcgtgcgcgtcagcgtacctgttttctgcgtcgtcacggtcaacaaagacaaagccgtagcgtttgctcatttcacccgtagaggcggaaactaaatcaatacagccccatgtggtgtagcccatcagcggaatgccgtctgcaatcgcttcgcccattgcgcggatatgttcgcgtaagtagctgatgcgatagtcgtcgttaatctcgccattggcagcaaattcaatcttttgcgcccaggccgttttccaccagaaacagcggcttcgtggttctgccagaaggtagaggtttcagtcaccagcggatcgataaccaccatgtacttcagcttgctcaggcagctcaccactttgtttttgtccgggaaggacgcaaccgggttaaagccctggcagaaataaccggtgactttgccttcatccatcatgttgaaatacttgatgacgtcgtaggtctggtcccacttcggcagccagtcatagccccagttgttctctttctgcgcggcatcgccatagaaagatttcatcaggctaacgaagaacttcggatagttgctccagtagttcacctgatcagccagcgtcgctttcggcgtgttcgcttccagatacgactgcaaatcaacctgtttttctgacggcagcgtcagataacctggcaggctggtagagagcaggcctaagtcagtcaagccctgaatgttggagtgaccacgcaatgcgttcacgccgccaccggccatacccatgttaccgagcagcaactggatcatcgccatagtacggatgttctgcgcacccacagtgtgctgcgtccagcccagcgcgtacaggaaggtggtttgtgcgatccggtgcgtttcaggaagtcggcttttggcgtaccgcagatgttttccaacgacgtccggcgtgtagcgggaaacgtgctctttcagcaggttccacacacagcgcggatgagtcagtgtttcatcgcgtttcgcatagccgttttcatcgagctgatagttccaggacgatttatcgtattgacgtttttcagcgtcgtagccgctgaacagaccgtcttcgaaagcaaaatcatcacgcaccagcaggctggcgttggtgtaatgcttaacgtattcggcgttgattttgttgttttcgatcaggtagcgcaaaacgccagacaggaacgtaatgtccgtaccggaacgaataggcgcgtaaatatccgccacagaagcggtacgcgtaaaacggggatcgacaacgatcaaggttgcgtcgttgttgtttttcgcttccatcgcccagcggaaaccgacgggatgcgcttcagcagcgttaccgcccatcaccatcacgacgttagcgtttttgatatccacccagtggttggtcatcgcaccgcgaccaaatgttggagcaagacttgcggtagaaagccaacggtttaccgttacgccctgctcgttcttttcaataaagttagcgtcacggtcagctttcatcagcttcgcaatacgggagaatgcttcttcccagctaatgcgctccattgtcaggtacctttgagataattgtaattgaccaaagatgtcagctgatactttgaagttttttagggtccatttggaggagtcaagaacggcacgtagggatgaggatgccgaagggattggttcattggagattcgctgtgtaagtttcatggtcgcagtaaaattcgaccaggaggttgccaatgtgcgtgttgtaaacccatacagggggtactcaaggccgggtggcat

SEQ ID NO: 123213 - DNA, 2238 bp, Homo sapiens; identical to SEQ ID NO: 117937

SEQ ID NO: 123214 - DNA, 1824 bp, Homo sapiens
atgggagactttaacaccccactgtcaacattagacagatcaacgagacagaaagtcaacaaggatacccaggaattgaactcagctctacaccaagcggacctaatagacatctacagaactctccaccccaaatcaacagaatatacatttttttcagcaccacaccacacctattccaaaattgaccacacagttggaagtaaagctctcctcagcaaatgtgaaagaacagaaattataacaaactatctctcagaccacagtgcaatcaaactagaactcaggattaagaaactcactcaaaactgctcaactacatggaaactgaacaacttgctcctgaatgactactgggtacataacgaaatgaaggcagaaataaagatgttctttgaaaccaaaatacaaactaccatcagagaatactacaaacacctctatgcaaataaactagaaaatctagaagaaatggataaattcctcgacacatacactctcccaagactaaaccaggaagaagttgaatctctgaatagactgataacaggatctgaaattgtggcaataatcaatagcttaccaaccaaaaagagtccaggaccagatggattcacagccgaattctaccagaggtacaaggaggaactggtaccattccttctgaaactattccaatcaatagaaaaagagggaatcctccctaactcatcttatgaggccagcatcatcttgataccaaagccgggcagagacacaaccaaaaaagagaattttcgaccaatgtccttgatgaacattgatgcaaaaatcctcaataaaatactggcaaaccaaatccagcagcacatcgaaaagcttgtccaccatgatcaagtgggcttcatccctgggatgcaaggctggttcaatatacgcaaatcaataaatataatccagcatataaacagaaccaaggacaataaccacatgattatctcaatagatgcagaaaaggcctttgacaaaattcaacaacgctgcatgctaaaaactctcaataaattaggtattgatgggacgtatctcaaaataataagagctatctatgacaaacccacagccaatatcatactgaatgggcaaaaactggaagcattgcctttgaaaactggcacaagacagggatgccctctctcaccactcctattcaacatagtgttggaagttctggccagggcaattaggcaggagaaggaaataaagggtattcaattaggaaaagaggaagtcaaattgtccctgtttgcagatgacatgattgtatatctagaaaaccccattgtctcagcccaaaatctccttaagctgataagcaacttcagcaaagtctcaggatacaaaatcaatgtacaaaaatcacaagcattcttatacaccaacaacagacaaacagagagccacatcatgagtgaactcccattcacgattgcttcaaagagaataaaatacctaggaatccaacttacaagggatgtgaaggacctcttcaaggagaactacaaaccactgctcaaggaaataaaagaggatacaaacaaatggaagaacattccatgctcatgggtaggaagaatcaatattgtgacaatggccatactgcccaaggtaatttacagattcaatgccatccccatcaagctaccaatgactttcttcacagaattggaaaaaactactttaaagttcatatggaaccaaaaaagagcccgcatcaccaagtcaatcctaagccaaaagaataatgctggaggcatcacactacctgacttcaaactatactag

SEQ ID NO: 123215 - DNA, 1785 bp, Homo sapiens; identical to SEQ ID NO: 122736

SEQ ID NO: 123216 - DNA, 2025 bp, Homo sapiens; identical to SEQ ID NO: 119515

SEQ ID NO: 123217 - DNA, 3465 bp, Homo sapiens; identical to SEQ ID NO: 121943

SEQ ID NO: 123218 - DNA, 2022 bp, Homo sapiens
atggacacaataaaaaatgataaaggggatatcaccaccgatcccacagaaatacaaactaccatcagagaatactataaacacctctatgcaaataaactagaaaatctagaagaaatggataaattcctcgacacatatacccttccaagactaaaccaggaagaagttgaatctctgaatagaccagtaagaggctctgaaattgaggcaataattaatagcttaccaaccaaaaaagtccaggaccagatgaattcacagccgaattctaccaaagaaaaggcctttgacaaaattcaacaagccttcaccctaaaaactctcaataaattagttattgatgggacgtatcgcaaaataataagagctatctgtgacaaacccacagccaatatcatactgaatgggcaaaaactggaagcattccctttgaaaactggcacaagacagggatgccctctctcaccactcctattcaacatagtgttggaagttctggacagggcaatcaggcaagagaaggaaataacgtgtattcaattaggaaaagaggaagtcaaattgtccctgtttgcagatgacatgattgtatatctagaaaacccaatcatctcagcccaaaatctccttaagctgataagcaacttcagcaaagtctcaggatacaaaatcaatgtacaaaaatcacaagcattcttatacaccaataatagacaaacagagagccaaatcatgagtgaactcccattcacaattgcttcaaagaaaataaaatacctaggaatccaacttacaagggatgtgaaggacctcttcaaggagaactacaaaccactgcttaatgaaataaaagaggatacaaacaaatgggagaacattccatgctcatgggtaggaagaatcaatatcatgaaaatggccatactgcccaaggtaatttatagattcaatgccatccccatcaagctaccagtggctttcttcacagaattggaaaaaactactttaaagttcatatgggaccaaaaacgggcctacattgcgaagtcaatcctaagccaaaagaacaaagctggagtcatcatgctacctgacttcaaactatactacaaggctacagtaaccaaaacagcatggtactggtaccaaaacagagatatagatcaatggaacagaacagagccctcagaaataatgctgcatatctacaactatctgatctttgacaaacctgacaaagatgagcaatggggtaaggattccctgtttaataaatggtgttgggaaaactggctagacatatggagaaagctgaaactggatccctttcttacaccttatacaaaaattaattcaagatggattaaagacttaaatgttagacctaaaaccataaaaaccctagaagaaaacctaggcaataccattctggacataggcatgggcaaggacttcatgtctaaaacaccaaaagcaatggcaacaaaagccaaaattgacaactgggatctaattaaactaaagagcttctgcacagcaaaagaaactaccatcagagtgaacaggcaacccacaaaatgggagaaaattttcacaacctactcatctgacaaagggctaatatccagaatctacaaagaactcaaacaaatttacaagaaaaaaacgaacaaccccatgaacaaatgggcgaaggatatgaacagacacttctcaaaagaagacatttatgcagccaaaagacacatgaaaaaatgctcatcatcactggccatcagagaaatgcaaatcaaaaccacaatgagataccatctcacaccagttagaatggtgatcattaaaaagtcaggaaacaacaggccacccctaagcaaagaacaacctcctatttttcgtttaagtattattttggcaaccacaagagatggcaaccctgctgcagttgaaaatgtgctccacatcaaagccacactttcttttcagcagactcacaaagctttttatttccagccctcctga

SEQ ID NO: 123219 - DNA, 3480 bp, Homo sapiens; identical to SEQ ID NO: 118327

SEQ ID NO: 123220 - DNA, 2463 bp, Homo sapiens; identical to SEQ ID NO: 116397

SEQ ID NO: 123221 - DNA, 1392 bp, Homo sapiens
gtactgctgtcctttggcacacctctagtgctgaccactgaccttctccaggctctctcctctttgcctttcatggaatcagggctttttcaaggtgaaggagatgaaatacaaattaccagcatagaatactataaacacctctacgcaaataaactagaaaatctagaagaaatggataaactcctcgacacatacaccctcccaagactaaaccaggaaggagttgaatctctgaatagaccaataacaggatctgaaattgaggcaataattaatagcttaccaaccaaaaaaggtccaggaccagatggattcacagccaaattctgccagaggtacaaggaggagctgcacatcaaaaagcttatccaccatgatcaagtgggcttcatccctgggatgcaaggctggttcaacatacgcaaatcaataaacgtaatcgagcatataaacagaaccaaggacaaaaaccacatgattatcttaatagatgcagaaaaggcctttgacaaaattcaacaacccttcatgctaaaaactctcaataaattaggtattgatgggacgtatctcaaaataataagagctatctatggcaaacccacagtcaatatcatactgaataggcaaaaactggaagcattccctttgaaaactggcacaagacagggatgccctctctcaccactcctattcaacatagtgttggaagttctggccaaggcaattaggcaggagaaggaaataaagggtattcaattaggaaaagaggaagtcaaattgtccctgtttgcggacgacatgattgtatatctagaaaaccccatcatctcagcccaaaatctccttaagctgacaggcaacttcagcaaagtctcaggatacaaaatcaatgtgcaaaaatcacaagcattcttatacaccaataacagacaaacagagagccaaatcatgagtgaactcccattcacaattgcttcaaagagaataaaatacctaggaatccaacttacaagggatgtgaaggacctcgtaaaggagaactacaaaccactgctcaaggaaataaaagaggatacaaacaaatggaagaacattccatgctcatgggtaggaagaatcaatatcctgaaaatggccatactgcccaaggtaatttatagattcaatgccatccccatcaagctaccaatgactttcttcacagaattggaaaaaactactttaaagttcatatggaaccaaaaaagagcctgcattgccaagtcaatcctaagccaaaagaacaaagctggaggcatcacgctacctgacttcaagcgatgctacaaggctacagtaaccaaaacagcatggtactggtaccaaaacagagatatagaccaatag

SEQ ID NO: 123222 - DNA, 1659 bp, Homo sapiens; identical to SEQ ID NO: 119496

SEQ ID NO: 123223 - DNA, 1716 bp, Homo sapiens
atggtaaagggatcaattcaacaagaagagctaactatgctaaatgtatatgcacccaatacaggagcacccaggttcataaagcaagtcctgagtgacctacaaagagacttagactcccacacattaataacgggagactttaacaccccactgtcaacattagacagatcaatgagacagaaagtcaacaaggatacccaggaattgaactcagctctgcaccaagcggacctaatagacatctacagaattctccatcccaaatcaagagattatacatttttttcagcaccactccacacctattccaaaattgaccacatacttggaagtaaagctctcctcagcaaatgtaaaagaacagaaattataacaaactatctctcagaccacagtgcaatcaaactagaactcaggtttaagaatctcactcaaaacggctcaactacatggaaactgaacaacttgctcctgaatgactactggatacatatcgaaatgaaggcagaaataaagatgttctttgaaaccaacgagaacaaagacacaacataccaggatctctgggacatattcaaagcagtgtgtagagggaaatttataacactaaatgcccacaagagaaagatcaacaaaatagatagaccactagcaagactaataaagaaaaaaagagagaagaatcaaatagacacaataaaaaatgataaaggggatatcacccccgatcccacagaaatacaaactaccatcagagaatactacaaacacctctacacaaataaactagaaaatctagaagaaatggataaattcctcgacacatacactctcccaagactaaaccaggaagaagttgaatctctgaatagaccaataacaagaggtgaaattgtggaaataatcaatagtttaccaaccaaaaagagtccaggaccagatggattcacagccgaattctatcagaggtacaaggaggaactggtaccattccttctgaaagtattccaatcaacagaaaaagagggaatacaccctaactcattttatgaggccagcatcattctgataccaaagccgggcagagacacaacaaaaaaagagaattttagaccaatatccttgatgaacattgttgcaaaaatcctcaataaaatactggcaaaccgaatccagcagcacatcaaaaagcttatccaccatgatcaagtgggcttcatccctgggatgcaaggctggttcaatataagcaaatcaataaatgtaatccagcatataaacagagccaaagacaaaaaccacatgattatctcaatagatgcagaaaaagcctttgacaaaattcaacaacgcttcatgctaaaaactctcaataaattaggtattgatgggatgtatctcaaaataataagagctatctatgacaaacccacagccaatatcatactgaatgggcaaaaactggaaacattccctttgaaaactggcacaagacagggatgccctctctcaccactcctattcaacatagtgttggaaattctcgccagggaaattaggcaggagaaggaaataaagtgtattcaattaggaaaagaggaagtcaaattgtccctctttgcagacaacatgattgtatatctagaaaaccccattgtctcagcccaaaatctccttaagctgataagcaacttcagcaaagtctcaggataa

SEQ ID NO: 123224 - DNA, 3171 bp, Homo sapiens; identical to SEQ ID NO: 121976

SEQ ID NO: 123225 - DNA, 2952 bp, Homo sapiens
atgcttctaaaccaaggcagaaagctacccagagtttttgcagaggaaactctcaagttcaaggggacctctaacaagccccagaccctggaacagatcagcaccagcatcatagcccagaaagaggctacagtcatggttcctgggagtaaccaggagattccctctggtgcctacgccatcagagccctgggtttcaagcataaaactgggcggctgtttgagcagacactgaactacctgcaggagtttcttttcacaccccagtggcacctggaatgccagcaagagagaactgtccactcccctggaaaagcagctgaagccagagagccaagtgtgatcgacagacacctcatacaggagagctccaactggcatctggtgggtgccgctctgggacaaagcttccagaggaaggaacaggcagcaatctttgctgttctgcagcctctgctggtgatacccaggcaaacaggatctggagtggacctccagaaaactccaacagacctgcagcagaggggcctgattgttagaaggaaaactaataaacagaaaggaatagttcacaactcaacaacaagggaacaaaactggacagagaatgagtttgacaaattgacagaaggaggcttcaaaaggtgggtaataacaaactcctctgagctaaaggagcatgttctaacccaatgcaaggaagataagaaccttgaaaaaagtgcaatcaaactagaactcaggattaagaatctcattcaaaaccactcaactacatggaaactgaacaacctgctcctgaatgactactgggtacataacgaaatgaaggcagaaataaagatgttctttgaaaccaacgagaacaaagacacaacataccagaatctctgggacgcattcaaagcagtgtgtagagggaaatttatagcactaaatgcccacaagagaaagcaggaaagatccaaaattgacaccctaacatcacaattaaaacaactagaaaagatcaacaaaattgatagaccgctagcaagactaataaagaaaaaaagagagaagaatcaaatagatgcaataaaaaatgataaaggggatatcaccaccgatcccacagaaatacaaactaccatcagagaatactacaaacacctctacgcaaataaactagaaaatctagaagaaatggataaattcctcgacacatacactctcccaaggctaaaccaggaagaagttgaacctctgaatagaccaataacaggatctgaaattgtggcaataatcaatagcctaccaactaaaaagagtccaggaccagatggattcacagccgaattctaccaggggtacaaggaggaactggtaccattccttctgaaactattccaatcaatagagaaagagagaatccaccctaactcactttatgaggccagcatcatcctggtactaaagccagccagagacacaaccaaaaaagagaattttagaccaatatccttgatgaacattgatgcaaaatcctcaataaaatactggcaaaccgaatccagcagcacatcaaaaagcttatccaccatgatcaagtggcttcatccctgggatgcgaggctgcatataaacagaaccaaagacaaaaaccacatgattatctcaatagatgcagaaaaggcctttgacaaaattcaacaacccttcatgctaaaaactctcaataaattaggtattgatgggacgtatctcaaaataataagagctatctatgacaaacccacagccaatatcatactgaatgggcaaaaactggaagcattccctttgaaaactggcacaagacagggatgccttctctcaccactcctattcaacatagtgttggaagttctggccagggcaattaggcaagagaaggaaataaagggtattcaattaggaaaagaggaagtcaaattgtccctgtttgcagatgaaatgattgtatatctagaaaacccaattgtctcagcccaaaatctccttaagctgataagcaaattcagcaaagtctcaggatacaaaatcaatgtacaaaaatcacaagcactcttatacaccaaaaacagacaaacagagagccaaatcatgagtgaactcccattcacaattgcttcaaagagaataaaatacctaggaatccaacttacaagggacgtgaaggacctcttcaaggcgaactacaaaccactgctcagtgaaataaaagaggatacaaacaaatggaagaacattacatgctcatgggtaggaataatcaatatcgtgaaaatggccatactacccaagataatttacgcattcaatgccatccccatcaagctaccaatgactttcttcacagaattggaaaaaactactttaaagttcatatggaaccaaaaaagagcccgcatcgccaagtcaatcctaagccaaaagaacaaagctggaggcatcacactacctgacttcaaactatactacaaggctacagtaaccaaaacagcatggtactggtaccaaaacagagatatagaccaatggagcagaacagagccctcagaaataacgccgcatatctacaaccatctgatctttgacaacaaacctgagaaaaacaagcaatggggaaaggattccatgtttaataaatggtgctgggaaaactggctagccatatgtagaaagctaaaactggatcccttccttacaccttatacaaaaatcaattcaagatggattaaagacttaaacttcagacctaaaaccataaaaaccctagaagaaaacctaggcattaccattcaggacataggcatgggcaagggcttcatgtctaaaactaaagagcttctgcacagcaaaagaaactaccatcagagtgaacaggcaacctacaacatgggagaaaatttttgcaatctactcatctga

SEQ ID NO: 123226 - DNA, 2406 bp, Homo sapiens; identical to SEQ ID NO: 120658

SEQ ID NO: 123227 - DNA, 2310 bp, Homo sapiens; identical to SEQ ID NO: 120375

SEQ ID NO: 123228 - DNA, 2776 bp, Homo sapiens
tacaaagagacttagactcccacacattaataatgggagactttaacaccccactgtcaatattagacagatcaacgagacagaaagtcaacaaggatacccaggaattgaactcagctctgcaccaagcggacctaatcgacatctacagaactctccaccccaaatcgacagaatatacatttttttcagcaccacaccatacctattccaaaattgaccacatacttggaagtaaagctctcctcagcaaatgtaaaagaacagaaattataacaaactgtctctcagaccacagtgcaatcaaactagaactcaggattaagactctcactcaaagccactcaactacatggaaactgaacaacctgctcctgaatgactactgggtacataacgaaatgaaggcagaaataaagatgttctttgaaaccaacgagaacaaagacacaacataccagaatctctgggacgcattcaaagcagtgtgtagagggaaatttatagcactaaatgcccacaagagaaagcaggaaagatccaaaattgacaccctaacatcacaattaaaagaactagaaaagcaagagcaaacacattcaaaagctagcagaaggcaagaaataactaaaatcagagcagaactgaaggaaatagagacacaaaaaacccttcaaaaaatcaatgaatccaggagctggttttttgaaaggatcaacaaaattgatagaccgctagcaagactaataaagaaaaaaagagagaagaatcaaatagacacaataaaaaatgataaaggggatatcaccactgatcccacagaaatacaaactaccatcagagaatactacaaacacctctacgcaaataaactagaaaatctagaagaaatggatacattcctcgacacatacactctcccaagactaaaccaggaagaagtcgaatctctgaatagaccaataacaggagctgaaattgaggcaataatcaatagtttaccaaccaaaaagagtccaggaccagatggattcacagccgaattctaccagaggtacaatgaggagctggtaccattccttctgaaactattccaatcaatagaaaaagagggaatcctccctaactcattttatgaggccagcatcattctgataccaaagccaggcagagacacaaccaaaaaagagaattttagaccaatatccttgatgaacattgatgcaaaaatcctcaataaaatactggcaaaccgaatccagcagcacatcaaaaagcttatccaccatgatcaagtgggcttcatccctgggatgcaaggctggttcaatatacgcaaatcaataaatgtaatccagcatataaacaaagccaaagacaaaaaccacattattatctcaaggaagcattccctttgaaaactggcacaagacagggatgccctctctcaccgctcctattccatagtgttggaagttctggccagggcaatcaggcagaagaaggaaataaagggtattcaattaggaaaagaggaagtcaaattgtccctgtttgcagacgacatgattgtttatctagaaaaccccattgtctcagcccaaaatctccttaagctgataagcaacttcagcaaagtctcaggatacaaaatcaatgtacaaaaatcacaagcattcttatacaccaagaacagacaaacagagagccaaatcatgagtgaactcccattcacaattgcttcaaagagaataaaatacctaggaatccaacttacaagggatgtgaaggacctcttcaaggagaactacaaaccactgctcaaggaaataaaagaggacacaaacaaatggaagaacattccatgctcatgggtaggaagaatcaatatcgtgaaaatggccatactgcccaaggtaatttacagattcaatgccatccccatcaagctaccaatgactttcttcacagaattggaaaaaactactttaaagttcatatggaaccaaaaaagagcccgcatcgccaagtcaatcctaagccaaaagaacaaagttggaggcatcacactacctgacttcaaactatactacaaggctacagtaaccaaaacagcatggtactggtaccaaaacagagttatagatcaatggaacagaaaagagccctcagaaataacaccgcatacctacaactatctgatctttgacaaacctgagaaaaacaagcaatggggaaaggattccctatttaataaatggtgctgggaaaactggctagccatatgtagaaagctgaaactggatcccttccttacaccttatacaaaaatcaattcaagatggattaaagatttaaatgttagacctaaaaccataaaaaccctagaagaaaacctaggcattaccattcaggacataggcatgggcaaggacttcatgtccaaaacaccaaaagcaatggcaacaaaagccaaaattgacaaatgggatctaattaaactaaagagcttctgcacagcaaaagaaactaccatcagagtgaacaggcaacctacaacatgggagaaaattttcacaacctactcatctgacaaagggctaatatccagaatctacaatgaactcaaacaaatttacaagaaaaaaacaaacaaccccatcaaaaagtgggtgaaggacatgaacagacacttctcaaaagaagatatttatgcagccaaaaaacacatgaaaaaatgctcatcatcactggccatcagagaaatgcaaatcaa

SEQ ID NO: 123229 - DNA, 3213 bp, Homo sapiens; identical to SEQ ID NO: 116408

SEQ ID NO: 123230 - DNA, 1692 bp, Homo sapiens
atggcgggcgtggggccggggggctacgcggcggagttcgtgccaccgccagagtgccccgtctttgagccgagttgggaggagttcacagatccgctcagctttatcggccgcatccggcctttggcggagaaaaccggcatctgcaaaattcggccgcccaaggactggcagcctccatttgcctgtgaagtaaaaagctttcgtttcactccaagagtccagcgcctgaatgaacttgaggcaatgaccagagtgagattggatttcttggatcaactagcaaaattttgggaacttcaaggatctactctgaagatccctgtggtagagagaaaaatcctggatctgtatgctttgagcaaggaacacagcttctcgccagcaacggaacaaagctggacagagaatgactttgatgagttgagagaagaaggcttcagacgatcagacttctccgagctaaaggaggaagttcgaacccatcgcaaagaagctaaaaaccttgtaaaaagattagacaaatggctaaatagaataaccagtgtagagaagtctttaaatgacctgatggagctgaaaaccatggcacgagaacaactacgtgatgaatgcacaagcttcagtagccaatttgatcatttggaagaaaggaaatacaaactaccatcagagaataaacacctctatgcaaataaactagaaaatctagaagaaatggataaattcctggagacatacaccctcccaagactaaaccaggaagaagttgaatccctgaatagaccaataacaggctctgaaattgaggcaataattaatagcctaccaaccaaaaacagtccaggaccagatagattcacagccaaattctaccagatgtacaaggaggagctggtaccattctttctgaaactattccagtcaatagaacaagagggaattctccctaactcattttatgaggccagcatcatcctgataccaaagcctggcagagacccaacaaaaaaagagaattttagaccaatatccctgatgaacatcgatgcgaaaatcttcaataaaatactggcaaaccaaatccagcagcacatcaaaaagcttatccaccatgatcaaatgggcttcatccctgggatgcaagactggttcaatatacgcaaatcaataaacgtaatccagcatataaacagaaccaaagacaaaaaccacacaattatctcaatagatgcagaaaaggcctttgacaaaattcaacaatgcttcatgctaaaaactctcaataaattaggtattgatgggacgtatgtcaaaataataagagctatttatgacaaacccacagccaatatcatactggatgggcaaaaactggaagcattccctttgaaaactagtacaatacagggatgccctctctcaccactcctattcaacatagtgttggaagttctggccagggcagtcaggcaggaaaaagaaataaagggtattcaatcaggaaaagaggaagtcaagttgtccctgtttgcagatgacatgactgtatatttagaaaaccccatcatctcagcccaaaatctcctaaagctgaaaagcaacttcagcaaagtctcaggatacaaaatcaatgtgcaaaaatcacaagcattcttatacaccaataacagagagccaaatcatgagtga

SEQ ID NO: 123231 - DNA, 1518 bp, Homo sapiens; identical to SEQ ID NO: 120944

SEQ ID NO: 123232 - DNA, 1863 bp, Homo sapiens
atgaatccaggagctgattttttgaaaagatcaacaaaattgagactgctagcaagactaataaagaagaaaagagagaagaatcaaatagatgcaataaaaaatgataaaggggatatcaccaccgatcccacagaaatacaaactaccatcagagaatactataaacacctctacacaaataaactagaaaatctagaagaaatggataaattcctcaacacatacaccctcccaagactaaaccaggaagaagttgaatccctgaatagactaataacaggctctgaaattgaggcaataatcaatagcctaccaaccaaaaaaagtcctggactagacacattcacagctgaattctaccagaggtacaaagaggagctggtaccattccttctgaaactattccaatcaatagaaaaagagggaatccttcctaactcattttatgaggccatcatcattctgatacaaaagcctggcagagacacaacaaaaaaagagaattttagaccaatatccctgatgagcatcaatgcaaaaatcctcaataaaatactggcaaacagaatccagcagcacatcaaaaagcttatccaccatgatcaagtgggctccatccctgggatgaaaggctggttcaacatatgcaaatcaataaatgtaatgcagcatataaacagaaccaaatacaaaaaccacatgattatctcaatagatgaagaaaaggcctttcagaaaattcaaaagcgcttcatgctaaaaactctcaataaattaagtattgatgggacatatctcaaaataataagagcgatctatgacaaacccacagccaatatcatactgaatgggcaaaaactggaagcattccctttgaaaaaatggcacaagacagggatgtcctctctcaccagtcctattcaacatagtgttggaagttctggccagggcaatcagctgataagctgcttcagcaaagtctcaggatacaaaatcaatgtacaaaaatcacaagcattcttatacaccaacaacaggcaaacagagagccaaatcatgagtgaactcccattcacaattgcttcaaagagaataaaatacctaggaatccaacttacaagggatgtgaaggacctcttcaaggagaactacaaaccactgttcaatgaaataaaagaggacacaaacaaatggaagagcattccatgctcacgggtaggaagaatcaatattgtgaaaacggccatactgcccaaggtaatttatagattcaatgccatccccatcaagctaccaatgactttcttcacagaattggaaaaaactactttaaagttcatatggaaccaaaaaagagcctgcattgtcaagacaatcctaagcaaaaagaacaaagctggaggcatcacactacctgacttcaaacgatactacaaggctacagtaaccaaaacagcatgtcattccatgagcttggaaagacccagctggctaccagaacaactgtttccaccttccaacaaatccctggcatctaagttcagttgcgctttgacttctccagagatatcacacttctcagtctcctttgcagataggtgggaccatgtgagtgggttctacacagtggaatgtgggcagatgccatatataccccttccaggcttgtcccgtaggcttctggcagaatgcttcatgacttctctcttcccttgcctgcaggctgaaagcaaagggcccagtggaggatggcaaagcctcataagacagaaaagccacaccacagaaaagcctgggaccctgaatgactgtgtgaaccagagagtcttgaaagccattcccataactgtacttaactga

SEQ ID NO: 123233 - DNA, 2034 bp, Homo sapiens
atggaagatgaaatgaatgaaatgaagcgagaagggaagtttagagaaaaaagaataaaaagaaatgagcaaagcctccaagaaatatgggactatgtgaaaagaccaaatctacatctgattggtgtacctgaaagtgatgtggagaatggaaccaagttggaaaacactctgcaggatattatccaggagaacttccccaatctagcaaggcaggccaacgttcagattcaggaaatacagagaacgccacaaagatactcctcgagaagagcaactccaagacacataattgtcagattcaccaaagttgaaatgaaggaaaaaatgttaagggcagccagagagaaagggcactgtaactctggcaaaagtcacagatccctttgggaacaaaacaagggaatatttaccacatgtatttgtgatgatgccgaggacttacagtctccttcaactgctggaccctggtttggggttctttataccaaaggtggaccctaccctcaggaagacatattcagtgaagaagttcatacaggccctaagttgaggaagaaaattcaagagtaccagttaacaagcaaatggtcaaaaagtgatgttcaggtttctgtggagaggagaatggctggaggaaatccaaaccagtgccatattggggaagttctcctggatggattcacagctgaattctaccggaggtacaaggaggaactggtaccattccttctgaaactattccaatcaatagaaaaagagggaatcctccctaactcattttatgaggccagcatcattctgatacaaaagccaggcagagacacaacaaaaaaagagaattttagaccaatatccttgatgaacattgatgcaaaaatcctcaataaaatactggcaaaacgaatccagcagcacatcgaaaagcttatccaccatgatcaagtgggcttcatccctgtgatgcaaggctggttcaatatatgcaaatcaataaatgtaatccagcatataaacagagccaaagacaaaaaccacatgattatctcaatagatgcagaaaaagcctttgataaaattcaacaacccttcatgctaaaaactctcaataaattaggtattgatgggatgtatttcaaaataataagagctatctatgacaaacctacagccaatatcatactgaatgggcaaaaactggcagcattccctttgaaaactggcacaagacagggatgccctctctcaccactcctattcaacatagtgttggaagtcctggccagggcaatcaggcaggagaaggaaataaagggtattcaattaggaaaagaggaagtcaaattgtccctgtttgcagatgacatgatcgtatatctagaaaaccccattgtctcagcccaaaatctccttaagctgataagcaacttcagcaaagtctcaggatacaaaatcaatgtacaaaaatcacaagcattcttatacaccaataacagacaaacagagagccaaatcatgagtgaactcccattcacaagtgcttcaaagagaataaaatacctaggaatccaacttacaagggatgtgaaggacctcttcaaggagaactacaaaccactgctcaaggaaataaaagaggatacaaacaaatggaagaacattccatgctcatgggtaggaagaatcaatatcgtgaaaatggccatactgcccaaggtaatttatagattcaatgccatccccatcaagctaccaatgcctttcttcacagaattggaaaaaactactttaaagttcatatggaaccaaaaaagagccctcatcaccaagttaatcctaagccaaaagaacaaagctggaggcatcacactacctgactttaaactatactacaaggctacagtaaccaaaacagcatggtactggtaccaaaacagagataaagatcaatggaacagaacagagccctcagaaataacgccgcatatctacaattatctgatctttgacaaacctgagaaaaacaagcaatag

SEQ ID NO: 123234 - DNA, 2088 bp, Homo sapiens; identical to SEQ ID NO: 123083

SEQ ID NO: 123235 - DNA, 1870 bp, Homo sapiens
atgaaggcagaaataaagatgttctttgaaaccaacgagaacaaagacacaacataccagaatctctgggacacattcaaagcagtgtgtagagggaaatttatagcactaaatgctcacaaaagaaagcaggaaagatccaaaattgacacgctaacatcaccattaaaagaactagaaaagcaagagcaaacacattcaaaagctagcagaaggcaagaaataactaaaatcagagcagaactgaaggaaatagagacacaaaaaacccttcaaaaaattaatgaatccaggagctggatttttgaaagcatcaacaaaattgatagaccgctagcaagactaataaagaaaaaaagagagaagaatcaaatagacgcaataaaaaatgataaaggggatatcatcaccgatcccacagaaatacaaactaccatcagagaatactacaaacatctctacgcaaataaactagaaaatctagaagaaatggataaattcctggacacatacactctcccaagactaaacaaggaagaagttgaatctctgaatagaccaataacaggagctgaaattgtggcaataatcaatagcttaccaacaaaaaagagtccaggaccagatggattcacagccgaattctaccagaggtacaaggaggaactggtaccattccttctgaaactattccaatcaatagaaaaagacggaatcctccctaactcattttatgaggccagcatcattctgataccaaagccaggcagagacacaacaaaaaaagagaattttagaccaatatccttgatgaacattgatgcaaaaatcctcaataaaatactggcaaaccgaatccagcagcacatcaaaaagcttatccaccatgatcaagtgggcttcatccctgggatgcaaggctggttcaatatacgcaaatcgataaatgtaatccagcatataaacagagccaaagacaaaaaccacatgattatctcaatagatgcagaaaaggcctttgacaaaattcaacaacccttcatgctaaaaactctcaataaattaggtattgatgggacgtatttcaaaataataagagctatctatgacaaacccacagccagtgtcatactgaatggacaaaaactggaagcattccctttgaaaactggcacaagacagggatgccctctctcaccactcctattcaacagagtgttggaagttctggccagggcaattaggcaggagaaggaaataaagggtattcaattaggaaaagaggaagtcaaattgtccctgtttgcagatgacatgattgtatatctagaaaaccccatcatctcagcccaaaatctccttaagctgataagcaacttcagcaaagtctcaggatacaaaataaatgtgcaaaaatcacaagcattcttatacaccaacaacagacaaacagagagccaaatcatgagtgaactcccattcacaattgcttcaaagagaataaaatacctaggaatccaacttacaagggatgtgaaggacctcttcaaggagaactacaaaccactgctcaaggaaataaaagaggatgcaaacaaatggaagaacattccatgctcatgggtaggaagaatcaatatcgtgaaaatgaccatactgcccaagtctgagaaggtttcagtatgcccctcccttggtgcccacgtgattttcaagccatacaaggactggcctgtatgtgccagaactctcaccccagctcgatcacctaatctcattaaaaacagggcctgtcacccttctctgctctccaagctatttttggatcagcttataatcctgtcctattctccccagaaagcctcattat

SEQ ID NO: 123236 - DNA, 1413 bp, Homo sapiens
atgtccctccgcctcttaatcggagcctggggaaacaaacacactcgtgcaaaatctccaaagaggtgtcctccttcagcaaaagtccttgaaagaaccatacgagtgccatttaacaatgccctcgccggtccccccccgccctcaggggtagggtggaatgcacaagatcggtctgcaaccagccagcagccagcaggcacttggggccacagagctgatgcgggttctgaccctcatagagcttacaggcctgagaaggcagcatcacagcaccaggagacagtattccacaggcccctgtttggcaggaagaacgttctcttcgcaaccatggctgtacagactggcttcagcttcctgcagattttctccatcagctgggagatgttcactgtgttatttgtcatcgtgggcatgggccagatctccaactatgtggtagccttcatactagattattacttcttatccattggtctggtcatgctgggaaaatttgggatcacctctgctttctccatgctgtatgtcttcactgctgagctctacccaaccctggtcaggaacatggcggtgggggtcacatccacggcctccagagtgggcagcatcattgccccctactttgtttacctcgaaatacaaactaccatcagagaatactataaacacctctacacaaataaactagaaaatctagaagaaatggataaattcctggacacatacagcctcccaagactaaaccaggaagaagttgaatctctgattagaccaataacaggctctgaaattgaggcagtagttaatagcccaccaaccaaaaacagtccaggaccagacagattcacagccaaattctaccagaggtacagaggagctgggctccctagctcccctcctacatccctacaccctccttcccatccagtctttccagaagtgtggtccctcccattccctaggacggggctccaaaactggctctgcgtatcccagcagctcagctctcagaagggttacagtatccgaagtagtctgcttattcgcagaagcacagttgttctgaatactgagatccgaaagaagtgtctcctatgtacttcttccacaaaggagccactctgtgatgctgaggataatgtcctcgagaatagtcctgtcctagagacaatagcaagattcatgaggccgcctgtcacagtgctcaaatgctggccacaggcaacgcccaacacagctctgcagaagaaaaacaactcgggccaggaagttagcgctctgctgctcaggcacaatccaaggataaatctcagactgtacccagagcaggattgcctcgcctggggctcttgcatgggcttcaggagaaagggaaatgaatcctctaaaactgtatggccagattaa

SEQ ID NO: 123237 - DNA, 3999 bp, Homo sapiens
atggcatttgtccctcccattatgggaggatgcaccaagaggtgccatcttggaagcagagagcacccctcaccagatgccaaatctgccagcaccttgatcttggacttcacagtctccagaactccattttacaagaaaaaaatactgaagcacaaaaaggctaagcaacctgactcaaatcagacatctagtaaattggtagaactgggtatcaaaggaccaccagctccagaactgaagttctttaccacagccgtaaagtgcataaaccgggacagcattgggtctcttccaatgcctgctgttaccactacctggctaccactacgtttgctcaagcccttgggctccataatcggcaggtggcaaagccagccaggcttgtatccttcccttcaggatgacaagttcccccagactgtagatagctccagaggtgccatccaggggccagggtctggagtcaaacactttaactgcttggtgttctattgtactgcagctgagctggaactgaaaccacatgcccatgagaagtacttccagtctactggtgatgtttacttaaggcccaagggctcttcagttggcttgtggtcaaaggaaggctccttgcagacacctgagctttgtagaaaatctggccaggcagctgggccttcccatggattgtgtctcctgcagtactatggtgatggccagcctcttcagtgtgagccagaccttgatttcatgcgagaaggtggagtaggaggaagagaaggaggagagttagaaggagtaggaggaggaggaaaacctcctgatgctgtagagcttctgagagggctatgtaccaaaaaggtccgtgctcagaataaagaagatgcgatgtgtgtgacacttgtggctggaggtcaaaccaggaagacagacaccacagtgtctagagggaaatttatagcactaaatgtccacaagagaaagcaggaaagatccaaaattgacaccctaacatcacaattaaaagaactagaaaagcaagaacaaacacaatcaaaagctagcagaaggcaagagataactaaaatcagagcagaactgaaggaaatagagacacaaaaaacccttcaaaaaattaatgaatccaggagctggttttttgaaaggatcaacaaaattgatagaccgctagcaagactaataaagaagaaaagaaagaagaatcaaaaagatgcaataaaaaatgataaaggggatatcaccaccgctcccacagaaatacaaactgccatcagagaatactacaaagacctctacgcaaataaactagaaaatctagaagaaatggataaattcctcgacacatacgctctcccaagactaaaccaggaagaggttgaatctctgaatagaccaataacaggagctggaattgtggcaataatcaatagcttacaaaccaaaaagagtccagaaccagatggattcacagccgaattctaccagaggtacaaggaggaactggtgccattccttctgaaactattccaatcaatagaaaaagagggaatcctccctaactcatttgatgaggccagcatcatcctgataccaaagccaggcagagacacaaccaaaaaagagaattttagaccaatatccttgattaacattgatgcaaaaatcctcaataaaatactggcaaaccaaattcagcagcacatcaaaaagcttatccaccatgatcaagtgggcttcatccctccgatgcaaggctggttcaatatacgcaaatcaataaatgtaatccagcatataaacagaaccaaagacaaaaaccacatgattatctcaatagatgcagaaaaggcctttgacataattcaacaacccttcatgctaaaaactctcaataaattaggtattgatgggaagtatctcaaaataataagagctatctatgacaaacccacagccaatatcatattgaatgggcaaaaactggaagcattccctttgaaaactggcacaagacagggatgccctctctcaccactcctattcaacatagtgttggaagttctgggcagggcaattaggcaggagaaggaaataaagggtattcagttaggaaaagaggaagtcaaattgtccctgtttgcagacgacatgattgtatatctagaaaaccccattgtctcagcccaaaatctccttaagctgataagcaacttcagcaaagtctcagaatacaaaatcaacgtacaaaaatcacaaggattcttatacaccaacaacagacaaacagagagccaaatcgtgagtgaactcccattcacaattgcttcaaagagaataaaatacctaggaatccaacttacaagggacgtgaaggacctcttcaaggagaactacaaaccactgctcaaggaaataaaagaggatacaaacaaatggaagaacattcaatgctcatgggtaggaagaatcagtatcatgaaaatggccatactgcccaaggtaatttacagattcaatgccatccccatcaaactaccagtaactttcttcacagaattggaaaaaacgactttaaagttcatacggaaccaaaaaagagcccgcatcgccaagtcaatcctaagccaaaagaacaaagctggaggcatcacactacctgacttcaaactatactacaaggctacagtaaccaaaacagcatggtactggtaccaaaacagagatatagatcaatggaacagaacagagccctcagaaataatgccgcatatctacaactatctgatctttgacaaacctgagaaaaacaagcaatggggaaaggattccctatttaataaatggtgctgggaaaactggctagccatatgtagaaagctgaaactggatcccttccttacaccttatacaaaaatcaattcaagatggattaaagacttaaacgttagatctaaaaccataaaaaccctagaagaaaacctaggcattaccattcaggacataggcatgggcaaggacttcatgtctaaaacaccaaaagcaatggcaacaaaagccaaaactgacaaatgggatctcattaaactaaagagcttctgcacagcaaaagaaactaccatcagagtgaacaggcaacctacaaaatgggagaaaattttcacaacctactcatctgacaaagggctaatatccagaatctacaatgaactcaaacaaatttacaagaaaaaaacaaacaaccccatcaaaaagtgggcgaaggacatgaacagacacttctcaaaagaagacatttatgcagccaaaaaacacatgaaaaaatgctcaccatcactggccatcagagaaatgcaaatcaaaaccacaatgagataccatctcacaccagttagaatggcaatcattcaaaagtcaggaaacaacagttgggagcatccaatcacactcatctctgaggttagaacaatttaccttgtggaaatccccttcgtcattgaagatgaatcttgctcagctaactacttcccagctgctgggcagcaggaatattcagggccaccattaagcctacccctcagcaaaatctccccatggctgaaggccaggcagttcaacaggaatcctacggagcaaccactgcaaagctcactgagtggacttccaggcattttcacacccacaggaaaaattgcaagaacccataaagccatgctgaggagtataggacgtcaggcacagattgtgaaggtcaaacaaataagtctgatgggttggacacaggcctcaagccgccaagtttgtaacctcggcactgtagcattgcctgcaaatgaggtgttagcacaggaccccgttcatgctaagggcaccgcaaagttctccaaccaagcacgcaccaagagcgggaccacgttaactctacccagcctccatctccctcctcaggtcatcatttccacagtggaacttaaccttgctatctttagaaagtaa

SEQ ID NO: 123238 - DNA, 3033 bp, Homo sapiens; identical to SEQ ID NO: 118078

SEQ ID NO: 123239 - DNA, 2253 bp, Homo sapiens
atgggtaaattcctcgacacacacaccctcgcaagactaaaccaggaagaaattgaatctctgaatagaccaataacaggctctgaaattgtggcaataatcaataccttaccaaccaaaaagagtccaggaccagatggattcacagccaaattctaccagagccgggcagagacacaaccaaaaaagaactttagaccaatatccttgatgaacattgatgcaaaaatcctcaataaaatactggcaaaccaaatccagcagcacatcaaaaagcttatccaccatgatcaagtgggcttcatccctgggatgcaaggctggttcaatatatgcaaatcaataaatgtaatccagcatataaacagaaccaaagacaaaaaccacatgattatctcaatagatgcagaaaaggcctttgacaaaattcaacaacccttcatgctaaaaactctcaataaattaggtactgatgggacatatctcaaaataataagagctatctatgacaaacccacagccaatatcatactgaatgggcaaaaactggaagcattccctttgaaaactggcacaagacagggatgccctctctcaccactcctattcaacataatgttggaagttctggccagggcaattagtcaggagaaggaaataaagggtattcaattaggaaaagaggaagtcaaattgtccctgtttgcagatgacatgattgtatatctagacaaccctgttgtctcagcccaaaatctccttaagctaataagcaacttcagcaaagtctcaggatacaaaatcaatgtacaaaaatcacaagcattcttatataccaataacagacaaacagagagccaaatcatgagggaactcccattcacaattgcttcaaagagaataaaatacctaggaatccaacttacaagggacgtgaaggacctcttcaaggagaactacgaaccactgctcaatgaaataaaagaggatacaaacaaatggaagaatgttccgtgctcatgggtaggaagaatcaatatcgtgaaaatggccatagtgcccaaggtaatttatagattcaatgtcatccccatcctgctaccaatgactttcttcacagaattggaaaaaactactttaaagttcatatggaaccaaaaaagagcccgcatcgccaagtcaatcctaagccaaaagaacaaagctggaggcatcacgctacctgacttcaaactatactacaaggctacagtaacaaaaacagcatggtactggtaccaaaacagagatatatatcaatggaacagaacacagccctcagaaataacgccacatatctacacctatctgatctttgacaaacctgagaaaaacaagcaatggggaaaggattctctatttaataaatggtgctgggaaaactggctagccatatgtagaaagctgaaactggatcccttccttacaccttatacaaaaattaattcaagatggattaaagacttaaacgttattcctaaaaccataaaaaccctagaagaaaacctaggcatcaccattcaggacataggcatgggccaggacttcatgtctaaaacaccaaaagcaatggcaacaaaagccaaaattgacaaatgggatctcattaaactaaagagcttctgcacagcaaaagaaactaccatcagagtgaacaggcaacctacaaaatgggagaaaatttttgcaacctactcatctgacaaagggctaatatccagaatgtacaatgaacttaaacaaatttacaagaaaaaaacaaacaactccatcaaaaagtgggcgaaggatatgaacagacacttctcaaaagaagacatttatgcagccaaaaaacacatgaaaaaatgctcaccatcactggccatcagagaaatgcaaatcaaaaccacaatgagataccatctcacaccagttagaatggtgatcattaaaaagtcaggaaacaacagcctgggtgacaaggcgagaccctgtctgaaaaaaagaaaagaaaagaaaatgtttctaacagtgggcacaaaaagcctagaagaaaaggcagaggggattcggggaacttcaagcagcttagtgaaggaatatcttaaagtgtcaaagatacttcctgccctcgaatattggactccaagttcttcagttttggaacttggactggctctccttgctcctcagcctgcagatggtcgattgtgggaccttgtgatcctgtaa

SEQ ID NO: 123240 - DNA, 2385 bp, Homo sapiens
atggtggcctccagatcctctagagtcggtgtcttctatggaggtcaaaacagcgtggatggcgtctccaggcgatctgacggttcactaaacgagctctgcttatatagacctcccaccggggcgtacttggcatatgatacacttgatgtactgccaagtgggcagtttaccgtaaatactccacccattgacgtcaatggaaagtccctattggcgttactatgggaacatacgtcattattgacgtcaatgggcgggggtcgttgggcgatgcagccacttggccagctgggtcagctcgaacacctcggagaccggcgcgatcaggtcctcgaccgaagtggacgctcccgacgactcgatgctgctcagcacctgcgacatcgacctgaccgccgcccgcagggcatggttggggtgcttaccaaccaaaaagagcccaggaccagatggattcacagcagaattctaccagaggtgcaaggaggaactggtaccgttccttctgaaactattccaatcgatagaaaagagggaatccttcctaacttatttgatgaggccagcatcatcctgataccaaagcggggcagagacaccaccaaaaaagagaattttagaccaatatccttgatgaacattgatgcaaaaatcctcaataaaatactggcaaaccgaaaccagcagcacatcaaaaagcttatccaccatgatcaagtgggtttcatccctgggatgcaaggctggttcaatatatgcaaatcaataaatgtaatccagcatataaacagaaccaaagacaaaaaccacatgattatctcaatagatgcagaaaaggcctttgacaaaattcaacaacccttcatgctaaaaactcttaataaattaggtattgatgggacgtatctcaaaataataagagctatctatgacaaacccacagccaatatcatactgaatgggcaaaaactggaagcattccctttgaaaactggcacaagacagggatgccctctctcaccactcctattcaacatagtgttggaagttctggccagggcaatcaggcaggagaaggaaataaagggtattcaattaggaaaagaagaagtcaaattgtccctgtttgcagatgacatgattgtatatctagaaaaccccatcgtctcagcccaaaatctccttaagctaataagcaacttcagcaaagtctcagcatacaaaatcaatgtacaaaaatcacaagcattcttatacaccaataacagacaaacagagagccaaatcatgagtgtattcccattcacaattgcttcaaagagaataaaatacttaggaatccaacttgcaaggaatgcgaaggacctcttcaaggagaactacaaaccactgctcaatgaaataaaagaggatacaaagaaatggaagaacattccatgctcatgggtaggaagaatcaatatcgtgaaaatggccatactgcccaaggtaatttacagattcaatgccatccccatcaagctaccaatgactttcttcacagaattggaaaaaactactttaaagttcatatggaaccaaaaaagagcccgcatcgccaagtcaatcctaagccaaaagaacaaagctggaggcatcacgctacctgacttcaaactacactacaagattacagtaaccaaaacagcatggtactggtaccaaaacagagatatagatcaatggaacagaacagagccctcagaaataacgccgcatatctacaactatctgatctttgacaaacctgagaaaaacaagcaatggggaaaggattccctatttaataaatggtgctgggaaaactggctagccatatgtagaaagctgaaactggatcccttccttacaccttatacaaaaattcatccaagatggattaaagacttaaacgttagacctaaaaccataaaaaccctagaagaaaacctaggcaataccattcaggacataggcatgggcaaggacttcatgtctaaaacaccaaaagcaatggcagcaaaagccaaaattgacaaatgggatctaattcaactaaagagcttctgcacagcaaaagaaactaccatcagagtgaacaggcaacctacaaaatgggagaaaattttcgcaacctactcatctgacaaagggctaatatccagaatctacaaagaactcaaacaaatttacaagaaaaaaaacaaacaaccccatcaaaaagtgggcgaaggacatgaacagacacttctcaaaagaagacatttatgcagccaacaaacacatgaaaaaatgctcaccatcactggccatcagagaaatgcaaatcaaaaccactatgagataccatctcacaccagttag

SEQ ID NO: 123241 - DNA, 2232 bp, Homo sapiens; identical to SEQ ID NO: 116248

SEQ ID NO: 123242 - DNA, 2667 bp, Homo sapiens
atgaatgaaatgaagcgagaagagaagtttagagaaaaaagaataaaaagaaacgaacaaagcctccaagaaatatgggactatgtgaaaagaccaaatctatgtctgattggtgtacctgaaagtgacggggagaatggaaccaagttggaaaacactctgcaggatattatccaggagaacttccccaatctagcaaggcaggccgacattcaaattcaggaaatacagagaacaccacaaagatactcctcgagaagagcaactccaagacacataattgtcagagtcaccaaagttgaaatgaaggaagaaatgttaagggcagccagagagaaagaaatacaaactaccatcagagaatactataaacacctctatgcaaataaactagaaagtctagaagaaatggataaattcctcaacacatacacctttccaagactaaaccacgtagaagttgaatctctgaatagaccaataacaggctctgaaattgaggcaataattaatagcttaccaacaaaaaaaagtccaggaccagatggattcacagccgaattctaccagaggtacaaggaggagcaggtaccattcattctgaaactattccaatcaatagaaaaagagggaatcctccctaactcattttatgaggccagcatcatcctgataccaaagccgggcagagacacaaccaaaaaagagaattttagaccaatatctttgatgaatattgacgcaaaaatcctcaataaaatactggcaaaccgaatccaggaacacatcaaaaagcttatccaccatgatcaagtgggcttcatccctgggatgcaaagctggttcaacatacaaaaatcaataaatgtaatccagcatataaacagaaccaaagacaaaaaccgcatgattatctcaatagatgcagaaaaggcctttgacaaaattcaacaacccttcatgctaaaaactctcaataaattaggtattgatgggacgtatctcaaaatagtaagagctatctatgacaaacccacagccaatatcatactgaatgggcaaaaactggaagcattccctttgaaaactggcacaagacagggatgccctctctcaccactcctattcaacatagtgttggaagttctggccagggcaattaggcaggagaaggaaataaagggtattcaattaggaaaagaggaagtcaaattgtccctgtttgcagatgacatgactctgtatctagaaaaccccattgtctcagcccaaaatctccttaagctgataagcaacttcagcaacatctcaggatacaaaattaatgtacaaaaatcacaagcattcttatacaccaacaacagacaaacagagagacaaatcatgagtgaattcccattcacaattgcttcaaagggaataaaatacctaggaatccaacttacaaggtatgtgaaggacctcttcaagaagaactacaaaccactgctcaatgaaataaaagaggatacaaacaaatggagtaacattccatgctcatgggtaggaagaatcaatattgtgaaaatggccatactgcccaaggtaatttacagattcaatgccatccccatcaagctaccaatgactttcttcacagaattggaaaaaactactttaaagttcatatggaaccaaaaaagagcccgcatcaccaagtcaatcctaagccaaaagaacaaagctggaggcatcacactacctgacttcaaactatactacaaggctacagtaaccaaaacagcatggtactggtaccaaaacagagatatagatcaatggaacagaacagagacctcagaaataatgccacgtatctacaactatctgatctttgacaaacctgagaaaaacaagccatggggaaaggattccctatttaataaatggtgctgggaaaactggctagccatatgtagaaagctgaaactggatccctttcttacacgttatacaaaaattaattcaagatggattaaacacttacatgttagacctaaaaccataaaaaccctagaagaaaacctaggcattaccattcagggcataggcatgggcaaggacttcatgtctaaaacaccaaaagcaatggaaacaaaagccaaaattgacaaatgggatctaattaaactaaagagcttctgcacagcaaaagaaactaccatcagagtgaacaggcaacctacaaaatgggagaaaatttttgcaagctactcatctgacaaagggctaatatccagaatctacaatgaactgagacaaatttacaagaaaaaatcaaacaaccccatcaaaaagtgggtgaaggatatgaacagacacttctcaaaagaagacatttatgcagctaaaaaacacatgaaaaaatgctcatcatcactggccatcagagaaatgcaaatcaaaaccacaatgagataccatctcacaccagttagaatggcgatcattaaaaagtcaggaaacgacaggtgctgtagaggatgtggagaaataggaacacttttacactgttggtgggactgtaaactagttcaaccattgtggaagtcgctgtgccaagcaggatctagaatattctttgtcagtgaagtagaagctgttgaagtaacttctgcaataggacag

SEQ ID NO: 123243 - DNA, 3033 bp, Homo sapiens
atggctgacatgctaacatgggaatcctgtcttgaggagtcactccaagaggagtcaccattggtcactcactgtggccccagctgctgcatctctggacagtcgcctccaagctcagctcgtccatcctcagtgtccagtgcaatctctgtgttgatgctgcctcagaacaggaagctgcctcctgcctggacgtctcctggaatcttccccacagatctggtggtttactccatgtcacttcctcatgcccttgccagatataactgtgatgtatgtaaaagcatgctgcctccaagattgtatgctcctgaggaaaaagctcgtacctctccactttgtggaacctggtactcaccttcactaccactttgtggagcctggtgcaagaagaatgagaagaagagggaaagagagagagagagaaagagacagagagaggatatactttctggtgcctcttcgtataaggacactattcatattcaattaagacccccaccttatgacgtccttcaacaaatacaaactaccatcagagaatacttcaaacacctctatgcaaataaactagaaaatctagaagaaatggataaactcctcgacacatacaccctcccaagactaaaccaggaagaagttgaatctctgaatagactaataacaggctctgaaattgtggcaataatcaacagcttaccaaccaaaaagagtccaagaccagatggattcacagctgaattctaccagaggtacaaggaggaactggtaccattccttctgaaactattccaatcaatagaaaaagggggactcctccctaactcattttatgaggccagcatcatcctgatgccaaagctgggcagagacacaaccaaaaaagagaattttagaccgatatccctgatgaacattgatgcaaaaatcctcaataaaatactggcaaaccaaatccagcagcacatcaaaaagcttatccagcatgatcaagtgggcttcatccctgggatgcaaggctggttcaatatttgcaaatcaataaatgtaatccagcatataaacagaaccaaagacaaaaaccacatgactatctcaatagatgcaggaaaagcctttgacaaaattcaacaactcttcatgctaaaaactctcaataaattaggtattgatgggacgtatctcaaaataataagagctatctatgacaaacccacagccaatatcattctgaatggggaaaaactggaagcattccctttgaaaactggcacaagacagggatgccctctctcaccactcctattcaacatagtgttggaagttctggccagggcaattaggcaggagaaggaaataaagggtattcgattacgaaaagaggaagtcaaattgtccctgtttgcagatgacatgattgtatatctagaaaaccccatcatctcagcccaaaatctccttaagctgataagcaacttcagcaaaatctcaggatacaaaatcaatgtacaaaaatcacaagcattcttatacaccaacaacagacaaacagagagccaaatcatgagtgaactcctattcacaattgcttcaaagagaataaaatacctaagaatccaacttactaaggacgtgaaggacctcttcaagaagaactacaaaccactgctcaatgaaataaaagaggatacaaagaaatggaagaacattccatgctcatgggtaggaagaatcaatatcgtgaaaatggccatacggcccaaggtaatttatagattcaatgccatccccatcaagctaccaatgactttcttcacagaattggaaaaaactactttcaagttcatatggaaccaaaaaagagcccgcatcgccaagtcaatcctaagccaaaagaacaaagctggaggcatcacactacctgacttcaaactatactacaaggctacagtaaccaaaacagcatggtactggtaccaaaacaaagatatagatcaatggaacagaacagagccctcagaaataatgccgcatatctacaactatctgatctttgacaaacctgacaaaaacaagcaatggggaaaggattccctatttaataaatggggctgggaaaactggctagccatatgtagaaagctgaaactggatcccttccttacaccttatacaaaaattaattcaagatggattaaagatttaaacgttagacctaaaaccataaaaaccctagaaaaaaacctaggcattaccattcaggacataggcatgggcaaggacttcatgtctaaaacaccaaaagcaatggcaacaaaagccaaaattgacaaatgggatctaattaaactaaagagcttctgcacagcaaaagaaactaccatcagagtgaacaggcaacctacaaaatgggagaaaatttttgcaacctactcatctgacaaagggctaatatccagaatctacaatgaactcaaacaaatttacaagaaaaaaacaaacaaccccatcaaaaagtgggtgaaggacatgaacagacacttctcaaaagaagacatttgtgcagccaaaaaacacatgaaaaaatgctcatcatcactggccatcagagaaatgcaaatcaaaaccacaatgagatatcatctcacaccagttagaatggcaatcattaaaaagtcaggaaacaacagcactattcacagtagcaaagacatggattcaacccaaatgtgcatcaatgatacactgtatgaagaaagtgtagaacatatacaccatgaaatacaatccagccataaaaaaggagttcacatcctttgcagcaatatggatggagctgaaagccactttcctaagcaaactaatgcaagaacagaaagccaaatactgcatgttctcacttggctttcttttaacccaccagttacaattactaaagttcatgaaaatgtctaccagccaagtaccactcgtaacactgaaacaacgcagggagtcccaagaaccagggaagaccaagaagcatatttataa

SEQ ID NO: 123244 - DNA, 1238 bp, Homo sapiens
atgcaagcaatatgtacggggcaggctcgagcattgatctgcatggggggcaattttgcgctggcaatgccagatcgggaagcgagcgctgtaccgttaacgcaattagatttggcggtacacgtagccactaagcttaaccgctctcatctgttgaccgcacggcatagctatattctgccggtcctgggacgtagcgagattgacatgcaaaaaaacggtgcgcaggcggtaaccgttgaggattcaatgtcgatgattcatgcctcgcgtggcgtgttaaaacccgccggtgtaatgctgaaatcagagtgtgcagtggtcgcgggaatcgcgcaggcagcactaccccagagcgtggtagcctgggagtatctggtggaagattatgatcgcattcgcaatgacattgaagctgtgctgccagagttcgccgactataaccagcgcatccgtcatcccggtggttttcacctgataaatgcagctgctgaaaggcgctggatgacgccgtcagaaatacaaactaccatcagagaatacttataaacacctctacacaaataaacttagaaaatctagaagaaatggataaattcctggacacatacagcctcccaagactaaaccaggaagaagttgaatctctgattagaccaataacaggctctgaaattgaggcagtagttaatagcccaccaaccaaaaacagtccaggaccagacagattcacagccaaattctaccagaggtacagaggagctggtaccattctttctgaaactattcctagcagcagtgcccgcaccaagcagtcatgggcctttctgctgttcaaggaaagcactacggggctccaaaactggctctgcgtatcccagcagctcagctctcagaagggttacagtatccgaagtagtctgcttattcgcagaagcacagttgttctgaatactgagatccgaaagaagtgtctcctatgtacttcttccacaaaggagccactctgtgatgctgaggataatgtcctcgagaatagtcctgtcctagagacaatagcaagattcatgaggccgcctgtcacagtgctcaaatgctggccacaggcaacgcccaacacagctttgcagaagaaaaacaactcgggccaggaagttagcgctctgctgctcaagcacaatgactgcttctgcagtcactctagagatacccaaactggaaactacttatctacctga

SEQ ID NO: 123245 - DNA, 3472 bp, Homo sapiens
atggcttcggtctcctctgcgaccttctcgggccacggggctcggtccctactgcagttcctgcggctggtagggcagctcaagagagtcccacgaactggctgggtatacagaaatgtccagaggccggagagcgtttcagatcacatgtaccggatggcagttatggctatggtgatcaaagatgaccgtcttaacaaagaccgatgtgtacgcctagccctggttcatgatatggcagaatgcatcgttggggacatagcaccagcagataacatccccaaagaagaaaaacataggcgagaagaggggaataaatgtcataagcagaaggcaatggggaaacatcttaaagaaccacatgttcttggacaagaaaccaaaggcttggagagcactgatgttctattgcctcttcctgctgctggtcaggatttgggaagagagaagaaaatcagggaggaagctatgaagcagataacccagctcctaccagaggacctcagaaaggagctctatgaactttgggaagacctagaatttgaatctccatcctgcttggactccttgtccctctgttgctctttgaaaccccagtctgagtcctctcctgtcctaccagaaggctgcgaaacactgattcagagactctgtgccgtggggactggggtcacagccgccctggccaccaggctctgcagagcctcagggctgccagcaccccatcagtgggcctcggaattacaaaggagcaggaaaaaggaagaggaagagggcaaaacctcaaaagacttccaatgtttcaagaaaatgttggactttgttgtgcgccactatcaagctttttccaaatttggtttccaaattactacggcaaagagaaagcaggaaagatccaaaattgacaccctaacatcacaattaaaagaactagaaaagcaagagcaaacacattcaaaagctagcagaaggcaagaaataactaaaatcagagcagaactgaaggaaatagagacaaaagaaaacccttcaaaaaatcaatgaatccaggagctggttttttgaaaggatcaacaaaattgatagaccgctagcaagactaataaagagaaaaagagagaagaatcaaatagacacaataaaaaatgataaaggggatatcaccaccgatcccacagaaatacaaactaccatcagagaatactacaaacacctctacgcaaataaactagaaaatctagaagaaatggatacattcctcgacacatacactctcccaagactaaaccaggaagaagttgaatctctgaatagaccaataacaggctctgaaattgtggcaataatcaatagtttaccaaccaaaaagagtccaggaccagatggattcacagccgaattctaccagaggtacaaggaggaattggtaccattccttctgaaactattccaatcaatagaaaaagagggaatcctccctaactcattttatgaggccagcatcattctgataccaaagccgggcagagacacaaccaaaaaagagaattttagaccaatatccttgatgaacattgatgcaaaaatcctcaataaaatactggcaaaccgaatccagcagcacatcaaaaagcttatccaccatgatcaagtgggcttcatccctgggatgcaaggctggttcaatatacgcaaatcaataaatgtaatccagcatataaacagagccaaagacaaaaaccacatgattatctcaatagatgcagaaaaagcctttgacaaaattcaacaacccttcatgctaaaaactctcaataaattaggtattgatgggacgtatttcaaaataataagagctatctatgacaaacccacagccaatatcatactgaatgggcaaaaactggaagcattccctttgaaaactggcacaagacagggatgccctctctcaccgctcctattcaacatagtgttggaagttctggccagggcaatcaggcaggagaaggaaataaagggtattcaattaggaaaagaggaagtcaaattgtccctgtttgcagacgacatgattgtttatctagaaaacctcatcgtctcagcccaaaatctccttaagctgataagcaacttcagcaaagtctcaggatacaaaatcgatgtacaaaaatcacaagcattcttatacaccaacaacagacaaacagagagccaaatcatgggtgaactcccattcacaattgcttcaaagagaataaaatacctaggaatccaacttacaagggatgtgaaggacctcttcaaggagaactacaaaccactgctcaaggaaataaaagaggacacaaacaaatggaagaacattccatgctcatgggtaggaagaatcaatatcgtgaaaatggccatactgcccaaggtaatttacagattcaatgccatccccatcaagctaccaatgactttcttcacagaattggaaaaaactactttaaagttcatatggaaccaaaaaagagcccgcattgccaagtcaatcctaagccaaaagaacaaagctggaggcatcacactacctgacttcaaactatactacaaggctacagtaaccaaaacagcatggtactggtaccaaaacagagatatagatcaatggaacagaacagagccctcagaaataatgccgcatatctacaactatctgatctttgacaaacctgagaaaaacaagcaatggggaaaggattccctatttaataaatggtgctgggaaaactggctagccatatgtagaaagctgaaactggatccctttcttacaccttatacaaaaatcaattcaagatggattaaagatttaaacgttagacctaaaaccataaaaaccctagaagaaaacctaggcattaccattcaggacataggcgtgggcaaggacttcatgtccaaaacaccaaaagcaatggcaacaaaagccaaaattgacaaatgggatctaattaaactaaagagcttctgcacagcaaaagaaactaccatgagagtgaacaggcaacctacaacatgggagaaaattttcacaacctactcatctgacaaagggctaatatccagaatctacaatgaactcaaacaaatttacaagaaaaaaacaaacaaccccatcaaaaagtgggcgaaggacatgaacagacacttctcaaaagaagacatttatgcagccaaaaaacacatgaagaaatgctcatcatcactggccatcagagaaatgcaaatcaaaaccactatgagatatcatctcacaccagtcacagtccaggtaccagggactgtggagtttcctggccaaatagcccagtctattcctgacctgttcaggtcttttgccagctctgttctgaaagtgccttgcatcactggcggaccactcataggcccaagagaggaccaaagagcaggcattttgtag

SEQ ID NO: 123246 - DNA, 3907 bp, Homo sapiens
atggctgcctggaacctgctacttaaatcatatgcatattggggaggtctaaggaaggaagatttccactgtttagaccggaagaccctgaggacagtatcctttctggctgccctgctgtcatatgagtccatagggggcaaaggaaaactaacaaccagaaaggacatctacaccgaaaacccatctgtacatcaccatcatcaaagaccaaaagtagataaaaccacaaagatggggaaaaaacagaacagaaaaactggaaactctaaaatgcagagcgcctctcctcctccaaaggaacgcagttcctcaccagcaacagaacaaagctggatggagaatgattttgaagagctgagagaagaaggcttcagacgatcaaattactctgagctacgggaggacattcaaaccaaaggcaaagaagttgaaaactttgaaaaaaatttagaagaatgtataactagaataaccaatacagagaagtgcttaaaggagctgatggagctgaaaaccaaggctcgagaactacgtgaagaatgcagaagcctcaggagccgatgcgatcaactggaagaaagggtatcagcaatggaagatgaaatgaatgaaatgaagcgagaagggaagtttagagacaaaagaataaaaagaaatgagcaaagcctccaagaaatatgggactatgtgaaaagaccaaatctacgtctgattggtgtacctgaaagtgatgtggagaatggaaccaagttggaaaacactctgcaggatattatccaggagaacttccccagtctagcaaggcaggccaacgttcagattcaggaaatacagagaacgccacaaagatactcctcgagaagagcaactccaagacacataattgtcagattcaccaaagttgaaatgaaggaaaaaatgttaagggcagccagagagaaaggtcgggttaccctcaaaggaaagcccatcagactaacagcggatctctcggcagaaaccctacaagccagaagagagtgggggccaatattcaacattcttaaagaaaagaattttcaacccagaatttcatatccagccaaactaagcttcataagtgaaggagaaataaaatactttatagacaagcaaatgctgagagattttgtcaccaccaggcctgccctaaaagagctcctgaaggaagcgctaaacatggaaaggaacaaccggagaaagcaggaaagatccaaaattgacaccctaacatcacaattaaaagaactagaaaagcaagagcaaacacattcaaaagctagcagaaggcaagaaataactaaaatcagagcagaactgaaggaaatagagacacaaaaaacccttcaaaaaatcaatgaatccaggagctggttttttgaaaggatcaacaaaattgatagaccgctagcaagactaataaagaaaaaaagagagaagaatcaaatagacacaataaaaaatgataaaggggatatcaccactgatcccacagaaatacaaactaccatcagagaatactacaaacacctctacgcaaataaactagaaaatctagaagaaatggatacattcctcgacacatacactctcccaagactaaaccaggaagaagttgaatctctgaatagaccaataacaggctctgaaattgtggcaataatcaatagtttaccaaccaaaaagagtccaggaccagatggattcacagccgaattctaccagaggtacaaggaggaactggtaccattccttctgaaactattccaatcaatagaaaaagagggaatcctccctaactcattttatgaggccagcatcattctgataccaaagccgggcagagacacaaccaaaaaagagaattttagaccaatatccttgatgaacattgatgcaaaaatcctcaataaaatactggcaaaccgaatccagcagcacatcaaaaagcttatccaccatgatcaagtgggcttcatccctgggatgcaaggctggttcaatatacgcaaatcaataaatgtaatccagcatataaacagagccaaagacaaaaaccacatgattatctcaatagatgcagaaaaagcctttgacaaaattcaacaacccttcatgctaaaaactctcaataaattaggtattgatgggaagtatttcaaaataataagagctatctatgacaaacccacagccaatatcatactgaatgggcaaaaactggaagcattccctttgaaaactggcacaagacagggatgccctctctcaccgctcctattcaacatagtgttggaagttctggccagggcaatcaagcaggagaaggaaataaagggtattcagttaggaaaagaggaagtcaaattgtccgtgtttgcagacgacatgattgtttatctagaaaaccccatcgtctcagcccaaaatctccttaagctgataagcaacttcagcaaagtctcaggatacaaaatcaatgtacaaaaatcacaagcattcttatacaccaacaaccgacaaacagagagccaaatcatgagtgaactcccattcacaattgcttcaaagagaataaaatacctaggaatccaacttacaagggatgtgaaggacctcttcaaggagaactacaaaccactgctcaaggaaataaaagaggacacaaacaaatggaagaacattccatgctcatgggtaggaagaatcaatatcgtgaaaatggccatactgcccaaggtaatttacagattcaatgccatccccatcaagctaccaatgactttcttcacagaattggaaaaaactactttaaagttcatatggaaccaaaaaagagcccgcatcgccaagtcaatcctaagccaaaagaacaaagctggaggcatcacactacctgacttcaaactatactacaaggctacagtaaccaaaacagcatcggtactggtaccaaaacagagatatagatcaatggaacagaacagagccctcagaaataatgccgcatatctacactattctgatcctttggacaaacctgagaaaaacaagcatgggggaaaggcatccctaatttataaaatggctgctggggaaaactggctagcccatatgtaggaagctgaaactggatcccttccttacaccttatacaaaaatcaattcaagatggattaaagatttaaacgttagacctaaaaccataaaaaccctagaagaaaacctaggcattaccattcaggacataggcgtgggcaaggacttcatgtccaaaacaccaaaagtaatggcaacaaaagccaaaattgacaaatgggatctaattaaactcaagagcttctgcacagcaaaagaaactaccatcagagtgaacaggcaacctacaacatgggagaaaattttcgcaacctactcatctgacaaagggctaatatccagaatctacaatgaactcaaacaaatttacaagaaaaaaacaaacaaccccatcaaaaagtgggcgaaggacatgaacagacacttctcaaaagaagacatttatgcagccaaaaaacacatgaagaaatgctcatcatcactggccatcagagaaatgcaaatcaaaaccactatgagatatcatctcacaccagttagaatggcaatcattcaaaagtcaggaaacaacagggacaacacaaaggaagcactgctgtgtaacaacttggtggctgaagtcttggaggccaaacaggctcagaagcttcaaggcaaagcagccgtcctcagcctctcaaaaatctatgcgatcacagagacaaatgctgagacacccaacaggaagatgaaaattaaactgaagagacccatgaccaaattgcacccaagcatccaaatgttggtg

SEQ ID NO: 123247 - DNA, 3197 bp, Homo sapiens
ctttcccaagtttcaagatagctattcctaaaaatgatcatgggcatgaacaacatttttggggatatagagttccaaataatgccatggaagatacagcttatcaactggtccaccagtaccctacaagaatgcaggcccggagatgcaggatcgcgctgtcacagtggtcctcttcgcatcctctcccggcaaagagagatgctccggttaccagcggcgcgcatccccgcaggcgcctctcctctcgccgatacccacccaggcagtcccgacaggcgcgcctgcctacctggtggccggctgtcagcgaagcggcggtgcctcagccccttctcagctgctacagcgctcccagcgccatgttcccggtctccccgggcgcacgctggggaactactactggctggaagttctttgaaaccaacgagaacaaagacacaacataccagaatctctgggacgcattcaaagcagtgtgtagagggaaatttataccactaaatgcccacaagagaaagcaggaaagatccaaaattgacaccctaacatcacaattaaaagaactagaaaagcaagagcaaacacattcaaaagctagcagaaggcaagaaataactaaaatcagagcagaactgaaggaaatagagacacaaaaaacccttcaaaaaatcaatgaatccaggagctggttttttgaaaggatcaacaaaattgatagaccgctagcaagactaataaagaaaaaaagagagaagaatcaaatagacacaataaaaaatgataaaggggatatcaccaccaatcccacagaaatacaaactaccatcagagaatactacaaacacctctacgcaaaaaaactagaaaatctagaagaaatggatacattcctcgacacatacactctcccaagactaaaccaggaagaagttgaatctctgaatagaccaataacaggagctgaaattgtggcaatattcaatagtttaccaaccaaaaagagtccaggaccagatggattcacagccgaattctaccagaggtacaaggaggaactggtaccattccttctgaaaatattccaatcaatagaaaaagagggaatcctccctaactcattttatgaggccagcatcattctgataccaaagccaggcagagacacaaccaaaaaagagaattttagaccaatatccttgatgaacattgatgcaaaaatcctcaataaaatactggcaaaccgaatccagcagcacatcaaaaagcttatccaccatgatcaggtgggcttcatccctggaatgcaaggctggttcaatatacgcaaatcaataaatgtaatccagcatataaacagagccaaagacaaaaaccacatgattatctcaatagatgcagaaaaagcctttgacaaaattcaacaacccttcatgctaaaaactctcaataaattaggtattgatgggacgtatttcaaaataataagagctatctatgacaaacccacagccaatatcatactgaatgggcaaaaactggaagcattccctttgaaaactggcacaagacagggatgccctctctcaccgctcctattcaacatagtgttggaagttctggccagggcaatcaggcaggagaaggaaataaagggtattcaattaggaaaagaggaagtcaaattgtccctgtttgcagacgacatgattgtttatctagaaaaccccatcatctcagcccaaaatctccttaagctgataagcaacttcagcaaagtctcaggatacaaaatcaatgtacaaaaatcacaagcattcctatacaccaacaacagacaaacagagagccaaatcatgagtgaactcccattcacaattgcttcaaagagaataaaatacctaggaatccaacttacaagggatgtgaaggacctcttcaaggagaactacaaaccactgctcaaggaaataaaagaggatacaaacaaatggaagaacattccatgctcatgggtaggaagaatcaatatcgtgaaaatggccatactgcccaaggtaatttacagattcaatgccatccccatcaagctaccaatgactttcttcacagaattggaaaaaactactttaaagttcatatggaaccaaaaaagagcccgcatcgccaagtcaatcctaagccaaaagaacaaagctggaggcatcacactacctgacttcaaactatactacaaggctacagtaaccaaaacagcatggtactggtaccaaaacagagatatagatcaatggaacagaacagagccctcagaaataacgccacatacctacaactatctgatctttgacaaacctgagaaaaacaagcaatggggaaaggattccctatttaataaatggtgctgggaaaactggctagccatatgtagaaagctgaaactggatcccttccttacaccttatacaaaaatcaattcaagatggattaaagatttaaacgttagacctaaaaccataaaaaccctagaagaaaacctaggcagtaccattcaggacataggcgtgggcaaggacttcatgtccaaaacaccaaaagcaatggcaacaaaagccaaaattgacaaatgggatctaattaaactaaagagcttctgcacagcaaaagaaactaccatcagagtgaacaggcaacctacaacatgggagaaaattttcgcaacctactcatctgacaaaaggctaatatccagaatctacaatgaactcaaacaaatttacaagaaaaaaacaaacaaccccatcaaaaagtgggcgaaggacatgaacagacacttctcaaaagaagacatttatgcagccaaaaaacacatgaaaaaatgctcatcatcactggccatcagagaaatgcaaatcaaaaccactatgagatatcatctcacaccagttagaatggcaatcattaaaaagtcaggaaacaacagccagagaggcttttatgattctataaaaagccccacaaaggaatcctatgcagccataaaaaggaacgagatcatgtcctttgcaggctatggatggagctggacgctgttatccttagcaactaacacaggaacggaaaaccaaacactgcatattttcacttataagtgggagctgaacaatgagagcacatggatacatgaagggatgggg

SEQ ID NO: 123248 - DNA, 3160 bp, Homo sapiens
atggtaaagggatcaattcaacaagaggagctaactatcctaaatatttatgcacccaatacaggagcacccagattcataaagcaactcctgagtgacctacaaagagacttagactcccacacattaataatgggagactttaacaccccactgtcaacattagacagatcaacgagacagaaagtcaacaaggatacccaggaattgaactcagctctgcaccaagcagacctaatagacatctacagaactctccaccccaaatcaacagaatatacattgttttcagcaccacaccacacctattccaaaattgaccacatacttggaagtaaagctctcctcagcaaatgtaaaagaacagaaattataacaaactatctctcagaccacagtgcaatcaaactagaactcaggattaagaatctcactcaaagccgctcaactacatggaaactgaacaacctgctcctgaatgactactggagaaagcaggaaagatccaaaactgacaccctaacatcacaattaaaagaactagaaaagcaagagcaaacacattcaaaagctagcagaaggcaagaaataactaaaatcagagcagaactgaaggaaatagagacacaaaaaacccttcaaaaaatcaatgaatccaggagctggttttttgaaaggatcaacaaaattgatagaccgctagcaagactaataaagaaaaaagagaagaatcaaatagacacaataaaaaatgataaaggggatatcaccaccgatcccacagaaatacaaactaccatcagagaatactacaaacacctctacgcaaataaactagaaaatctagaagaaatggatacattcctcgacacatacactctcccaaggctaaaccaggaagaagttgaatctctgaatagaccaataacaggctctgaaattgtggcagtaatcaatagtttaccaaccaaaaagagtccaggaccagatggattcacagccgaattctaccagaggtacaaggaggaactggtaccattccttctgaaactattccaatcaatagaaaaagagggaatcctccctaactcattttatgaggccagcatcattctgataccaaagtcgggcagagacacaaccaaaaaagagaattttagaccgatatccttgatgaacattgatgcaaaaatcctcaataaaatactggcaaaccgaatccagcagcacatcaaaaagcttatccaccatgatcaagtgggcttcatccctgggatgcaaggctggttcaatatacgcaaatcaataaatgtaatccagcatataaacagagccaaagacaaaaaccacatgattatctcaatagatgcagaaaaagcctttgacaaaattcaacaacccttcatgctaaaaactctcaataaattaggtattgatgggacgtatttcaaaataataagagctatctatgacaaacccacagccaatatcatactgaatgggcaaaaactggaagcattccctttgaaaactggcacaagacagggatgccctctctcaccgctcctattcaacatagtgttggaagttctggccagggcaatcaggcaggagaaggaaataaagggtattcaattaggaaaagaggaagtcaaattgtccctgtttgcagacgacatgattgtttatctagaaaaccccattgtctcagcccaaaatctccttaagctgataagcaacttcagcaaagtctcaggatacaaaatcaatgtacaaaaatcacaagcattcttatacaccaacaacagacaaacagagagccaaatcatgagtgaactcccattcacaattgcttcaaagagaataaaatacctaggaatccaacttacaagggatgtgaaggacctcttcaaggagaactacaaaccactgctcaaggaaataaaagaggacacaaacaaatggaagaacattccatgctcatgggtaggaagaatcaatatcgtgaaaatggccatacttgcccaaggtaatttacagattcaatgccatccccatcaagctaccaatgactttcttcacagaattggaaaaaactactttaaagttcatatggaaccaaaaaagagcccgcatcgccaagtcaatcctaagccaaaagaacaaagctggaggcatcacactacctgacttcaaactatactacaaggctacagtaaccaaaacagcatggtactggtaccaaaacagagatatagatcaatggaacagaacagagccctcagaaataatgccgcatatctacaactatctgatctttgacaaacctgagaaaaacaagcaatggggaaaggattccctatttaataaatggtgctgggaaaactggctagccatatgtagaaagctgaaactggatcccttccttacaccttatacaaaaatcaattcaagatggattaaagatttaaacgttagacctaaaaccataaaaaccctagaagaaaacctaggcattaccattcaggacataggcgtgggcaaggacttcatgtccaaaacaccaaaagcaatggcaacaaaagccaaaattgacaaatgggatctaattaaactaaagagcttctgcacagcaaaagaaactaccatcagagtgaacaggcaacctacaacatgggagaaaattttcgcaacctactcatctgacaaagggctaatatccagaatctacaatgaactcaaacaaatttacaagaaaaaaacaaacaaccccatcaaaaagtgggcgaaggacatgaacagacacttctcaaaagaagacatttatgcagccaaaaaacacatgaagaaatgctcatcatcactggccatcagagaaatgcaaatcaaaaccactatgagatatcatctcacaccagccaaaattcagaatgggtcgagaaatatagttaagagcaacatgaattgcttaatatcgcaaaacagtcctcaggtaccgtgtacaactgttgcaaaatatcatcctaattcccgtgtaactccagaaccacgaagtggaacaccaaaggaagacagaagatggatacttatgacttctgggaaattatacttccttattcaaaaatctactgaacacatgctgtctgggagaaaagattga

SEQ ID NO: 123249 - DNA, 3288 bp, Homo sapiens
atgaaggttgcttcacagtcttcccttctatctgattcagtggaccaagtaaatgactctctggtaactgcagaggctatttcctggaatgaatcaacgagtgaaacgaataactctatggtgactgaattcatttttctgggtctctctgattctcaggaactccagaccttcctatttatgttgttttttgtattctatggaggaatcgtgtttggaaaccttcttattgtcataacagtggtatctgactcccaccttcactctcccatgtacttcctgctagccaacctctcactcattgatctgtctctgtcttcagtcacagcccccaagatgattactgactttttcagccagcgcaaagtcatctctttcaagggctgccttgttcagatatttctccttcacttctttggtgggagtgagatggtgatcctcatagccatgggctttgacagatatatagcaatatgcaaacccctacactacactacaattatgtgtggcaacgcatgtgtcggcattatggctgtcgcatggggaattggctttctccattcggtgagccagttggcctttgccgtgcacttacccttctgtggtcccaatgaggtcgatagtttttattgtgaccttcctagggtaatcaaacttgcctgtacagatacctacaggctagatattatggtcattgctaacagtgaaatacaaactaccatcagagaatactacaaacacctctatgcaaataaactagaaaatctagaagaaatggataaattcctggacacatacactctcccaagactaaaccaggaagaagttgaatctctgaatagaccaataacagaagctgaaattgtggcaataatcaatagcttaccaaccaaaaagagtccaggaccagatggattcacagccgaattctaccagaggtacaaggaggaactggtaccattccttctgaaactattccaatcaatacaaaaagagggaatcctccctaactcattttatgaggccagcatcattctgataccaaagccaggcagagacacaacaaaaaaagagaattttagaccaatatccttgatgaacattgatgcaaaaatcctcaataaaatactggcaaaacgaatccagcagcacatcaaaaagcttatccaccaagatcaagtgggcttcatccctgggatgcaaggctggttcaatatatgcaaatcaataaatgtaatccagcatataaacagagccaaagacaaaaaccacatgattatctcaatagatgcagaaaaagcctttgacaaaattcaacaacgcttcatgctaaaaactctcaataaattaggtattgatgggacgtatttcaaaataataagacctgtctatgacaagcccacagccaatatcatactgaatgggcaaaaactggaagcattccctttgaaaactggcacaagacagggatgccctctctcaccactcctattcaacatagtgttggaagttctgcccagggcaactaggcaggagaaggaaataaagggtattcaattaggaaaagaggaagtcaaattgtccctgtttgcagacgacatgattgtatatctagaaaaccccattgtctcagcccaaaatcttcttaagctgataagcaacttcagcaaagtctcaggatacaaaataaatgtacaaaaatcacaagcattcttatacaccaacaacagacaaacagagagccaaatcatgagtgaactcccattcacaattgcttcaaagagaataaaatacctaggaatccaacttacaagggatgtgaaggacctcttcaaggagaactacaaatcactgctcaaggaaataaaagaggatacaaataaatggaagaacattccatgctcatgggtaggaagaatcaatattgtgaaaatggccatactgcccaaggtaatttacagattcaatgccatccccatcaagctaccaatgactttcttcacagaattggaaaaaactactttaaagttcatatggaaccaaaaaagagcctgcatcgccaagtcaatcctaagccaaaagaacaaagctggaggcatcacgctacctgacttcaaactatacgacaaggctacagtaaccaaaacagcatggtactggtaccaaaacagagatatagatcaatggaacagaacagagccctcagaaataatgccgcatatctacaactatctgatctttgacaaacctgagaaaaacaagcaatggggaaaggattccctatttaataaatggtgctgggaaaactggctagccatatgtagaaagctgaaactggatcccttccttacaccttatacaaaaatcaattcaagatggattaaagacttaaacgttagacctaaaaccataaaaaccctggaagaaaacctaggctttaccattcaggacacaggcatgggcaaggacttcatgtctaaaacaccgagagaggcactcttatgcattgttggtgagaatacaaaatggagcaaagaccccagtgctttatccacacctccaacaagctgcagtcgaccacaaagaagaaacaagtctgtctcccatgggtcctacccacaccccctgctgttcaccatgaatgatagagtcaacagtgtgaaaacgaccatactgccaaaagcaacctacaaattcaatgcaattcccatcaaaataccaccatcattcttcacagaactagaaaaaacaaggctaaaattcacatggaaccaaaaaagagcccacacagccaaagcaagactaagcaaaaagaataaatctagaggcatcacattactcgacttcaaactatactataaggccatagtcaccaaaacagcatggtactggtataaaaataggcatatagaccaatggaatagaatagagaacccagaaataaagccaaatactttcagccaactgatctttgacaaagcaagcaaaaacataaagtggggaaaggacaccctattcaacaaatggtgctggtataattggcaagccacatgtagaagaatgcaactggatcctcatctctcaccttataaacaaatcaactcaagatggttcacagacttaaatctaagacctgaaaccataaaaattctagaagataagattggaaaaacacttctagacattggcttaggcaaagacttcacaatcaagaacccaaaagcaaacacaacaaagataaatagatgggacttaattaaactgaaagccttctgcacatcaaaataa

SEQ ID NO: 123250 - DNA, 2275 bp, Homo sapiens
atggggagaaaccagctcaaaaagcctgaaaattccaaaaaccagaatgcctcttctactccaaaggttcacaactcctcaccagcaagggaacaaaactggacagagaatgagtttgacgaattgacagaagtaggcttcagaaggtgggtaataacaaactcctccgagctaaaggagcatgctctaacccaatgcagggaagctaggaaccttgaaaaaagctactctaaaattggagatgactatttcatcagaggcacagacatcaacacagggacacaagaagcatggaaaaaaatacaaactaccatcagagaatgctataaacacctctacgcaaataaactagaaaatctagaagaaatggatacattcctcgacacatacaccctcccaagactaaaccaggaagaagtcgaatctctgaatagaccaataacaggctctgaaattgaggcaataattaatagcttaccaaccaaaaaaagtccaggaccagacggattcacagccaaattctaccagaggtacaaaggggagctggtaccattccttctgaaactattccaatcaataaaaaaagagagaatcctccctaactcattttatgaggccagcatcatactgataccaaagcctggcagagacacaacaaaaaaaagagaattttagaccaatatctttgatgaacatcgatgcaaaaatcctcaataaaatactggcaaaccaaatccagcagcacatcaaaaagcttatccaccatgatcaagtgggcttcacccctgggatgcaaggctggttcaatatatgcaaatcaataaatataatccagcatataaacagaaccaaagacaaaaaccacatgattatttcaatagatgcagaaaaggcctttgacaaaattcaacaacacttcatgctaaaaactctcaataaattaggtattgatgggacgtatctcaaaatgataagaactatctatgacaaacccacagccaatatcatactgaatgggcaaaaactggaagcattccctttgaaaactggcacaagacagggatgccctctctcaccactcctattcaacatagtgatggaacttctggccagggcaattaggcaggagaaggaaataaagggtattcaattaggaaaagaggaagtcaaattgtccctgtttgcagatgacatgattagaataaaataccttggaatccaacttataagggacatgaaggacctcttcaaggagaactacaaaccactgctcaatgaaataaaagaggatacaaacaaatggaagaacatcccatgctcatgggtaggaagaatcaatatcgtgaaaatggccatactgcccaaggtaatttatagattcaatgccatccccatcaagctaccaatgactttcttcacagaattggaaaaaactactttaaatttcatatggaaccaaaaaagagcccccacattgccccaagtccaatccctaagcccaaaagaacaaagctgggaggcatcacggctacctgacttcaaactatacctacaaggcctacagtaacccaaaacagcatggtatggtactggtacccaaaacagagatatagaccaatggaacagaacagagccctcagaaataacaccgcatatctacaactatctgatctttgacaaacctgagaaaaacaagcaatggggaaaggattccctatttaataaatggtgctgggaaaactggctagccacatgtagaaagctgaaactggatcccttccttacaccttatacaaaaattaattcaagatggattaaagacttaaacgttagacctaaaaccataaaaaccctagaagaaaacctaggcattaccattcaggacataggcatgggcaaggacttcatgtctaaaacaccaaaagcaatggcaacaaaagccaaaattgacaaatgggatctaattaaactcaagagcttctgcacagcaaaagaaactaccatcagagtgaacaggcaacctacaaaatgggagaaaattttcgcaacctactcatctgacaaagggctaatatccagaatctacaatgaacttaaacaaatttacaagaaaaaaacaaacaaccccatcaacaagtgggcgaaggatatgaacagacacttctcaaaagaagacatttatgcagcccaaaaacacatgaaaaatgctcaccatcactggccatcagagaaatgcaaatcaaaacacaatgagataccatctcacaccagttag

SEQ ID NO: 123251 - DNA, 3542 bp, Homo sapiens
aaacctcaactctctatgcagcttcgatcgtaggtatgtgtggggcttctgtaaaagtctgatccagggttactttgcccaattacactctccgctgcctgctggaccccacttgtgatgccccttgtaatgatcatggcatgaacacccgctggatgagccatagatactgtgagatggtgagctcactttctttagagaattttcattgttgcacccaaaggagctccattctcttccctcatgtgcctgttggcagaagacaactcgtatggaaagtggtttttggaatcgatgtgattctacatgaggttctatgcagagtcaatgcctctgcaaggagaagcaggcttgcccacacatggtttgccctgagagcatgtactgtctgtatttatctccctgtctatatgcagcccactgtcttacaacagtgcagtgcaagccctgcagctggtaggatatcaaaacctgaaggcctagatttcaagtgccatccagatatgaaatctttcaacctttcggtggctttgaatctaaagtgtgtctcttgtaaatggcacactgagtttgaagtgcctcacagtgaggtctctgctgtgggcgactgctgggcttcaagcagtccaggacccttcagtcaactgcccaagttcagatggcccagttctccaaaaggagagaagggtgcaccagaatgtcaccagggcagagagcgaaacagatcatggtagcgatccttccccagatccaggccctcccccttcctccttctctctcgttatctcagaattcacatggtattctcagttttgccttttggcctgcaaaacccgaaatatttactatctggctctttgcaggaaaagttcaggacccctggtataaattcccataaaacactggatccaaatagagtaatcattaaggtgaggaggaggctggagaaggagaaagccctgagggcctatgttgggaaatcagaggttcgtaacatgcatttaagagaaagatgcaaactatagaagaaaagagagaagaatcaaatagacacaattaaaaatgataaaggggatatcaccactgatgccacagaaatacaaactaccatcagagaatactataaacacctctatgcaaataaactagaaaacctagaagaaatggataaattcctcgacacatacatcctcccaagactaaaccaggaagaagttgaatctctgaatagaccaataacaggctctgaaattgaggcaataattaatagcttaccaaccaaaagaagtccaggaccagatggattcacagccgaattctaccagacgtacaaagaggagctggtaccattccctctgaaactattccaatcaacagaaaaagagggaatcctccctaactcattttatgaggccagcatcatcctgataccaaagcctggcagagacacaacaaaaaaagagaattttagaccaatatccttgatgaacatcgatgcaaaaatcctcaataaaatactggcaaaccgaatccagcagcacatcaaaaagcttatccactatgatcaagtgggcttcatccctgggatgcaaggctggttcaacaaacgcaaatcaataaatgtaatccagcatataaacagaaccaatgacaaaaaccacatgattatctcaatagatgcagaaaaggcctttgacaaaattcaacaacccttcatgctaaaaactctcaataaattaggtattgatgggacgtatctcaaagtaataagagctatctatgacaaacccacagccaatatcatactgaatgggcagaaactggaagcattccctttgaaaactgacacaagacagggatgccctctctcaccactcctattcaacatagtgttggaagttctggccagggcagtcaggcaggagaaggaaatagagggtattcaattaggaaaagaggaagtcaaattgtccctgtttgcagatgacatgattgtatatctagaaaaccccatcgtctcagcccaaaatctcctcaagctgataagcaacttcagcaaagtgtcaggatacaaaatcaacatacaaaaatcacaagcattcttatacaccaataacagacaaacagagagccaaatcatgagtgaactcccattcacaactgcttcaaagaaaataaaatacctaggaatccaacttacaagggatgtgaaggacctcttcaaggagaactacaaaccactgctcaatgaaataaaagaggatacaaacaaatggaagaacattccatgctcgtgggtaggaagaatcaatatcatgaaaatggccatactgcccaaggtaatttgtagattcaatgccatccccatcaagctaccaatgcctttcttcacagaattggaaacaactactttaaagttcatatggaaccaaaaaagagcccgcatcgccaagtcaatcctaagccaaaagaacaaagctggaggcatcacgctacctgacttcaaactatactacaagcctacagtaaccaaaacagcatggtactggcaccaaaacagagctatagagcaatggaacagaacagagccctcagaaataacgacacatatctacaactatctgacctttgacaaacctgagaaaaacaagcaatggggaaaggattccctatttaataaatggtgctgggaaaactggctagccatatgtagaaagctgaaactggatcccttccttacaccttatacaaaaatcagttcaaaatggattaaagacttaaacgttagacctaaaaccataaaaacccaagaagaaaacctaggcattaccattcaggacataggcatgggcaaggacttcatgtctaaaacacaaaaagcaatggcaacaaaagccaaaattgacaaaggggatctaattaaactaaagagcttctgcacagcaaaagaaactagcagcagtgtgaacaggcaacctacaaaatgggagaaaatttttgcaacctactcatctgacaaagggctaatatccagaatctacaatgaactcaaacaaattcacaagaaaaaaacaaacaaccccatcaaaaagtgggcaaaggatatgaacagacacttctcaaaagaagacatttatgcagccaaaaaacacatgaaaaactgttcaccatcactggccatcagagaaatgcaaatcaaaaccacaatgagataccatctcacaccacttagaatggcaatcattaaaaagtcaggaaacaacagacgcacagcaactttaagtttgctgccagctatacgtcatgaaagggaagcttttcatcaaagggaagaagaaaaggaagggggaagaatcctacttttacaaaacagagtaattctttgctcctgctccctttgcccacatctctcacctgcgtccaaaccaaaacacaggggcctagatcgctttaagtcacaaagcacgtctatgttctcaggtgtgctcagcgttcggaattctctgcatgctcctcaggttgtttcctggttgcagcgctaa

SEQ ID NO: 123252 - DNA, 5357 bp, Homo sapiens
atggggaaaaaacagaacagaaaaactggaaactctaaaatgcagagcgcctctcctcctccaaaggaacgcagttcctcaccagcaacggatcaaagctggatggagaatgactttgacgagctgagagaagaaggtttcagacgatcaaattactctgagctacgggaggacattcaaaccaaaggcaaagaagttgaaaactttgaaaaaaatttagaagaatgtataactagaataaccaatacagagaagtgcttaaaggagctgatggagctgaaaaccaaggctcgagaactacgtgaagaatgcagaagcctcaggagccgatgcgatcaactggaagaaagggtatcagcaatggaagatgaaatgaatgaaatgaagcaagaagggaagatcaaaagagacaaagaaggccattacataatggtaaagggatcaattcaacaagaagagctaactatcctaaatatatatgcacccaatacaggagcacccagattcataaagcaagttctgagtgacctacaaagagacttagactcccacacattaataatgggagactttaacacctcactgttaacattagacagatcaatgagacagaaagtcaacaaggatacccaggaattgaactcatctctgcaccaagcggacctaatagacatctacagaactctccaccccaaatcaatagaatatacatttttttcagcaccacaccacacctattccaaaattgaccacatagttggaagtaaagctctcctcagcaaatgtaaaagaacagaaattataacaaactatctctcagaccacagtgcaactcaaactagaactcaggattaagaatctcactcaaagccgctcaactacatggaaactgaacaacctgctcctgaatgactactgggtacataacgaaatgaaggcagaaataaagatgttctttgaaaccaacgagaacaaagacacaacataccagaatctctgggacgcattcaaagcagtgtgtagagggaaatttatagcactaaatgcccacaagagaaagcaggaaagatccaaaattgacaccctaacatcacaattaaaagaactagaaaagcaagagcaaacacattcaaaagctagcagaaggcaagaaataactaaaatcagagcagaactgaaggaaatagagacacaaaaaacccttcaaaaaaatcaatgaatccaggagctggttttttgaaaggatcaacaaaattgatagaccactagcaagactaataaagaaaaaaagagaggagaatcaaatagacacaataaaaaatgataaaggggatatcaccaccgatcccacagaaatacaaactaccatcagagaatactataaacacctctacgcaaataaaccagaaaatctagaagaaatggataaattcctcgacacatacactctcccaagactaaagcaggaagaagttgaatctctgaatagaccaataacaggagctgaaattgtggcaataatcaatagtttaccaaccaaaaagagtccaggaccagatggattcacagccgaattctaccagaggtacaaggaggaactggtaccattccttctgaaactattccaatcaatagaaaaagagggaatcctccctaactcattttatgaggccagcatcattctgataccaaagccgggcagagacacaaccaaaaaagagaattttagaccaatatccttgatgaacattgatgcaaaaatcctcaataaaatactggcaaaccgaatccagcagcacatcaaaaagcttatccaccatgatcaagtgggcttcatccctgggatgcaaggctggttcaatatactgttggatgttctggccagggcaattaggcaggagaaggaaataaagggtattcaattaggaaaagaggaagttaaattgtccctgtttgcagacgacatgattgtatatctagaaaaccccattgtctcagccgaaaatctccttaagctgataagcaacttcagcaaagtctcaggatacaaaatcaatgtacaaaaatcacaagcattcttatacaccaacaacagacaaacagacagccaaatcatgagtgaaatcccattcacaattgcttcaaagagaataaaatatctaggaatccaacttacaagggatgtgaaggacctcttcaaggagaactacaaaccactgctcaaggaaataaaagaggatacaaacaaatggaagaacattccatgttcatgggtaggaagaatcaatatcatgaaaatggccatactgcccaaggtaatttacagattcaatgccatccccatcaagctaccaatgcctttcttcacagaattggaaaaaactactttaaagttcatatggaaccaaaaaaaaccccgcatcgccaagtcaatcctaagccaaaagaacaaagctggaggcatcacactacctgacttcaaactatactacaaggctacagtaaccaaaacagcatggtactggtgccaaaacagagatatagatcaatggaacagaacagagccctcagaaataacgccgcatatctacaactatctgatctttgacatacctgagaaaaacaagcaatggggaaaggattccctgtttaataaatggtgctgggaaaactggctagccatatgtagaaagttgatactggatcccttccttacaccttatataaaaatcaattcaagatggattaaagacttaaacgttggacctaaaaccataaaaaccctagaagaaaacctaggctttaccattcaggacataggcatgggcaaggacttcatgtctaaaacaccaaaagcaatggcaacaaaagccaaaattgacaaatgggatctaattaaactcaagagcttctgcacagcaaaagaaactaccatcagagtgaacaggcaacctacaaaatgggagaaaattttcgcaacctactcatctgacaaagggctaatatccagaatctacaatgaactcaaacaaatttacaagaaaaaaacaaacaaccccatcaaaaagtgggtgaaggacatgaacagacacttctcaaaagaagacatttatgcagccaaaaaacacatgaaaaaatgctcatcatcactggccatcagagaaatgcaaatcaaaaccacagtgagataccatctcacaccagttagaatggcaatcatgaaaaagtcaggaaacaacaggtgctggagaggatgtggagaaataggaacacttttacactgttggtgggactgtaaactagttcaaccattgtggaagtcagtgtggcgattcctcagggatctagaactagaaataccatttgacccagccatcccattactgggtatatacccaaaggactataaatcatgctgctataaagatacatgcacacctctcaagaaacacatcagctttcatctttatcagtatgacactgacatgataggaaatgctgggctggtgattcagcagccatccattttacagtcagaggacaagtcgtacaatggtggaggaataggttcttcaaataggatcatggacttcttggaggagccaatccctggtgtagggacctatgatgatttcaatacaattgattgggtgagagagaagtctcgagaccgggataggcaccgagagggagcctttgcctacatagtcaattatttcatgtacgtcctctgggctctcctatttgccttccttgccgtatctcttgtcaaggtgtttgcgccttatgcctgtggctctggaatccctgagataaaaactatcttgagtggtttcattattaggggctatttgggtaagtggactctggttatcaaaaccatcaccttggtgctggcagtgtcgtctggcttgagcctgggcaaagagggccctctagtgcacgtggcttgctgctgtgggaacatcctgtgccactgcttcaacaaatacaggaagaatgaagccaagcgcagagaggtcttgtcggctgcagcagcagctggtgtatctgtagcctttggagcacctataggtggagtattattcagccttgaagaggtcagctactattttcccctcaaaacattgtggcgttcattctttgctgccttggtggcagcattcactctacgctccatcaatccatttgggaacagccgcctggtactattttatgtggagtttcacaccccatggcatctctttgagctcgtgccattcattctgctgggcatatttggtggtctgtggggagcactgtttatccgcacaaacattgcctggtgtcggaagcgaaagaccacccagttgggcaagtatcctgttatagaggtactcgtcgtgacagccatcactgccatcctggctttccccaatgaatacactcggatgagcacaagtgagctcatttctgagctgtttaatgactgtggccttctggactcctccaagctctgtgattatgagaaccgtttcaacacaagcaaagggggtgaactgcctgacagaccggctggcgtgggagtctacagtgcaatgtggcagctggctttaacactcatactgaaaattgtcattactatattcacctttggcatgaagatcccttctggcctctttatccctagcatggctgttggtgctatagcaggtcgacttctaggagtaggaatggaacagctggcttattaccaccaggaatggaccgtcttcaatagctggtgtagtcagggagctgattgcatcacccccggcctttatgcaatggttggggctgcagcctgcttagccaaagaagagtttgctcataagaccctggcaatggatgtgatgaaaccccggagaaatgatcctttgttgactgtccttactcaggacagtatgactgtggaagatgtagagaccataatcagtgaaaccacttacagtggcttcccagtggtggtatcccgggagtcccaaagacttgtgggctttgtcctccgaagagatctcattatttcaattgaaaatgctcgaaagaaacaggatggggttgttagcacttccatcatttatttcacggagcattctcctccattgccaccatacactccacccactctaaagcttcggaacatcctcgatctcagccccttcactgtgactgaccttacacccatggagatcgtagtggatattttccgaaagctgggactgcggcagtgcctggttacacacaacgggcgattgcttggaatcattaccaaaaaggatgtgttaaagcatatagcacagatggcgaaccaagatcctgattccattctcttcaactag

SEQ ID NO: 123253 - DNA, 2492 bp, Homo sapiens
atgggagactttaacaccccactgtcaacattagacagatcaacgagacaggaagttaacaaggatacccaggaattgaactcagctctgcaccaagtggacctaatagacatctacagaactctccaccccaaatcaacagaatatacattcttttcagcaccacactacacctactccaaaattgaccacatagttggaagtaaagcactcctcagcaaatgtaaaagaacagaaattataacaaactgtctctcagaccacagtgcaatcaaactagaactcaggattaagaaactcactcaaaaccactcaactacatggaaactgaacaacctgctcctgaatgactactgggtaaataatgaagtgaaggcagaaataaagatgttctttgaaaccaacgagaacaaagacacaacataccagaatctctgggacacattcaaagcaatcaacaaaattgatagaccactagcaagactaataaagaagaaaagagagaagaatcaaatagatgcaataaaaaacgataaattgggatatcaccactgatcccacagaaatacaaactaccatcagagaatactataaacacctctatgcaaataaactagaaaatctagaagaaatggataaattcctggacacatacaccctcccaagactaaaccaggaagaagttgaatctctgaatagaccaataacaggctctgaaattgaggcaataactaatagcctaacaaaccaaaaaaagtccaggaccagacggattcacagccaaattctaccagaggtacaaggaggagcttgtacccattccttctgaaactattccaattaatagaaaaagagggaatcctccctaactcattttatgaggccagcatcatcctgataccaaagcctggcagagacacaacaacaacaaaaaaagaattttagaccaatatccctgatgaacatcgatgcaaaaatcctcaataaaatactagcaaaccgaatccagcaaacacatcaaaaagcttatccaccatgatcaagtgggcttcatccctggggatgcaaggcttgttcaacatatgcaaatcaataaacgtaatccatcatataaacagaaccaaagacaaaaactacatgattatctccaataggatgcagaaaaggcctttgacaaaattcaacaacccttcatgctaaaaactctcaataaattaggtattgatgggacgtatctcaaaataataagagctatctatgacaaacccacagccgatatcatactgaatgggcaaaaactggaagcattctctttgaaaactggcacaagacagggatgccctctctcaccactcctattcaacatagtgttggaagttctggccagggcagtcaggcaggagaaggaaataaagggcattcgattaggaaaagaggaagtcaaattgtccctgcttgcagatgacatgattgtatatctagaaaaccccatcgtctcagccccaaatctcctcaagctgataagcaacttcagcaaagtctcaggatacaaaatcaatgtacaaaaatcacaagcattcttatacaccaataacagacaaacagagagccaaatcatgagtgaactcccattcacaattgcttcaaagagaataaaatacttaggaatccaactcacaagggacatgaaggacctcttcaaggagaactacaaaccactgctcaatgaaataaaagaggatacaaacaaatggaagaacattccatgctcatgggtaggaagaatcaatatcatgaaaatggccatactgcccaaggtaatttatagattcaatgccatccccatcaagctaccaatgactttcttcacagaattggaaaaaactactttaaagttcatatggaaccaaaaaagagcccgcatcgccaagtcaatcctaagccaaaagaacaaagctggaggcatcacactacctgacttcaaactatactacaaggctacagtaaccaaaacagcatggtactggtaccaaaacagagatatagatcaatggaacagaacagagccctcagaaataacaccgcatatctacaactatctgatctttgacaaacctgagaaaatgagtataatagatacagggggatggtatgaggcaccagtcagttccttcttcaaggagggactatgccgcacaggtactgagaatcaggttaacagacagcctccagctgccagtcccttcaaggtttacgtcagctgcacggggtcacttcaccctaggccacactacttcttggagcatccatatccaagcttcctttctttctcttcaacaagtgctgccactgcagctgatgacattccaggagcttttaatgaattaaagccacatttgcccaaagaagccagcaaagttactgactggtttgagaatagttatgtgtatggtaggataagaagatactcactcaacgatgttgctgtttga

SEQ ID NO: 123254 - DNA, 3083 bp, Homo sapiens
atggggaaaaaacagaacagaaaaactggaaactctaaaacgcagagcgcctctcctcctccaaaggaacgcagttcctcaccagcaacagaacaaagctggatggagaatgattttgacgagctgagagaagaaggcttcagacgatcaaattactctgagctatgggaggacattcaaaccaaaggcaaagaagttgaaaactttgaaaaaaatttagaagaatgtataactagaataaccaatacagagaagtgcttaaaggagctgatggagctgaaaaccaaggctcgagaactacgtgaagaatgcagaagcctcaggagccgatgcgatcaactggaagaaagggtatcagcaatggaagatgaaatgaatgaaatgaagcgagaagggaagtttagagaaaaaagaataaaaagaaatgagcaaagcctccaagaaatatgggactatgtgaaaagaccaaatctacgtctgattggtgtacctgaaagtgatgtggagaatggaaccaagctggaaaacactctgcaggatattatccaggagaacttccccaatctagcaaggcaggccaacgttcagattcaggaaatacagagaacgccacaaagatactcctcgagaagagcaactccaagacacataattgtcagattcaccaaagttgaaatgaaggaaaaaatgttaagggcagccagagagaaagaaatacaaactaccatcagagaatactacaaacacctctacgcaaataaactagaaaatctagaagaaatggatacattcctcgacacatacactctcccaagactaaaccaggaagaagttgaatctctgaatagaccaataacaggctctgaaattgtggcaataatcaatagtttaccaaccaaaaagagtccaggaccagatggattcacagccgaattctaccagaggtacaaggaggaactggtaccattccttctgaaactattccaatcaatagaaaaagagggaatcctccctaactcattttatgaggccagcatcattctgataccaaagccgggcagagacacaaccaaaaaagagaattttagaccaatatccttgatgaacattgatgcaaaaatcctcaataaaatactggcaaaccgaatccagcagcacatcaaaaagcttatccaccatgatcaagtgggcttcatccctgggatgcaaggctggttcaatatacgcaaatcaataaatgtaatccagcatataaacagagccaaagacaaaaaccacatgattatctcaatagatgcagaaaaagcctttgacaaaattcaacaacccttcatgctaaaaactctcaataaattaggtattgatggtacatatttcaaaataataagagctatctatgacaaacccacagccaatatcatactgaatgggcaaaaactggaagcattccctttgaaaactggcacaagacagggatgccctctctcaccgctcctattcaacatagtgttggaagttctggccagggcaatcaggcaggagaaggaaataaagggtattcaattaggaaaagaggaagtcaaattgtccctgtttgcagacgacatgattgtttatctagaaaaccccattgtctcagcccaaaatctccttaagctgataagcaacttcagcaaagtctcaggatacaaaatcaatgtacaaaaatcaccaagcattcctatacaccaacaacagacaaacagagagccaaatcatgagtgaactcccattcacacttactacaacaagaataaaatacctaggaatccaacttacaagggatgtgaaggacctcttcacggagaactacaaaccactgctcaatgaaataaaagaggatacaaacaaatggaagaacattccatgctcatgggtaggaagaatcaatatcgtgaaaatggccatactgcccaaggtaatttatagattcaatgccatccccatcaagctaccaatgactttcttcacagaattggaaaaaaactactttaaagttcatatggaaccaaaaaagagcccgcattgccaagtcaatcctaagacaaaagaacaaagctggaggcatcacactacctgacttcaaactatactacaaggctacagtaaccaaaacagcatggtactggtaccaaaacagagatatagatcaatggaacagaacagagccctcagagataatgccgcatatctacaactatctgatctttgacaaacctgagaaaaacaagcaatggggaaaggattccctatttaataaatggtgctgggaaaactggctagccatatgtagaaagctgaaactggatcccttccttacaccttatacaaaaatcaattcaagatggattaaagatttaaacgttagacctaaaaccataaaaaccctagaagaaaacctaggcattaccattcaggacataggcgtgggcaaggacttcatgtccaaaacaccaaaagcaatggcaacaaaagccaacattgacaaatgggatctaattaaactaaagagcttctgcacagcaaaagaaactaccatcagagtgaacaggcaacctacaacatgggagaaaatttttgcaacctactcatctgacaaagggctaatatccagaatctacaatgaactcaaacaaatttacaagaagaaaacaaacaaccccatcaaaaagtgggcgaaggacatgaacagacacttctcaaaagaagacatttatgcagccaaaaaacacatgaagaaatgctcatcatcactggccatcagagaaatgcaaatcaaaaccactatgagatatcatctcacaccagttagaatggcagtcattaaaaagtcaggaaacaacaggtcacatttcaacatgagatttggagaggacagacacccgaatcacagcaatgggtctcagcaagcagctccatcagctgcctcagacttgtctggaaggtggcagacgtgggcaattcctgccttgctgaagagggatacactgctgagtgaatgctctgaagcagaggagcatttggtgcaactgaagttgtctgaa

SEQ ID NO: 123255 - DNA, 4202 bp, Homo sapiens
atgaggaaaaaacagagcagaaaaactggaaactctaaaaagcagagcacctctcctcctccaaaggaacgcagttcctcaccagcaatggaacaaagctggacggagaatgactttgacgagttgagagaagaaggtttcagacgatcaaactactccaagctacaggaggaaattgaaaccaaaggccaagaagttgaaaacttggaaaaaaatttagacaaatgtataactagaataaccaatatagagaagtgcttaaaggagctgatggagctgaaagccaaggctcgagaactacatgaagaatgcagaagcctcaggagccgatgcgatcaactggaagaaagggtatcagtaatggaagatgaaatgaatgaaatgaagcaagaagggaagtttagagaaaaaagaataaaaagaaatgaacaaagcctccaagaaatatgggactatgtgaaaagaccaaatctacctccgattgatgtacctgaaagtgacagggagaatggaaccaagttggaaaacactctgcaggatgttatccaggagaacttccccaacctagcaaggcaggccaacattcagattcaggaaatacagagaatgccacaaagatactcctcgagaagagcaactccaagacacataattgtcagattcaccaaagttgaaatgaaggaaaaaatgttgagggcagccagagagaaagcattcaagcaggcctcccggagagaagatgacattgccaaggtaaccagtggcatgagagttttattcaagccaggaaccacagaggtacaggagctggccctttgctatggtggaatggccaacagaaccatctcagccctcaagaccactcagaggcagctttccaagctctggaaggaggagctgctgcaggacgtgtgtgcaggactggcagaggagctgcatctgcctcccgatgcccctggtggcatggtggacttccggtgcaccctcaccctcagcttcttcttcaagttctacctgacagtccttcagaagctgggccaagagaacctggaagacaagtgtggtaaactggaccccactttcgccagtgcaactttactgtttcagaaagaccccccagccgatgtccagctcttccaagaggtgcccaagggtcagtctgaggaggacatggtgggccggcccctgccccacctggcagcggacatgcagcctctggtgaggccgtgtactgtgacgacattcctcgctacgagaatgagctgtctctccggctggtcaccagcacccgggcccacgccaagatcaagcatcgagatgaagttcaagaatatgctgtttcctatgattgtctgcccagcctggatccctgagctgaattcggtagaacatggacccgacggtatctcctttggagctgcttgccccctgagcattgtggaaaaaaccctggtggatgctgttgctaagcttcctgcccaaaagacagaggtgttcagaggggtcctggagcagctgcgctggtttgctgggaagcaagtcaagtctgtggcgtccgttggagggaacatcatcactgccagccccatctccgacctcaaccccgtgttcatggccagtggggccaagctgacacttgtgtccagaggtgagctgcctgaagcagaggtccaggaagaaggacttgggggagaaaagtctcaccagataggtcattttctggagaaacagagctcaaagttcagtgacccagctttccctgtgatttggatccagggaagcatggagaatgtacctggtttggtggacgggaaagctggatattttctctgtagagaattcacagcaggaactgctacctgcatgccttacctagtggggcaccaggagaactgtccagatggaccacaccttcttccctggctacagaaagaccctgctgagcccggaggagatactgctctccatagagatcccctacagcagggagaaatacaaactaccatcagagaatactacaaacacctctccgcaaataaactagaaaatctagaagaaatggataaattcctcgacacatacactctcccaagactaaaccagaaagaagttgaatctctgaatagaccaataacaggagctgaaattgtgccaataatcaacagcttaccaaccaaaaagagttcaggactagatggattcacagccgaattctaccagaggtacaaggaggaactgcatataaacagaaccaaagacaaaaaccacatgattatctcaatagatgcagaaaaggcctttgacaaaattcaacaacccttcatgctaaaaactctcaataaattaggtattgatgggacgtatctcaaaataataagagctatctatgacaaacccacagccaatatcatactgaatgggcaaaaactggaagcattccctttgaaaactggcacaagacagggatgccctctctcaccactcctattcaacatagtgttggaagttctggccagggcaatcaggcaggagaaggaaataaagggtattcaattaggaaaagaggaagtcaaattgtccctgtttgcagatgacatgattgtatatctagaaaaccccattgtctcagcccaaaatccccttaagctgataagcaacttcagcaaagtctcaggatacaaaatcaatgtacaaaaatcacaagcattcttatacaccaataacagacaaacagagagccaaatcatgagtgaactcccattcacaattgcttcaaagagaataaaatacctaggaatccaacttacaagggacgtgaaggacctcttcaaggagaactacaaaccactgctcaatgaaataaaagaggatacaaacaaatggaagaacattccatgctcatgggtaggaagaatcaatatcatgaaaatggccatactgcccaaggtaatgtatagattcaatgccatccccatcaagctaccaatgcctttcttcacagaattggaaaaaactactttaaagttcactactggaaccaaaaaagagcccgcatcgccaagtcaatcctaagccaaaagaacaaagctgtaggcatcacactacctgacttcaaactatactacaaggctacagtaaccaaaacagcatggtactggtaccaaaacagagatatagatcaatggaacagaacagagccctcagaaataatgccacatatatctacaactatctaatctttgacaaacctgagaaaaacaagcaatggggaaaggataccctatttaataaatggtgctgggaaaactggctagccatatgtagaaagctgaaactggatcccttccttacaccttatacaaaaattaattcaagatggattaaagacttaaatgttagacctaaaaccataaaaaccctagaagaaaacctaggcaataccattcaggacataggcatgggcaaggacttcatgtctaaaacaccaaaagcaacggcaacaaaagccaaaattgacaaatgggatctaattcaactaaagagcttctgcacagcaaaagaaaccaccatcagagtgaacaggcaacctacagaatgggaggaaatttttgcaacctactcacctgacaaagggctaatatccagaatctacaatgaactcaaacaaatttacaagaaaaaaacaaaaaaaccccatcaaaaagtgggcaaaggatgtgaacagacacttctcaaaagaagacatttatgcagccaaaaaacacatgaaaaaatgctcatcatcactggccatcagagaaatgcaaatcaaaaccacaatgagacaccatctcacaccagttagaatggcaatcattaaaaagtcaggaaacaacacgtgctggagaggatgtggagaaataggaacacttttacactgttggtgggactgtaaactagttcaaccattgtggaagtcagtgtggcgattcctcagggatctagaactagaaataccatttgacccagccatcccattactgggtatatacccaaatgactataaatcatgctgctataaagacacatgcacacagctttcagctgacgagaattgtgctgatagcatttggaggggaagggatgactgcgaacacctctgcatacccactggaggtcaaggttttggggatgaacaggaagtaccagcagggaatgattag

SEQ ID NO: 123256 - DNA, 6194 bp, Homo sapiens
tgcacccaatacaggagcacccagattcataaagcaagtcctgagtgacctacaaagagacttagactcccacacaataataatgggagactttaacaccccactgtcaacattagacagatcaatgagacagaaagttaacaaggatatccaggaattgaactcagctctgcaccaagcggacctaatagacatctacagaactctccaccccaaatcaacagaatatacattcttttcagcaacacaccacacctattccaaaattgaccacatagttggaagtaaagctctcctcagcaaatgtaaaagaacagaaattataacaaactgtctctcagaccacagtgcaatcaaactagaactcaggattaagaaactcactgaaaaccgctcaactacatggaaactgaacaacctgctcctgaatgactactgggtacataacgaaatgaaggcagaaataaagatggtctttgaaaccaatgacactctcccaagactaaaccaggaagaagttgaatctctgaatagaccaaaaacaggctctgaaattgaggcaataattaatagcctaccaaccaaaaaaagtccaggaccagatggattcacagctgaattctaccagaggtacaaggaggagctggtaccattccttctgaaactattccaatcaatagaaaaagagagaatcctccctaactcattttatgaggccagcatcatcctgataccaaagcctggcagaggcacaacaaaaaaaaagagaattttagaccaatatccctgatgaacatcgatgcaaaaatcctcaataaaatgctggcaaaccaaatccagcagcacatcaaaaagcttatctaccatgatcaagttggcttcatccctgggatgcaaggctggttcaacatatgcaaatcaataaatgtaatccatcatataaacagaaccaaagacaaaaaccacatgattatctcaatagatgcagcaaaggcctttgacaaaattcaacaacccttcatgctaaaaactctcaataaattaggtattgatgggacttatctcaaaataataagagctatctatgacaaacccacagccagtatcatactgaatggacaaaaactggaagcattcactttgaaaactggcacaagacagggatgccctctctcaccactcctattcaacatagtgttggaagttctggccagggcaatcaggcaggagaaggaaataaagggcattcaattaggaaaagaggaagtcaagttgtccttgtttgcagatgacatgattgtatatctagaaaaccccatcatctcagcccaaaatctccttaagctgataggcaacttcagcaaagtctcaggatacacaatcaatgtgcaaaaatcacaagcattcttatacaccaataacagacaaacagagagccaaatcatgagtgaactcccattcacaattgcttcaaagagaataaaatacctaggaatccagcttacaagggatgtgaaggacttcttcaaagagaactacaaaccactgctcaatgaaataaaagaggataaaaacaaatggaagaacattccatgctcatgggtaggaagaatcaatattgtgaaaatggccatactccccaagaggactccattattatcgctgcctagtacattatatgaggagctgtggagacttaggtcctacttcccattgtgccctcaactttacaacatggagcagaataccacagactgggtaatttataaagaacagtgcatttggctcacagctctggagactggggagtccaagagcactgcaccagcatttggcaagggttatcccatggcagaatacatcatatggggcagattgacacctcacatggctggctactcctctgagacaaaacttccagaggaacgatcaggcagcaacatctgctgttcaccaatatccgctgttctgcagcctctgctgctgatacccaggcaaacagggtctggagtggacctccagcaaactccaacagacctgcagctgagggtcctgactgttagaaggaaaactaacaaacagaaaggacatccacaccaaaaccccatctgtacgtcaccatcatcaaagaccaaaggatcaaattcacacataacaatattaaccttaaatgtaaatgggctaaatgctccaattaaaagacacagactggcaaattggataaagaggtcaagacccattcagtgtcctgtattcaggagacccatctcacgtgcagagacacacacaggatcaaaataaagggatggagggagatctaccaagcaaatggaaaacaaaaaaaggcaggggttgcaatcctagtctctgataaaacggactttaaaccaacaaagatcaaaagagacaaagaaggccattacatgatggtaaagggatcaattcaacaagaagagctaactaccctaaatatatatgcacccaatacaggagcacccagattcataaagcaagtccttagagacctacaaagagacttagactcccacacattaataatgggagactttaacaccccactgtcaacattagacagatcaacgagacagaaagttaacaaggatatccaggatttgaactcagctctgcaccaagtggacctaatagacatctacagaactctccaccccaaatcaacagaatatacattcttctcagcactacaccacatttattccaaaattgaccacatagttggaagtaaagcactcctcagcaaatataaaacaacagaaattataacaaactgtctctcagaccacagtgcaatcaaactcgaactcaggattaagaaactcactcaaaaccgctcaactacatggaaactgaacaacctgctcctgaatgactactgggtacataacaaaatgaaggcagaaataaatacattatttgaaaccaacgagaacaaagacacaacataccagaatctctgggacacattcaaagcagtgtgtagagggaaattcatagcactaaatgcccacaagagaaagcaggaaagatctaaaattgacaccctaacatcacaattaaaagaactagagaagcaagaacaaacacattcaaaagctagcagaaggcaagaaataactaagatcagagcaaaactgaaggaaatagagacacaaaaaaacccttcaaaaaatcaatgaatccaggagctggttttttgaacagatcaacaaaattgatagactgctagcaagactaataaagaagaaaagagagaagaatcaaatagacacaataaaaaatgacaaaggggatatcaccaccgatcccacagaaatacaaactaccatcagagaatactataaacacctctacgcaaataaactagaaaatctagaagaaatggataaattcctcgacacatacactctcccaagactaaaccaggaagaagttgaatctctgaatagaccaataacgggctctgaaattgaggcaataattaatagcttaccaaccaaaaaaagtccaggaccagatggattcatagccgaattctaccaaaggtacaaggaggaactggtaccattccttctgaaactattccaatcaataggaaaagagggaatcctccctaactcattttatgaggccagcatcattctgataccaaagccaggcagagacacaaccaaaaaagcaaattttagaccaatatccttgatgaacattgatgcaaaaatcctcaataaaatactggcaaaacgaatccagcagcacatcaaaaagcttatccaccatgatcaacatataaacaaagccaaagacaaaaaccacatgattatctcaatagatgcagaaaaagcctttgacaaaattcaacaacccttcatgctaaaaactctcaataaattaggtattgatgggacgtatttcaaaataataagagctatctatgacaaacccacagccaatatcatactgaatgggcaaaaactggaagcattccctttgaaaactggcacaagacagggatgccctctctcaccactcctattcaacatagtgttggaagttctggccagggcaattaggcaggagaaggaaataaagggtattcaattaggaaaagaggaagtcaaattgtccctgtttgcagatgacatgattgtatatctagaaaaccccattgtctcagcccaaaatctccttaagctgataagcaacttcagcaaagtctcaggatacaaaatcaatgtacaaaaatcacaagcattcttatacaccaacaacagacaaacagagagccaaatcatgagtgaactcccattcacaattgcttcaaagagaataaaatacctaggaatccaacttacaagggatgtgaaggacctcttcaaggagaactacaaaccactgctcaaggaaataaaagaggatacaaacaaatggaagaacattccatgctcatgggtaggaagaatcaatatcgtgaaaatggccatactgcccaaggtaatttatagattcaatgccatccccatcaagctactaattactttcttcacagaattggaaaaaactactttgaagttcatatggaaccaaaaaagagcccgcatcgccaagtcaatccctaagccaaaagaacaaagctggaggcatcacactacctgacttcaaactatactacaaggctacagtaaccaaaacagcatggtactggtaccaaagacagagatatagatcaatgggacagaacagagccctcagaaataatgccgcatatctacaactatctgatctttgacaaacctgagaaaaacaagcaatggggaaaggattccctgtttaataaatggtgctgggaaaactggctagccatatgtaggagaaagctgaaactggatcccttccttacaccttatacaaaaattaattcaagatggattaaagacttaaatgttagacctaaaaccataaaaaccctagaagaaaacctaggcaataccattcaggacataggcatgggcaaggacttcatgtctacaacaccaaaagcaatggcaacaaaagccaaaattgacaaatgggatctaattaaactaaagagcttctgcacagcaaaagaaactaccatcacagtgaacaggcaacctacagaatgggagaaaatttttacaatctacccatctgacaaagggctaatatccagaatctacaaagaactcaaacaaatttacaagaaaagaacaaacaaccccatcaacaagtgggtgaaggatatgaacagacacttctcaaaagaagacatttatacagccaaaaggcacatgaaaaaatgctcatcatcactggccatcagagaaatgcaaatcaaaaccacattgagataccatctcataccagttagaatggcgatcattaaaaagtcaggaaacaacaggtgctggagaggatgtggagaaataggaacacttttacactgttggtggaactgtaaactagttcaaccattgtggaagtcagtgtggcgattcctcagggatctagaactagaaataccatttgacccagccatcccattactgggtatatacccaaaggactataaatcatgctgctataaagacacatgcacacgtatgtttattgcagcactattcacaatagcaaaggcttggaaccaagccaaatgtccaacaatgataaactggattaagaaaatgtggcgcatatacaccatggaatactatgcggccataaaaaatgatgagttcatgtcctttgtagggacatggatgaaattggaaatcatcattctcagtaaactatcgcaagaacaaaaaaccaaacactgcatattgtcactcatagaccgtcttgaccagcgcaacttcctcctaggttccagcggggcctttccactgtcccatgacctggctgagcgggaccaggcctctgggacaggcaaggcctctcctcacaggcaactcaacccttcacatccagcccagccctcggtggactccggaccgctgaccgccaatcacaacacagcctctgctactttcagcctgccctgcctttgggctaaggctcccccagctggccacctggaacatggcacctttcgagtgaaaagttttctgggccacagtcctgccatcaatcaataa

SEQ ID NO: 123257 - DNA, 5122 bp, Homo sapiens
aaagaaggccattacataatggtaaaaggatcaattcaacaagaagagctaactatcctaaatatatatgcacccaatacaggagcacccagattcataaagcaagtcctgagtgacctacaaagagacttagaatcccacacattaataatgggagactttaacaccccactgtcaacattagacagatcaacgagacagaaagtcaacaaggatacccaggaattgaactcagctctgcaccaagcagacctaatagacatctacagaactctccaccccaaatcaacagaatatacatttttttcagcacccacaccacacctattccaaaattgaccacatacttggaagtaaagcactcctcagcaaatgtaaaagaacagaaattataacaaactgtctctcagaccacagtgcaatcaaactagaactcaggattaggaaactcaactcaaaaccagctcagctacatggaaagtgaacaacctgcctcctggaatgacctactgggtaccataacggaaatgaaggccagaaattaaagatgttctttgaaacccaatgggaaccaaggacacagcataccagaatctctggggacacatttaaagcagggtgtagagggaaatttattgcactaaatgcccacaagaggaaagcaggaaaagatccaaaattgacacccctaacatcacaattaaaaaaaactagagaagcaagagcaaacaacattcaaaagctagcagaaggcaagaaataacttaaaatcagagcagaactgaaggaaatagagacacaaaaaaacccctccttcaacccttcaaaaaaattaatgaatcccaggagctgggttttttgaaaggatcaacaaaattgatagaccgcttagcaaggacttaataaagaaaaaaagagagaagaatcaaatagacacaataaaaaaatgataaagggaatatcaccaaccgatcccacagaaatacaaaactaccatcagagaatactataaacacctctacgcaaataaactagaaaatctaggagaaataaggattaattcctcgacacatacactctcccaagactaaaccaggaagaagttgaatctctgaacagaccaataacaggagctgaaattgtggcaataatcaatagcttaccacaccatgcacagtccaggaccagatggattcactgccgaattctaccagaggtacaaggaggaactggtaccattccttctgagactattccagtcaatagaagggagcgggaatcctccactaactcattttatgagggccagcatcattctgataccaaagccaggcagagacacaacaaaaaaaagagaattttagaccaatatccctgatgaacattggacggcaaaaatcccttaataaaaatactgacaaaactgaatcccagcagcacatcaaaaaagcttatcccaccatgattaaagtgggcttccatccccctgggatgcaagactggttccaacatacacaaatcaataaatcctaattcagcatataaacagaaccaaagacaaaaaccacatgattatctcaatagatgcagaaaaggtctttgacaaaattgaacagcccttcatgctaaaaactctcaataaattaggtactgatgggacatatatttcaaaataataagagctatcctatgacaaaaccccacagccaatatcatactgaatggggccaaaaactggaagcattcccctttgaaaaactggcacaagaacagggatgcccctctctcacccactccctattcaacataggtgtttgggaagttctgggccaggggcaattaggcaggagaaggaaatacagggtattctattaggaaaagaggaagtcaaatcctccctgctttgcagataaacatgattgtatatctaggaaatcccatcgttctcagcccaaaatctccttaagctgataaggaacttcagcaaagtctcaggatacaaaatcaatgtgcaaaaatcacaagcattcttatataccaataacagacaaacagagagccaaatcatgggtgtgagtgaactcatgagtgaactcccagttcacaattgcttcaaagagaataaaatacctaggaatccaacttacaagggatgtgaaggacctcttcaaggagaactacaaaccactgctcaaccgaaataaaagaggacacaaacaaatggaagaacattttcattccatgcttatgggtaggaagaatcagttatcatgaaaatggccatattgcccaaggtaatttacagattcaatgccatccccatcaagctaaccaatgactttcttcacagaattggaaaaaaactactttaaaggttcatatggaaccaaacaagagcctggtttcgccaagtcaatcctaagcccaaaagaacaaagttggaggcatcacgctacctgacttcaaactatactacaaggctacagtaaccaaaacagcatggtactggtaccaaaacagagatatagatcaatggaacagaacagatccctcagaaataatgccacattatctacaactatctgatctttgacaaacctgagaaaaacaggcaatggggaaaaggattccctatttaataaatgggtgctgggaaaactgggctagccatatgtagaaagctgaaactggatcccttccttacaccttatacaaaaattaattcaagatggatgaaagacttaaatgttagacctaaaaccataaaaatcctagaagaaaacctaggcatttaccattcaggacataggcatgggcaaggacttcatgtccaaaacaccaaaagcaatggcaacaaaggacaaaattgacaaatgggatctaattaaactaaaagagtttctgcacatctgcacagcaaaagaaactaccatcagagtgaacaggcaacctacaaaatgggagaaaattttcacaacctactcatctgacaaagggctaatatccagaatctacaatgaactcaaacaaatttacaagaaaaaaatcaaacaaccccatcaaaaagtggacgaaggcacatgaacagacacttctcaaaagaagacatttatgcagccaaaaaacacatgaaaaaaatgctcatcatcactggccatcagagaaatgcaaatcaaaaccacaatgagataccatctctcaccagttagaatggcgatcattaaaaagtcaggaaacaacaggtgctggagaggatgtggagaaataggaacacttttacactgttggtgggactgtaaactagttcaaccattgtggaagtcagtgtggcgattcctcagggatctagaactagaaataccatttgacccagccatcccattactgggtatatacccaaagaactctaaatcatgctgctataaagacacctgcacacgtatgtttattgcggcattattcacaatagcaaagacttggaaccaacccaaatgcccaacaatgatagactggattaagcaaatgtggcacatatacaccatggaatactatgcagccataaaaaatgatgagttcatgtcctttgtagggacatggatgaaattggaaagcaacattctcagtaaactatcgcaagaacaaaaaaccaaacaccgcatattctcactcataggtgggaattgaacaatgagatcacatggacacaggaaggggaatatcacactctggggactgtgtaacaagttttgtgcagattgccagtctaaaggtagcgcatcccacctggcgggccaggggtccagccgcgccggggtggtgggggtgggctgcgtgatgagccagatctgcctcagctgtggccatccgtcagcgtaaggttgctctggtggtcgtcttcagtttgtccagctcttccccttatcccccatcctccctgctgaggtgtgtgggcgcacagcgcgggactggcgggcagctccacctgcagccccagtgcgagatccactggatgaagccagctgggctcctgagtctggtggggccttggagaacctttatgtctagctcagggattgtaaatacaccagtcggcactctgtgaatctgggggtgcacatatccagggtaaagtcagttaacctcgaccagtggactcaagaacagattcaggtacttagcccaagagtgagtcagctgcttccatatatctatgtaaaaggaattccagatgaatttgtttttgagaaggtgaaaatggtaagttgggaagtatttgcactgtatggacagcctcaggtatgtgtatatttgtgaaagggaatggatttgttgggccttggtaagagttggacttttcagcttccatgttcttacaaattttgataaattctcagtgaccctggtctgttggcctctgttccatccccttcttcttccggttccagaaaggtgagtcttgtgggctcctcaggattaaagaacattctgaaatgggtgattttgatatcttaatcggagccagggagcaaatcagaagaaataggcaagaaacagctctctaaagactccattctttcactgtatggatcccagacgcctcaaatgcctactcaaggtagatttcatgggtgtcatggccatgtgccaggtagagacatgagggcttccatgcaggaattacctcctaacagcataatggggagcatgatgcctccaccagtaggcatggttgctcagccaggagcttctgggatggttgcccccatggccatgcctgcaggctatatgggtggcatgcaggcatcaatgatgggtgtgccgaatggaatgatgaccacccagcaggctggctacatggcaggcatggcagctatgccccagactgtgtatggggtccagccagctcagcagctgcaatggaaccttactcaggtaagctaccccattttacttgcagcaagagttttgagccttcctcaagtttttctcggtttgtcaatgagtggcggaaatggacaggcagcaaatcagactctcagtcctcagatgtggaaataaaaacaaaacacctgtatggctgccattctcttcagccctcgctctcccctttccacagcctcca

SEQ ID NO: 123258 - DNA, 1680 bp, Homo sapiens
ttacccctgtgtctcttcccagtctgccagcgtatatagcgttgccccagctgctgacatctccataaacgcgtgcgcactgtcctggggctggatattcacgccacgacaaccatcggtaatcacgtttaccttataacctaactgtaacgcgtccagcacggtaaacttcacgcaatagtcagtagccaggcccataacgatcaattcatcgatttcatgatcgcgtaaccagtcatcgagagaggttttctgccgacggccgttatcaaaaaaggcactgtaactgtcaactaaaggattttcgcctttatggaacaccgctgcgatcgctttttggtgcagtaacggatgtaattgtgcgccttcactgttctgcacacagtgatctggccagaaggtttgtggcaaaccgtcgagttggcctggcgtataaggctctacaccgtgctgactggcaaaactgccgtgattcgccgggtgccagtcctgactggcgataaccgcttcaccgcgcgactggcaccagtcaatcaggcggttagcgacatccaccgtactgtcaccttccggcacggcgagcgcgccaccagcacagaaatcattttgtgcggacccagtgcgcttgtatcgacattcaggagctgccgcgtcctggcgggagtgctcaagcaggttctgcaaataatgcagcgtgactgcagggaccagcggcgcgatagccgtgagatcgtttttcgccagcagttgacgtacccgggaagcggatatcggcatctcctggtaacgcagccgctcaatttcaaccagttcgatgggcggtgcggagatagtcggcgtttccagccagtagcgcatatcctggttgtactgggcggtaacgcgacaaaagggttcagtaccgacaaagcggtgagttacacccagcgcgggagcgaggtactgacggaaaatcttcagatcaatttcggtgtaacaatggttaatgacgctccaatccaggccgtcttcataggggaacgtgatatccagtcctggcggcagttgcgaaagctggctaccggggacaatgatcatttttagccccagttcccgggcgcgctgcactttaccaaaaagcagccccgccacctggcgatcggcaaacgcctcgcgcaggctgtcaataagctgttgctgggcctgagactccccctgcaccatcgccagcacgcgatcatactctttcatctgcaacagaccattgagcgtcgacatccaattgagatgctcgtgtcgcaatgtacgaaggctctcaacgtattgttttatttgcgtcagttgcgcattgagggtggaaatttcgtctttactacgaaagctgataatggcccccagcaaatcatcacctgaacgaatagcttcccggttggcaataacgctcagaccgttaaagttcgccaccacatcctgacgtttttcatcaatctgttcggtaaagaaatcggcgggcctgaccacttcaacaatgggtttacccaaccattgccgtccgggggaactcagccccagcatctttcttgcgttacgattgatggcggtaatgtaaccatgcggatccaccgcaatcagcccttcataaaccgaactaaacagcgcctcttgctgacggaccacgcgtgcgatttgctttggctccat

SEQ ID NO: 123259 - DNA, 2601 bp, Homo sapiens
atgaacggtcctggtcgcaacttttatttagcacggagcagttctggcagcagctgccggggactggatcgggacgcgccagacagaacatatcgcgcaaaacgccgcgcgaacacgccggtggttaccgccgcgacaacggcaataattgggccgtgccccatatccagtgcaaccttgtgccccgatgatagaaaagaccaccagtccgagcgcatcgagcaccagaaacactttgcgcaagtaaagcattacaagagcaacgatattgggtttttgagttactccggtaatgtcgtcttagcaaagctggtaagcaatggatggtcaaataatttcctcaatgccgtctttacctcggcattaatgtttggttatttcatcggctcacttactgagctgaacggcgatctaaagaatgtgagcagtcacttaccttcaccgttagccaaacctgcgggtgaaccactagcggtaaacgttaaggttgatggcaatctcaacagctttgaattaaccggacaggctggtgcggataatcatttcaatagccgctggttgctcggtcaaaagctgacgctcgatcgtgctatttgggcggcagacagtaaaacgctcccgccgttgccggaacaaagtggcgttgaactcaatatgccgccgatgaatggtgccgagtggctggccctgttccagaaaggcgctgcggagagtgtcggtggtgcagcgagtttcccacaacacataacgttacgtacgcctatgttgtcactgggaaatcagcaatggaataacctgagtattgtttcgcaaccgacggcaaatggcaccctggttgaagcgcaagggcgtgaaatcaacgccacgctagcgatgcgtaataacgcgccgtggctggcgatatcaaatatctttattacaacccgagcgtggcgaaaactcgtgaccacctctctaccggtactcgaccgcgaggtgctggacgaactgcgcgagatcgcaggcacggaaacggcgaccatcatcgacgtattcctcgatgacaccaccccgctcgtgcgccaactgcaggaggccgccgtcgtacccgacctggagcagcttcgcgaactggcgcacagcctcaaatcggccagcgccaacgtcggcgcccttgccctgtcggccgcggcacgccgcgtggaactggccgcccgtgccggcaggatcgagcgccccgcggtgatggtcgcgctgatcatcgccgacattggtgtcgtagtagtaggccccaacaatggaccaacgatcggcaattggccagctggcgacagcacctacctgcgaaataccattcttatattgctcagcagtggaatagtacttaggcagcgtagcctgaatatattccgggctggcgtaacggtaattcagctgtaccagacggtcttcatcccgacggtattcaatgctggagttactggtcgctacgttatccagacgtgtatcgtactgaatcccgccacgcaatccccaacgctcggagatacgccattaaatagcttgcaaaatacgtggccgtactggcgagcgaacaagttatggacggctgctgctggcgctgcgataccaaagttgagcggaaagagatcccgcagtggtttatcaaaatcactggttacgctgacgagctggtcaacgagctggatggactggatcactgggactcgtgagcagacggccccctcccaggagctgccccggcgcgtggagcgcgagctcgtggccttcctggtggcctgctgggccgtgagctgcgccctggcggtcgtgagtaacgccgccggccccctggctgacgcccgctacgggctgacccccgccatcctgcccaaggacgccgtcatttaccccgtcgagcagctcctgatgtgcatgccggcgctcctgcagctggtcctggccgacggcctgcgccgggggcgtcgctcggcggtctgcggcaccatcgccctgcagatcttcctgggggcgtgcgcggccctgttcgccctggtggagaagatcggcgagcacccttctaagctcgcatgcctcgtgagcgaaggcaaaccggatagcatcccggcggcggaaaaatttgctgctgaaaataaaaatacttatggtgcgctggcttctttggaacttgcgcagcaatttgttgacaaaaatgaactagagaaagctgccgcccagttacaacaggggctggcagacacgagcgatgaaaatctcaaagccgtgataaatctgcgtcttgctcgcgttcaggtacagctcaagcaggctgatgccgcgctgaaaacccttgataccatcaaaggtgaagggtgggctgccattgttgccgacctgcgtggtgaagcattgctgagcaaaggtgataagcaaggactgctttccgttacccttttaagcggctgttcgctgtttaacagcgaagaagatgtggtaaagatgtccccattgccaaccgttgaaaaccagtttacgccgaccacggcgtggagcacttccgttggtagcggcattggcaacttctattccaatcttcatccggcactggcgggcaatgattga

SEQ ID NO: 123260 - DNA, 4512 bp, Homo sapiens
  misc_feature (1)...(4512): n = a,t,c or g
atgaaatccattacgcgtttcatagcgttgcggcacgcacttgcttcatcggcaccagatgcggattactgtaatcaccggtcatgggttttccagtgcttcaacaatgcgggcaacaggatgtatatccaccgcatcggcagccacccggcaagctgccttgcatggaagagagcaccgcagaacgccgcgtggggtaccaccattggcaaaatgtgtttatgctcaccaaactgttggcgcttgcattccccagcctgtcatcagcatgatggtattttggtggaaaatagccgccagctcgcggattttccgtgcgccaacaccacaaatctctgctgcccattcggcggtttgcgctattccgtaatggaccgagacacgaccactcgaggctctaccattgtgcgcaaaggggggggcaaagaaacttctcaactgaacaaactggatgacccagactgttctaccagggaggcgaacaaggacccacaaacaagcctcacccggggggtcccagggggcagacccaccggggaggcccccaccaaaaaagaaggttgcgagttgaaacctacacgaaaaatccgaacccttttctgcggtccccgcaacggtcttcaaggaaattaccacccgggaaacccatcatgggaccgctctgttttgcacatgggaaatccggggggaattccggttcttacccccgttaaccaactttggaaaaccgtggccaatcaatttcaggccgaagatcgtcgacgttttgtcgtcaaaattttatcgcctggaaacgttgacaagccgatcaaatcctcgaagacatcgaatttgcgttgccagctggtaaatgatgaagttccggtcgcagcacctgtggcctttacgggtcagactttatggaatcatcagggattttatttcgctgtttgtccaagcgtcggtggtcgccagttcgaagctgataatatcgatcagatggaagcggttgggcgttatttagggcgtatgcaccagacggggcgcaaacagctttttatccatcgcccgaccatcggtttgaacgaatatctcattgagccacgcaagctgtttgaggacgctacactgataccttccgggttgaaagcggcattcctgaaagcgacagatgagctgattgccgccgttacagcacactggcgagaagatttcaccgttctgcggctacatggagactgccacgccgggaatattctctggcgcgataaaccaatgtttgtttttctggatgatgcaccccatggtccagccgttcaggatttgtggatgttgctcaatggcgataaagccgagcagcggatgcaactggaaactattattgaagcttatgaagaatttagcgagttcgacaccgctgaaatcggactgattgaacctttacgcgccatgcgtttggtttattatcttgcctggctaatgcggcgttggctggagcattgtcagagcgacggagcactagagaaaaaagtgcgacacaaagcgaggacaccacgaccaggaaacacagaagcatccgagagatctggagacaacagcggacacagagaaggacgtcgcgatccacggcgctctgacggacacacacgcgacacaagagacacctgcgagagtaacacagcgcattcgcttacgcaagactgtcacgcgcacgttaagttggtcagaagacgtgaagagcatttcgcagagtgtcaggggacagaacaatccccggggattctctatgaaacacccgatttttcccacgggttttgggcacggattcgtttgctggatatccagcagaagaaagtggagaggcggaccggcgtttatttgccgagttatggcggtgtcgtagcgaactcttatctgccatcaaacgggctttctgcgttggggctgtatgcctgggcgcgggtcgatgaatcttccgataataattcattgcttaatccggcgaagaaattcacttatcaggcaccgcaaaacgttgaggacacttatgtcgtgtttatcatcggtgaaaccacgcgttgggaccatatgggtattttcggctatgagcgtaataccacgccgaaactggcccaggagaaaaatctggcggcgttccgtggttactcctgtgataccgcaaccaaactcgtactgcgttgcatgtttgtacgtcaggggggcgcggaagataatccgcagcgcacattaaaagaacagancattaaaaaggttctgaagctgtttggattcagccccgccctctacgctatgcagagcgaaatgtggttctacagcaacacgatggcggacaacattgcttatcgtgagcagattggtgcggagccacgtaatcgtggcaagccggtagatgatatgttgctggacgttgaccacgtttatcggcaatcctgctggccacatgagatttttgcttatcgagcattatttcccggcgtcgggttaagttggtttcccacgacggcgacaatgcttttccggatcgatttgcacatgcgggttaccgaggcgatccattgcatggaagatggacccgttattgcgccgcgatgccgcgccaggaatcacaatatccgccagttctgcaacgcgcggatcgtgatagtgattgagttcaatgatcactttcttcgcccgcagcagccagactcgaccatccggtgccagtgccgatgcttcaatgacggcaacatcaatgtcgccgaagaaaccgtaattgaccatttgcgccacttcgctcaaatgcaggtcaacgaaactcaccgcgccctgattgatctttttacttataatcaggagaaccgatctcattcatctccgatcggggaacgagaggaacccagtacaggtacaggcaacggccgtcaaaagaatctcccggtaagtagggccataaccgccgccaccccgggcccatcccggcatcgcgtgccgccaatcaacaccgtcaaacttggaggtcgtgaccgcgaccagcgttgccagcataaaaatggacagttccgacgaggatcaccggtcggcggcccacgcggtcggaaatcgggccataaaacagctgtgagacaccgaccttcgaaagaagcggaatcccagtctatgtttggatgcgacctgcagaagcagcagtacctcagacttagcgtcgtcactaaaaagcaccatgatctccgagacgacaaggagatcagcacgagtgtgtgtcagaagacacaacaatcatatagaatgtgcccgaacactacactcacatgcagagtaccaagcaccagtagacagctagacaccgatcgagacctagagaccgtgtcggagacaacgatggacactatggacactgtgaagcggcgtaacttctaccggaaccactatggggtgcctacgatcgaagaaatccgccgtgcggtgaaaagtcagagtggtttctccgctgcaagactttcggaacgtcacacaacgcgaatcgacgtgcggaatggtatccgcaaccgagaaggcagagcccggacaaacccgaaaatatgtcgctccatggccatctgggagccatcatttgggcaccgaacatggaaccagttcttgtcaagctttacgaaattccggatgtcgggcacccaagatggcaaacaggtgccagcacaatgcgatttcaggacacgaaatcgtgtcgctgacgtcatgctgtgcgaattcaggtccccctctcgcaccacactacatcgagcgacggcgagcaacacaaccgtggatctagcacgaagagtcactgccacatcagactcactcaccagctactcgacttgcacactcgccccgagcgaacacactcaccatgagcaccaataccacaagttccccaagtcaaccagactgactctcctttctccaattaaccgccacgaatcgtcgaaaaatccggagtgtccgcacaggcacatggagagaacatctagggtttcaaagcagatcttccattccgccttctttttctacactggaatggggaccgcactccacctcgagcactggactcagagagccaactggagactcagccttcgagatggcaccgcgacacaagagtgggaccatctgactcggacaagaagcacggctgggatcgggactacggcactcagaatgcacctcaatatgcgcaccggtactagaacagggagtcccactgtgagtaaagcaccggagcaccggggtggccctggacagtccggaacgagccgagaaccagggctacccccagcgcacaaggaccgaggacgtgtggtcgagtggaacgaactacacgtcgtagccagcagaccacaacaggaacctacccggacacaagctcgcggtcgtactcgcactgcccgggacttcgaggtccctggagctggagaacgaaggaacccaaccgtccaaacactgggggaattggaaaagttggccacttcggaatctcgaaagtccctgtga

SEQ ID NO: 123261 - DNA, 510 bp, Homo sapiens
atgtgttttgtttattatgagaaaaatctggcggcgttccgtggttactcctgtgataccgcaaccaaactctcaatgcgttgcatgtttgtacgtcaggggggcgcggaagataatccgcagcgcacattaaaagaacagaacattttcgcggttctgaagcagttaggattcagttctgacctctacgctatgcagagcgaaatgtggttctacagcaacacgatggcggacaacattgcttatcgtgagcagattggtgcaagcgaaatgtggttctacagcaacacgatggcggacaacattgcttatcgtgagcagattggtgcggagccacgtaatcgtggcaagccggtagatgatatgttgctggtagacgaaatgcagcaatcgatagggcgcaacccggatggccctaatcattattcggaaggctactttaggttgaaggacacttcaatatcaagagaactatctaaccaacaaaaattggtttccaacatgatctag

SEQ ID NO: 123262 - DNA, 3676 bp, Homo sapiens
atggaacaatatgatcaaattggcgcaagactggaccgcttgcctttggcccggtttcattatcgtatatttggtattataagctttagtctgttattaacagggtttttgagttactccggtaatgtcgtcttagctaagctggtaagcaatggatggtcaaataatttcctcaatgccgcctttacctcggcattaatgtttggttatttcatcggctcacttactggtgggtttattggtgactactttgggcggcgcagggcgtttcgcataaatcttctcatcgtcggtattgctgcaacaggggccgcttttgtccctgatatgtactggctcatcttctttcgcttcctgatgggaacaggaatgggggcgctgattatggttggctatgcctcatttacggagtttatccccgcgacggtgcgtggaaaatggtccgcgcggctctcatttgttggtaactggtcgcccatgctgtctgcggcgataggcgtggtggttatcgctttttttagttggcgaataatgtttctgctgggtggtattggcatactgttagcctggtttctctcaggtaaatactttatcgagtcgccacgatggctggcagggaaagggcaaatcgcaggtgcagaatgccaacttcgtgaagtagagcagcaaattgaaagagagaagagtattcgtttacccccgcttacttcgtatcagagcaacagcaaggttaaagtaatcaagggtactttctggctcctgtttaaaggtgaaatgttacgacgtacattagtcgcgattactgttttaattgcaatgaacatttcgctttataccatcaccgtatggataccgaccatatttgttaactccggcattgatgtcgataaatcaatattaatgaccgctgttattatgattggcgctccggtaggaatatttattgcggcattaattattgatcattttcctcgtcggttatttggctccaccttacttattattattgccgtgttaggctatatctattcaattcagactacagagtgggcgattttaatctatggactggtgatgatcttctttttatacatgtatgtttgcttcgcgtcggcggtttatatcccggagctttggccaacgcatttacgcctgcgcggttcgggtttcgttaatgccgtcggacggatcgtcgcagtcttcacgccctatggcgttgcggcattattaacacattatgggtcgatcacggtgtttatggtacttggtgttatgttattgctctgtgcgctggttctctccatttttggcatcgaacacgcggacaggtgtcgttggacagagatttctgaggtgaatcaaatctttcgttgatggccatcaattgccagatgtgccactgacgtgtcctatttggcctacaatgccagtacacgcaatgtaggacaccgtcaacacttacccctgtgtctcttcccagtctgccagcgtatatagcgttgccccagctgctgacatctccataaacgcgtgcgcactgtcctggcgctggatattcacgccacggcgcgcatcggtaatcacgtttaccttataacctaactgtaacgcgtccagcacggtaaacttcacccaatagtcagtagccaggcccatatcgatcaattcatcgatttcatgatcgcgtaaccagtaatcgagagaggttttctgccgacggccgttctcaaaaaaggcactgtaactgtcaactaaaggattttcgcctttatggaacaccgctgcgatcgctttttggtgcaataacggatgaaattgtgcgccttcactgttctgcacacagtgatctggccagaaggtttgtggcaaaccgtcgagttggcctggcgtataaggctctacaccgtgctgactggcaaaactgccgtgattcgccgggtgccagtcctgactggcgataaccgcttcaccgcgcgactggcaccagtcaatcaggcggttagcgacatccaccgtactgtcaccttccggcacggggagcgcgccaccagcacagaaatcattttgtaaatcgaccagtaacagggcgcgagggggcattacagtctccgggggcataacacccatgttcactgtacgggcatcatcgggtccgttgacacacaatacgggaacgcggggctgtaaaccgaggaggtggttgagggcgtacacagcaaagaggggagaaagataccggtgggcgaaaaggcacgaagaaaaccggaaaagcatagctggtccggcgatgtactcagttgttgttttcgttaattccaccatcggtgaagtatagccaagacaacccatgatggtatcgtacagctctacgtgacggcgtggcactttcatgtcggcttcttttttcagctgcgcaaacgcctgcgcattggccggattttccagatatttatctgacatccagaccatcatcggtacgcggaactgctccggcggtgccagttcacgcggcgtgccgtgcaggtgctcgcgttcattaattgactcaccgtggtcagctgcgtagaacacaatcgctttcttatcgcgaacctgatcaatcacgctggagataaagtgatccacataggtcaccgagttgtcataggagttgatcatctgcgctttggtacagccgctatcaacaccaatacattccggcttccactgcgcgaagctacgcggataacgctgggtgtagttaaaatgcgaacctttggtatgcagaatgatcagatgcttaccatccgggttgcgccctagcgattgctgcatttcgtctaccagcaacatatcatctaccggcttgccacgattacgtggctccgcaccaatctgctcacgataagcaatgttgtccgccatcgtgttgctgtagaaccacatttcgctctgcatagcgtagaggtcagaactgaatcctaactgcttcagaaccgcgaaaatgttctgttcttttaatgtgcgctgcggattatcttccgcgcccccctgacgtacaaacatgcaacgcagtgagagtttggttgcggtatcacaggagtaaccacggaacgccgccagatttttctcctgggccagtttcggcgtggtattacgctcatagccgaaaatacccatatggtcccaacgcgtggtttcaccgatgataaacacgacataagtgtcatcaacgttttgcggtgcctgataagtgaatttcttcgccggattaagcaatgaattattatcggaagattcatcgactcgcgcccagggcatacagccccaacgcagaaagcccagtttgatggccagataagagttcgctacgaacaccggcataactcggccaatcaacgccggtcgccctctccactttcttctgctggatatccagcaaacgaatcggtgcccaaaccataatacccgccagtacgacgaccgccaggctgcgaatacgctgccctggggttcgcagttgtcggagcaaggtgtagcgacagcggttattccagataaggataagaggcaatgcactaacggcgattaaccagagaataaagttcagaccaacaacttcttttgacaggtcgatatcggtggtcatgacggaagcgatgatgccataaccaatgaccacattaaggaaggtcat

SEQ ID NO: 123263 - DNA, 2655 bp, Homo sapiens
atgttaacccgcgccctgcgagaacgctcaacggtggggattattctggttaccggacgcagcgatcggattgaccgtattgttgggctggaaatgggcgcagacgattacgtcaccaaaccgctggaactgcgcgaactggtagtacgggtgaaaaatctgctctggcgaatcgacctcgcgcgacaagctcaaccgcacactcaggacaactgctatcgctttgccggttattgcctgaatgtgtcgcgccatacgctggagcgggatggcgagccgattaaactgacccgcgcagagtatgaaatgttggtggcatttgtgacgaatccgggcgaaattctcagccgtgaacgtctgctacgtatgctttctgcgcgtcgggtggaaaaccctgacctgcgcaccgtcgatgtgttaattcgtcgtttacgtcataaactcagcgcggatttactggtgacgcaacatgccgggtacctgtgtgaagtaaaggacccggagcggggtcaggggacggtccaatatatggcctcgttgggcgcgccaatgccgatgctggcagcgattattgcggtagttatggaagtgcccgccgcgatattaatcgtgcttggctttttcacccgtccgctggcggtgctgtttattttctacacgctggaagaaatcaaacgcatatcctttatcaaacgcagggtcggaaacaaagatgaaataacacggtgcaggtggcgtcgtttccatgatgatggcataaccttcctgcggctgctcgatgcgggcctgaccattccatccggcaaaaccattgttcacccactggcgcggcaacggcgcgggctggttaaaatccagttcctgcgtgatagacaccgctgcgatgttcatacaccagacacaaactatcatcgctgtgcgagacacattgccactcgcccagccagccatcgccgtgtagatagtgcgcatcccactcaacattcggttgcagttgatactcacgcccctgccagacaaaacgattgccgatcacccggtttgcaaatggcaccagcggaaaacatgaggcatcggttgacacaccgatttttttaccaggacgtaagagcggcgtcgtatcgcgccagaagccttcgattacgccgacctgggctgacgttctcgtgtatctgtctgctcggcggcgtggtgatgttgtatgtgaatcctagtgtgattggcgcgttcacgatgattacaaccgtttccgcgattctgtttatgttcgtctggacgattatcctttgctcgtaccttgtgtatcgcaaacagcgtcctcatctacatgagaagtcgatctacaagatgccgctcggcaagctgatgtgctgggtatgtatggcgttctttgtgttcgtggtcgtgttgctgacactggaagatgacactcgccaggcgctgctggttaccccgctgtggtttatcgcgctggggttgggctggctgtttattggtggtgcaggcttctggcggcggtgtgacgttattggtggtgtgtttaatcacttccagcagttcgcccgcttcatcgtgctcgctttccattacgctgattggccccattgcctggctgcccatgccttgtttgatcatcgggaagaggatctgctcttctttcatcatgtggctggaaagctcttcatgcagcatggtcaggccatcttccagacgcgttacgctcacgttacccgcattgtaagaacctacaaagacaaactgcccctggtgatcggtggaaatatgcgtcggactacccggcagcgcagactctgcggcaaaggtcagtgcgccatcgtccggggcgatacgatacgccaggacgcgaaactcagggcgaacaccaacatagagataacgtttgtccgggctgaccaccatcggctgcacctgccccggcacatcgacaacctgtgtcagcgtcagtgcgccttcatgattcagattccagaccattttggtaagcatgtcgaacatgaactgggactggagtgtgaatggtcctggcacgatcaggttgatattgcacgcggcggcaacagcaaagtaaacgttgacgaaatggtgaggcaacagttgtttgcttctaaaatggcggagaacatggcgaggcttgctgccttacttcattacttcagcggtgatggaggcgatatatctgttaccggtgcgttcaccgaatacgtgcgcaacaaccgtcttccggagcctgtcatacgcgtaaaacagccagcgctggcgcgatttagccccgacgtatccccactgttcgtccatttccgcgcagacgatgacgtcactgcccggctgtatgcgcgaggttaccgactgcggcctgagttttttaaatggcggaaaatcgtgttgaggccaacgcccataatgcgggctgttgcccggcatccaacgccattcatggccatatcaatgattttctgcaacaaacgggaccgaggcaacgacgggtactactggcaccacaacgaccactaccggcgcaaccacgactgctactaccactggtggcgtggctgctggcgctgtcggcacggcgacagttgtcggtgtggcaacggctgttggtgtggcgacgttggcagttgttgcagcaaatga

SEQ ID NO: 123264 - DNA, 785 bp, Homo sapiens
agagcggcaaaacgtttgatgcgaaactgttgatagatgagaacatcgcgcttaaatcactgtaaccaggataattagcgaatatctcaatgcctggggcgtggcgaggtgcaagagtgtgtattacgtttaaatcacattatcttgcaaagggattggttatgaacacactacgttattttgattttggagctgcccgccccgttttgttattaattgcccgtatcgccgtggtcttaattttcattatttttggttttcccaaaatgatgggctttgacggtacggtccaatatatggcctcgttgggcgcgccaatgccgatgctggcagcgattattgcggtagttatggaagtgcccgccgcgatattaatcgtgcttggctttttcacccgtccgctggcggtgctgtttattttctacacgctgggtacggcggtgattggtcaccattactgggatatgaccggcgatgcggttgggccaaatatgattaatttctggaagaatcgcaatgagatcacccccttccgggcgatgatgatcatccggcgcatggctcatcggttccagacagaagaaatcaaacgcatatcctttatcaaacgcagggtcggaaacaaagatgaaataacacggtgcaggtggcgtcgtttccatgatgatggcataaccttcctgcggctgctcgatgcgggcctgaccattccatccggcaaaaccattgttcacccactggcgcggcaacggcgcgggctggttaaaatccagttcctgcggtag

SEQ ID NO: 123265 - DNA, 1968 bp, Homo sapiens
atgaacaattcccagggaatccccacaggaaggaggaaccactctcaaactgaaattattgaagagaaccatcatgctgctcatgactggaatacagaggagctgtgtggggagcgcggaaaaacaccgggatcccagcgcgaggagctggccgaggtggatgtggactggctgatcgccgagcgccccggcaagcatccacgcaagaacaaaacggccatcaacatcgaatacatgaaagccagcatccgggccagggtggagcacccatttcgcatcatcaagcgacagttcggcttcgtgaaagccagatacaaggggttgctgaaaaacgataaccaactggcgatgttattcacgctggccaacctgtttcgggcggaccaaatgatacgactggcacaggcagatgacgccgccccggcagcgggcagtacactggacaaaatcgccaaaaacggtgtgattgtcgtcggtcaccgtgaatcttcagtgcctttctcttattacgacaatcagcaaaaagtggtgggttactcgcaggattactccaacgccattgttgaagcagtgaaaaagacactcaacaaaccggacttgcaggtaaaactgattccgattacctcacaaaaccgtattccactgctgcaaaacggcactttcgattttgactgtggttctaccaccaacaacgtcgaacgccaaaaacaggcggctttctctgacactattttcgtggtcggtacgcgcctgttgaccaaaaagggtggcgatatcaaagattttgccaacctgaaagacaaagccgtagtcgtcacttccggcactacctctgaagttttgctcaacaaactgaatgaagagcaaaacatgaatatgcgcatcatcagcgccaaagatcacggtgactctttccgcaccctggaaagcggtcgtgccgttgcctttatgctggatgacgctctgctggccggtgaacgtgcgaaagcgaagaaaccagacacctggaacatcgtcggcagccgcagcccaggaggctacgggtgtatttgccgtcaccaggacaaaggctatgacagagtcccgctggtggtgccgttgctgttttatcatggcgaaaactcgccttacccgtactcactcaactggctggatgagtttgacgatccgcaacttgcccggcagttgtacaccgaagcttttctgttggtggatatcaccatcgtacctgacgatgagatcatgcaacatcggcgtatagctctgctggaactgattccaaagcatattcgcgaacgcgatttaatcgggatggtcgacaggatcaacacgcttttgatagcaccatcacacaagacaagacgacgggaccacaaaaacgagcagacacagactacgcaagcagagggaaataacgaagccaaaccgccacaggaaaccaaaacgacagcgaagacgcaaagacctgagccagagacaccgaataggcaaaaccaacaaacagcgaggccgcaaagatcgacgacagcccggaccgagaagagcaacaaccagaagcacaacagcacaaagacgccagcaatgacgacgaacgcacactacagacagaaacgtgtagtgtctgtggaccaggctgcggtacagcaaagtattatcgaagggctggtctgggagcaggcgacacccacaacgattactcatccacagcaacttcacgaagaactggcgcgtattcgccgtcagggctggagctatgacaacggcgaagattacgccgatgtccgtggtgtcgctgcgccggtgtttaacgccaataacgagcttaccgctgcgatctcggtggtcggtacccgcttacaaatcaatgaagaataccgtgattatctggcgggcaaggccattgcctgcgccagggatatttcacgtctgttgggatggaaaagtccctttgacttacaagcctcataa

SEQ ID NO: 123266 - DNA, 1575 bp, Homo sapiens
ttacagggtcacttggttggtgattatgtgtcgctgtcgtgtttgccgtttggaatcatggggcacggcaactggccgctgtgggtgctgacggcatgtttggttttgctgctgtgttgatgagtcttcgccgacagtgaattcagcagtaagcgccgtcagaccagaaaagagattttcttgtcccgcatggagcagattcgatcgatgaatttccgccacctgctggagcagcatcaactggcccgccaattgttcaagaccatcaatcgctggctggccgaagcaggcgtcatgatgactcaaggcaccttggtcgatgccaccatcattgaggcacccagctcgaccaagaacaaagagcagcaacgcgatccggagatgcatcagaccaagaaaggcaatcagtggcagtgcggcgatatgtggtgcaaggtcccacgcgtgctccccttgacgatcccgaaataaggtgtaacaacataagctgctaaaatagggaaagccaaattgaagaagttccaacggagcaactagaggccaaaggaatcggggaccgggaacccgcacacaacgtcgaaaatagggacccaagggccgataacaagcaatgcaatgccactccatagggcctggagacaccgggccaacgcaaacgagaggagcaggatccagtacccatccgaggcatggaacgggaaaaggaccccccagttggcccagggaacaggaatagggagcctcagagcaattagacggcaaacctaggacccagatgcggaatcgtcgaccaaaggtcgtgttcgtgaagaaatgggagaaagtgcgagttagtaagggtcgtaagggtagaaggaggcgagcgtcgcgaagtgtgttatgccgtgggcgcgcgggttgtggggggcccgcggccggccgttgtttggggcttggggggaaaggggggcccgttgtttgttgggccggcgcgttttgggttggtgggtttcccgaagaaggttgaggaaggtttctaaagggccgaagcacgagcgccaggagactgggggaaggaacaggatgatgaacaagtgcaaatgagctacccgcctgtccggctgacgtgctggctgcgcgtgctgagtccccagcatcagccgcatggtttcccgcttcacgggctaatgtgcggcaatcactggctgacttcttcgcggctgccgtgttctgtgccaccgcggacgcgttacgcgccacctcttccaccatcagttcaaaacggcgcagtgcctccggacgggcatcatcctccgtcatggcaccgagaaaatcattcagcgtaccgggttgagaatcttcatacacggtaatggtcccggcatgtgacggcgggaatccttccaccaacagaataacgctgtactgaccgtactcaacgtccatgctgtaacgcccggcttcatccggattttctgaggccagcgtgttcaccaccaccgtggtgctgttacgttttgctttcagctggattgtgcagttctgtaccggttttcctgtgccgtctttcagtacacctgaaatctttactgccat

SEQ ID NO: 123267 - DNA, 595 bp, Homo sapiens
ctttggtcgacgattccgcatctgggtcctaggtttgccgtctaattgctctgaggctccctattcctgttccctgggccaactggggggtccttttcccgttccatgcctcggatgggtactggatcctgctcctctcgtttgcgttggcccggtgtctccaggccctatggagtggcattgcattgcttgttatcggcccttgggtccctattttcgacgttgtgtgcgggttcccggtccccgattcctttggcctctagttgctccgttggaacttcttcaatttggctttccctattttagcagcttatgttgttacaccttatttcgggatcgtcaaggggagcacgcgtgggaccttgcaccacatatcgccgcactgccactgattgcctttcttggtctgatgcatctccggatcgcgttgctgctctttgttcttggtcgagctgggtgcctcaatgatggtggcatcgaccaaggtgccttgagtcatcatgacgcctgcttcggccagccagcgattgatggtcttgaacaattggcgggccagttgatgctgctccagcaggtggcggaaattcatcgatcg

SEQ ID NO: 123268 - DNA, 1611 bp, Homo sapiens
atgagtcatcaacttaccttcgccgacagtgaattcagcagtaagcgccgtcagaccagaaaagagattttcttgtcccgcatggagcagattctgccatggcaaaacatggtggaagtcatcgagccgttttaccccaaggctggtaatggccggcgaccttatccgctggaaaccatgctacgcattcactgcatgcagcattggtacaacctgagcgatggcgcgatggaagatgctctgtacgaaatcgcctccatgcgtctgtttgcccggttatccctggatagcgccttgccggaccgcaccaccatcatgaatttccgccacctgctggagcagcatcaactggcccgccaattgttcaagaccatcaatcgctggctggccgaagcaggcgtcatgatgactcaaggcaccttggtcgatgccaccatcattgaggcacccagctcgaccaagaacaaagagcagcaacgcgatccggagatgcatcagaccaagaaaggcaatcagtggcactttggcatgaaggcccacattggtgtcgatgccaagagtggcctgacccacagcctggtcaccaccgcggccaacgagcatgacctcaatcagctgggtaatctgctgcatggagaggagcaatttgtctcagccgatgccggctaccaaagggcgccacagcgccgaggagcttgccgaggtggatgtggactggctgatcgccgagcgccccggcaaggtaagaaccttgaagcagcatccacgcaagaacaaaccgcccatcaacatcgaatacatgaaagccagcatcccgggccaggggtggagcacccatttcgcatcatcaagcgacagttcggcttcgtgatagccagatacaaggggttgctgaaaaacgataaccaactggcgatgttattcacgctggccaacctgtttcgggcggaccaaatgataccattggcatcaactgttgagtatggtgagacagttgatggtgttgtcctggaaaaagatatccagctggtttatgggaccgccaataatacgaaaatcaatcctggcggagaacagcatataaaagaatttggtgtaagtaataatactgaaattaacggagggtatcagtacattgaaatgaatggcgccgcagaatactcagtattaaatgacggttatcaaattgttcaaatgggtggcgcggcaaaccagactacgctcaataatggtgtgctacagctccacgaccacgctgcttacttagtagacaacctgtgggactgtgcagggactcagctgaaggactgggagggtctgacaagcctgctgctggagaaggaccagagcacgtgccacatggagccagggccagggaccttccacctcctaggggtgccgcgtcctgccctccggtgtgttgtgtggctgggtagttgcgcgtgccgctcgcgacgaggtgccgtggggtgcgtcgacgtggacctctcggtgcgtgtcccgaggctccgcgaccggctccggaaccatcgagctgctcatctcatccccacaaaccgtgctcgtcgagccgacggtgtgcgcgaatttcgaatgcgcggcacccgatga

SEQ ID NO: 123269 - DNA, 894 bp, Homo sapiens
tcacaataaccctgccagcggcgttcgcgtaatgcgctcctcgccgttaatgacttttggaccacggacatgaaccgtgtcgccatcaaaggcttcaacgacggcgtggtcggttaactccacatggttttcaattatcaccgcacctgtaatacggctctcacaaagctggaaaggcctgtggcttgggccctccgtttcctgccgttctttctctcgcttccccgctggatctccccagctcctcctggctttctccttgctgctgctccaatgcaccaagtgcactttagagcactgtagcaggccgtcgaagactgcctctgacagattggtctggcttccacgaaccgaactgtcgcttgatgatccgaaatggtgctccaccctggcccggatgctggcttccatgtattcgatgttgatggccgttttgttcttgcgtggatgctgtttcaaggttcttaccttgccggggcgctcggcgatcagccagtccacatccacctcggccagctcctcgcgctgtggcgccccttggtagccggcatcggctgagacaaattgctcctctccatgcagcagattacccagctgattgaggtcatgctcgttggccgcggtggtgaccaggctgtgggtcaggccactcttggcatcgacaccaatgtgggccttcatgccaaagtgccactgattgcctttcttggtctgatgcatctccggatcgcgttgctgctctttgttcttggtcgagctgggtgcctcaatgatggtggcatcgaccaaggtgccttgagtcatcatgacgcctgcttcggccagccagcgattgatggtcttgaacaattggcgggccagttgatgctgctccagcaggtggcggaaattcat

SEQ ID NO: 123270 - DNA, 1542 bp, Homo sapiens
atgagtcatcaacttaccttcgccgacagtgaattcagcagtaagcgccgtcagaccagaaaagagattttcttgtcccgcatggagcagattctgccatggcaaaacatggtggaagtcatcgagccgttttaccccaaggcgggcaatggccgacggccctatccgctggagaccatgctacgcattcactgcatgcagcattggtacaacctgagcgatggcgcgatggaagatgccctgtacgaaatcgcctccatgcgtctgtttgcccgattatccctggatagcgccttgccggaccgcaccaccatcatgaatttccgccacctgctcgagcagcatcaactggcccgccaattgttcaagaccatcaatcgctggctggccgaagcaggcgtcatgatgacccaaggcaccttggtggatgccaccatcattgaggcacccagctctaccaagaacaaagagcagcaacgcgatccggagatgcatcagaccaagaaaggcaatcagtggcactttggcatgaaggcccacattggtgtcgatgccaagagtggcctgacccacagcctggtcaccaccgcggccaacgagcatgacctcaatcagctggtgcagaatgaattggagacagcagaacgtttcagaagacaagaagacactcaatcaaaatgtctactctcatctataatgttgtatatcaaaaacttaagcggccctgatgtatcagagctcatttcaccactctcagagggctttaatttatgctcgtcagtggtagtggctgttatcgctgctgtgttaagaagggcaccgatacatatgccatccggatggtggcgttcatggaatgcagaatctggcgcttacaatgtcacccgctctggcgacagctatattctggttaacttctataccggagccggaagttgccggaccctgcagatgaaggcgcattacagaaatggtggtctgttctaccgttcttcaagagacggttatggttttgaggaagactgggcagaagtttatacctcgaaaaatcttccaccagaaagctacccagtcggcgcaccaatcccgtggccatcagataccgttccgtctggttatgccctgatgcaggggcaggcttttgacaaatctgcttacccgaaacttgcagccgcttatccgtcaggcgtgatccctgatatgcgtggctggacgattaagggcaaacctgccagtggtcgggccgtattgtctcaggaacaggacggcattaaatcgcatacccacagcgccagcgcatccagtacagatttggggacgaaaaccacatcgtcgtttgattacggcactaaatccacgaataacaccggggcacatacacacagtgtgagcggctctacaaactcggctggagcacacacacactcactagccaacgtgaacacggctagtgctaactccggtgctgctttagagcacagggcgataatcccgaacacatttgatttggatttgaagcattcgaatcaactttgtagatga

SEQ ID NO: 123271 - DNA, 987 bp, Homo sapiens
ttactgctgctggcagtgggagcccaagtgcattggcacatctgagaagcacacagaagcatcccaggattgtcctcgtgcggtcgtgcgatcagagccacggacccgccgtgggcacgggggggtccgaggtcgctttcccccaagggcggggggaaattccctcggtgggggtgaccggcgtaattcgttgttcaaccgaggcaccccgtagggtccggggagtcgtccttcctcccctttttccttgccggggcgctcggcgatcagccagtccacatccacctcggccagctcctcgcgctgtggcgccccttggtagccggcatcggctgagacaaattgctcctctccatgcagcagattacccagctgattgaggtcatgctcgttggccgcggtggtgaccaggctgtgggtcaggccactcttggcatcgacaccaatgtgggccttcatgccaaagtgccactgattgcctttcttggtctgatgcatctccggatcgcgttgctgctctttgttcttggtcgagctgggtgcctcaatgatggtggcatcgaccaaggtgccttgagtcatcatgacgcctgcttcggccagccagcgattgatggtcttgaacaattggcgggccagttgatgctgctccagcaggtggcggaaattcatgatggtggtgcggtccggcaaggcgctatccagggataaccgggcaaacagacgcatggaggcgatttcgtacagagcatcttccatcgcgccatcgctcaggttgtaccaatgctgcatgcagtgaatgcgtagcatggtttccagcggataaggtcgccggccattaccagccttggggtaaaacggctcgatgacttccaccatgttttgccatggcagaatctgctccatgcgggacaagaaaatctcttttctggtctgacggcgcttactgctgaattcactgtcggcgaaggtaagttgatgaatcat

SEQ ID NO: 123272 - DNA, 1980 bp, Homo sapiens
atgctacgcattcactgcatgcagcattggtacaacctgagcgatggcgcgatggaagatgctctgtacgaaatcgcctccatgcgtctgtttgcccggttatccctggatagcgccttgccggaccgcaccaccatcatgaatttccgccacctgctggagcagcatcaactggcccgccaattgttcaagaccatcaatcgctggctggccgaagcaggcgtcatgatgactcaaggcaccttggtcgatgccaccatcattgaggcacccagctcgaccaagaacaaagagcagcaacgcgatccggagatgcatcagaccaagaaaggcaatcagtggcactttggcatgaaggcccacattggtgtcgatgccaagagtggcctgacccacagcctggtcaccaccgcggccaacgagcatgacctcaatcagctgggtaatctgctgcatggagaggagcaatttgtctcagccgatgccggctaccaaggggcgccacagcgcgaggagctagccgaggtggatgtggactggctgatcaccgagcgccccggcaaggtaagaaccttgaaacagcatccacgcaagatcaaaacggccatcaacatcgaatacatgaaagccagcatccgggccaaggacggttacagccgcagcgagtcactgtggctggtgcgcggcggcgtggcgaaactggatgaaggtcaccggctggccgcactctggcaggcgctgccggaagaactccgcttaagtccgcatcgttatctggcgacaaacagtccgcaggggccgtggtggctgctcggctggtgtgagcgggtgccggaagcggatgaggtgctgcctgcgccgctgccgccgtaccgggtactgaccgggctggtggaccgcttcgggcgcacacagaccggcgaaatcaccggcgtgacggatggtgccgggcgtcacttccggctggtactgaccacgcatgcgcacgaggcagaagaagcccggcagcaggccatttccggcgggacggaaccgtccgcttttcctgataccctgccgggttacaccgaatatggccgggacaacggcatccgtctgtctgccgtgtggctgacgcacgacccggaatacccggagaatttaccctgcgcgccgctggtgcgctatggctggacgccccgcggcgaactggcggtggtgtatgaccgtagtggcaaacaggtgcgcagctttacttacgatgataaataccggggccggatggtggcgcaccgtcacacgggccggccggaaatccgttaccgttacgacagcgacgggcgggtgacagaacagctaaacccggcaggcttaagctacacgtatcagtatgagaaagaccgcatcaccatcaccgacagcctggaccgccgtgaagtgctgcacacgcagggcgaagccgggctgaagcgggtggtgaaaaaggaacacgcggacggcagcgtcacgcagagtcagtttgacgccgtgggcaggctcagggcacagacggatgccgcaggcaggacaacagagtacagcccggatgtggtgacgggcctcatcacgcgcataaccacgccggatggcagggcatcggcgttttactataaccaccacaaccagttaacgtcagccaccgggcctgacgggctggaattgcgccgggaatatgatgaattgggccgtctgattcaggaaactgcccctgacggcgatatcactcgctaccgttatgataatccacacaatgaccggccggtcaccgcgaggaagggcttaatcagtaccgcgcatacgaaagccgttgaccgtatattgccgttaaagacacgcagggccattaaaacccggtttgaattcaacatcgcccggtaccttaccgccgtaatttcccccgaaggaaatcgacacatcaaggatcaggatttgcggagtatagaccagaaagagagccagtga

SEQ ID NO: 123273 - DNA, 2472 bp, Homo sapiens
atggagaaaaaatccccggcctacttctgctgtcgggatatgcaggtaattcactctgacgctgctttacaacggttattgacacgtttcaacgatcctgaagggtggagtaatctggcgaaaaatcagtatctgagcacgtcgatgaaacaaaaaatttggcaacgtgctttatcgcatcggaaaaataatccgaaagcagattcagatgcatatgaaaccagcgctgatatgattttgtctgagctgattagccacggcgaagttgatgaccagatgctattaaatgccaccgccctgatacgttcggacgactgggactttttagagagtgcattaattagttgggataatttacccgctgttgttctcaaggaattacagcaaaacacgccacgcaatgatatttgggcgaagttttttctgaggcaggaaaacagttcccgtgcgcaggttgacgaagcgttacgtgtttattatgcactagaccccgatgcgttagcacaactggatgtactggctaaacgcccttacaaaacagcggcctttcggggtgagaaaacgcatcgcgtgccacggcgtagtgtgcggcagaacatcatcgaccaggccgaccgactgcatggtgcgcagcgcctcgtcatcaataccaatcgcacgcgggtagtcgatcaacttatcgagtttctccaccaccagcacgtcaatgcccatctggccgagatagttcgccatcatcagcccaaccgggccggcaccagcgatcgccacctgaacgctatggttaacagcaggctggatgtcaggactttgttgcccccacgacctagtgttgggtctgatcaccccaacattcctggcttcccaaccctgaacaggtcacccacggaaacaccgctgaatggggaataccagtatgtgcacaacggcggtacagcgtctgacactgttgtgaacagtgacggctgccagattgtcaaaaacgggggtgtggccgggaataccaccgttaatcagaaggccagactgcaggtggacgccggtggtacagccacgaatgtcaccctgaagcagggcggcgcactggttaccagtacggctgcaaccgttaccggcataaaccgcctgggagcattctctgttgtggagggtaaagctgataatgtcgtactggaaaatggcggacgcctggatgtgctgaccggacacacagccactaatacccgcgtggatgatggcggaacgctggatgtccgcaacggtggcaccgccaccaccgtatccatgggaaatggcggtgtactgctggccgattccggtgccgctgtcagtggtacccggagcgacggaaaggcattcagtatcggaggcggtcaggcggatgccctgatgctggaaaaaggcagttcattcacgctgaacgccggtgatacggccacggataccacggtaaatggcggactgttcaccgccagtggcggcacactggcgggcaccaccacgctgaataaaggcgccataattaacccttcccgggaacacggccaggtgctggctgtcggtgaagatattcaccagcttgcgcaggttgaagtatgtggtatcaagcgcgatgtgaatatcgccctgatttgtgaaggtaaccctgccgatctactgggccagtgggtgctggtacacgtcggatttgccatgagcatcatcgacgaagatgaagcccaagccacattagacgcactgcgccaaatggattacgacattaccagcgctgaattcagcagtaagcgccgtcagaccagaaaagagattttcttgtcccgcatggagcagattctgccatggcaaaacatggtggaagtcatcgagccgttttaccccaaggctggtaatggccggcgaccttatccgctggaaaccatgctacgcattcactgcatgcagcattggtacaacctgagcgatggcgcgatggaagatgctctgtacgaaatcgcctccatgcgtctgtttgcccggttatccctggatagcgccttgccggaccgcaccaccatcatgaatttccgccacctgctggagcagcatcaactggcccgccaattgttcaagaccatcaatcgctggctggccgaagcaggcgtcatgatgactcaaggcaccttggtcgatgccaccatcattgaggcacccagctcgaaccggaggattttggccctggccaaaacccaggttgcccaatggcccaaactttttaccaacaggttcatccccaacccaaattggggcccccattctggcccctggccgtgcccaatgcccccccaaaaatgggtccccaggggtcgcatgccctcaaatggcccagtgggggaaagaagcttgagaggatttcaagggctttcgggtaccacatgcgcccaatttttgggaaaggccaatgggaaccaacctaacactcccctggccagctga

SEQ ID NO: 123274 - DNA, 759 bp, Homo sapiens
atggcagataacaaaccagagctacagcgtgggctggaagctcgacatatcgaactcatcgccctggggggcaccattggcgtcggcctgtttatgggggccgccagtaccctgaaatgggccgggccatccgtattgttggcctatatcatcgccgggctgttcgtctttttcatcatgcgttcaatgggcgaaatgttgttcctcgaaccggttaccggttcgttcgccgtttatgcgcatcgttatatgagcccgttctttggctatctcaccgcctggtcttactggtttatgtggatggcggtggggatctctgaaatcaccgccattggcgtttatgtccagttctggttcccggagatggcgcagtggatacccgcattgatcgcagtggcgctggtggcgttggcgaatctggcggcggtacggttgtacggcgaaatcgagttctggttcgcgatgatcaaagtcaccacgattatcgtgatgattgtcattggcctgggcaatctgctccatgcgggacaagaaaatctcttttctggtctgacggcgcttactgctgaattcactgtcggcgaaggcccctctgctgcaggtctgctggagtttgctggaggtccactacagaccctgttttcctgggtatcaccagcagaggctgcagaacggcaaagattgctgcctgttccttcctctggaagcttcgtccaagaggggcacccaccagatgccagccagagctctcctgtatga

SEQ ID NO: 123275 - DNA, 2150 bp, Homo sapiens
  misc_feature (1)...(2150): n = a,t,c or g
agcggcttctgcagcaaattaaccagttcactaactacgagccagtgatcggcattatgggtaaaaccggtgttgggaagagcagtctgtgcaatgccctgtttgccggagatatatcaccggtcagcgatgtggcggcctgtacacgtgagccactgcgctttcgcctgcaagtcggcgaccgctatataacgctgatggatctgcccggcgtgggcgaaagtggcgctcgcgataccgagtatgctgcgctgtaccgcgaacagcttcctcgcctcgacctggtactgtggctgattaaggccgatgaccgggcgctgacggtggatgaacatttttatcatcaggtgattggagaggtataccggcataaggtgctgtttgttatcagccagtcggataaggccgaacctaccagncggtggtccacctcaaatgtcgcaacggcccaagcggccggcccgggcctcacccccatcaacccattcgaggaggcatcggacccggccaccaccgccaaacacacagtacatcacagcaaggcacaactgcaacatgcaccatcacaaacaattggtacaagaagccccacaggacctgaacttttgattacggctgatgatcgggcactggcgactgatgagcatttttaccgtcaggtgattggcgaagcataccggcataagatgctgtttgttatcagccagtcagacaaagctgaacccaccagcggtggaaatatcctttccacagagcagaaacaaaatatcagccgcaaaatctgcctgctgcatgagctattccagcccgtgcatccggtgtgtgccgtgtcggttcgcctgcagtggggactaagggtgatggcagagcggatgattaagtgtctgccgcgtgaggccagcagcccggtagtagcgctactgcaacatccctttcgaacaacggtagcccgggagcaggcacgtgacgatttcggtgaaaccgtaggtgccatactcgatacgtggcccgcgctgtctgggatttcttcttctgagtgtttaattctgccctattattctccgagccctgtcgcaagtgcggcagggctttctttatttgttttacccatactgaggagtctgcttatgacccgtctggcttcgcgctttggcgctgcaaatcttattcgccgtgaccgtccgttaacccgtgaagagtatttcgcgtggtgccagcgtatcagtgagatcggacaagatctctctctcgcatggagcagatctgcatggcagaatatgaccgctgtcatcgagccgttttatcccaaggcgggcaatggccgacggccctatccgctggagaccatgctgcgtattcactgcatgcagcattggtacaacctgagcgacggtgccatggaagatgccctgtacgaaatcgcctccatgcgcctgtttgcccgattatccctggatagcgccctgccggatcgcaccaccatcatgaatttccgccacctgctcgagcagcatcaactggcccgtcaattgttcaagaccatcaatcgctggctggccgaagcaggcgtcatgatgacccaaggcactttggtggatgccaccatcattgaggcacccagctctaccaagaacaaagagcagcaacgcgatccggagatgcatcagaccaagaaaggcaatcagtggcactttggcatgaaggcccacattggtgtcgatgccaagagtggcctgacccacagcctggtcaccaccgcggccaacgagcatgacctcaatcagctgggtaatctgcttcatggagagaagcaatttgtctcagccgatgccggctaccaaggagcgccacagcgcgaggagctggccgaggtggatgtggactggctgatcgccgagcgtcccggcaaggtaaaaaccttgaagcagaatccgcgcaagaacaaaacggccatcaacatcgaatacatgaaagccagcatccgtgccagggtggagcacccgtttcgcatcatcaagcggttttcgtgcagcgatgcgacgtccaggggcgtgaaacacagtttaaggcgctgctctatccgttcggcaacatatctctgcacttgccttcctcggcatgattttgctgctgatgtgcacgatggatga

SEQ ID NO: 123276 - DNA, 2763 bp, Homo sapiens
atgccgatggaaatgctttgtacggtattcctcactcgttctttcccccgtttcccttggatcgccctcgccggcccgcaccccttcatgaatttccgccacctgctggagcagcatcaactgccccgccaattgttcaagaccatcaatcgctggctgcccgaagcaggcgtcatgatgactcaaggcaccttggtcgatgccaccatcattgaggcacccagctcgaccaagaacaaagagcagcaacgcgatccggagatgcatcagaccaagaaaggcaatcagtggcactttggcatgaaggcccacattggtgtcgatgccaagagtggcctgacccacagcctggtcaccaccgcggccaacgagcatgacctcaatcagctgggtaatctgctgcatggagaggacaatttgtctcagccgatgccggctaccaaggggcgccacagcgcgaggagctgccgaggtggatgtggactggctgatcgccgagcgccccggcaaggtaagaaccttgaaacagcatccacgcaagaacaaacggccatcaacatcgaatacatgaaagccagcatccgggccagggtggagcacccatttcgcatcatcaagcgacagttcggcttcgtgaaagccagatacaaggggttgctgaaaaacgataacccactggcgatgttattcacgctggccaacctgtttcgggcggaccaaatgatacgtcactgtgatggggtgatcgcgtttggcggcggctcggtgctggatgcggcgaaagccgtgacgttgctggtgacgaacccggatagcacgctggcagagatgtcagaaaccagcgttctgcaaccgcgcttgccgctgattgccattccaactaccgccggaaccggctctgaaaccaccaatgtaacggtgattatcgacgcggtgagcgggcgcaagcaggtgttagcccatgcctcgctgatgccggatgtggcgatcctcgacgccgcattgaccgaaggtgtgccgtcgcatgtcacggcgatgaccggcattgatgcgttaacccatgccattgaagcatacagcgccctgaacgctacaccgtttaccgacagtctggcgattggtgccattgcgatgattggcaaatcgctgccgaaagcggtgggctacggtcacgaccttgccgcgcgcgagagcatgttgctggcttcatgtatggcgggaatggcgttttccagtgcgggtcttgggttgtgccacgcgatggcgcatcagccgggcgcggcgctgcatattccgcacggtctcgcgaacgccatgttgctgccaacggtgatggaatttaaccggatgtcagattggtcggcactgcgaactaaaaatccagataatagccttgaccgggaaaacggaaagcatcaaattcctgacaccattcgcgtgcgcgactatcgcggcaaactgatagtaccgggctttgtcgatacacatatccattatccgcaaagtgaaatggtgggggcctatggtgagcaattgctggagtggttgaataaacacaccttccctactgaacgtcgttatgaggatttagagtacgcccgcgaaatgtcggcgttcttcatcaagcagcttttacgtaacggaaccaccacggcgctggtgtttggcactgttcatccgcaatctgttgatgcgctgtttgaagccgccagtcatatcaatatgcgtatgattgccggtaaggtgatgatggaccgcaacgcaccggattatctgctcgacactgccgaaagcagctatcaccaaagcaaagaactgatcgaacgctggcacaaaaatggtcgtctgctatatgcgattacgccacgcttcgccccgacctcatctcctgaacagatggcgatggcgcaacgcctgaaagaagaatatccggatacgtgggtacatacccatctctgtgaaaacaaagatgaaattgcctgggtgaaatcgctttatcctgaccatgatggttatctggatgtttaccatcagtacggcctgaccggtaaaaactgtgtctttgctcactgcgtccatctcgaagaaaaagagtgggatcgtctcagcgaaaccaaatccagcattgctttctgtccgacctccaacctttacctcggcagcggcttattcaacttgaaaaaagcatggcagaagaaagttaaagtgggcatgggaacggatatcggtgccggaaccactttcaacatgctgcaaacgctgaacgaagcctacaaagtattgcaattacaaggctatcgcctctcggcatatgaagcgttttacctggccacgctcggcggagcgaaatctctgggccttgacgatttgattggcaactttttacctggcaaagaggctgatttcgtggtgatggaattctggtgtcctgtcctctggtgttttcgtcggcattttcgtggagggcggcggatggcggtaaaaaccgtaacgttcaccccagcgttttcgataggccggagccttacgtccgcgcacccagagccgtatccagatcagcggctgaataaggtagagaagggcggtgtaaagcaattcgagcataaccagtcctgccgccagcaggtcggcgttaccattatcaaggtcgtcaaacagctggctgatattctgccgcacggtcactttcagttttacgccgaggtaatcggcaaactgtttcgccagcgatcagcgcgtgacgccatccggggatcctcatag

SEQ ID NO: 123277 - DNA, 3663 bp, Homo sapiens
  misc_feature (1)...(3663): n = a,t,c or g
atgaaactgatggccattcaggaacaggcgcgcggcgaacaatgcttccgtgattccgagtgggatttgcagttccacattcaggtcgctctggcgacgcagaactccgccctggcggctatcgtggaaaaaatgtggacccagcgtagtcataacccgtactggaaaaaactgcacgaacacattgattcccgtaccgtcgataactggtgtgatgaccacgatcaaatcctcaaggcgctgattcgcaaagatcctcatgctgctaagctggcaatgtggcagcatctggaaaacaccaagatcatgttatttaacgaaaccagcgacgacttcgagttcaatgccgaccgctatctattcgccgaaaacccggtggcgattgcgaaagaactggagctgaccgcatcagcggaaattttactctgggatgactattttgcacctggctacggcgtgccgaacgacgaaggcatggaagcagtgaaattgctgccgcggctggaaggcattctgcttgatcctgtgtataccggaaaagcgatgcgggggctgattgacggtatcagtcagaaacgcttcaaagatgaagggccgattctgtttattcatacccggcggtgcgcctgcgctgttcgcctatcatccccacgtttagctccggaaacgctcatgcaagaaagtatacaactggttattgattccttgccgttcctgctgaaaggggctgggtatacgctgcaactcagtatcggcggcatgttttttggcttactgctcgggtttattctcgcgctgatgcgtctgtcgccaatctggcccgtgcgctggctggcgcgtttttatatctctatttttcgtggtacgccgctcatcgcacaactgtttatgatctattacggcctgccgcagtttggtatcgaattagatcccattccgtcagcaatgattggtctgtcgttgaacactgccgcctatgctgccgaaacgctgcgcgccgccatttcttctattgataaaggtcagtgggaagcggcagccagtattggtatgacgccgtggcagaccatgcgtcgcgcgattttgccacaggcggcgcgtgtggcgttgccgccgctgtcgaacagctttattagcctggtaaaagatacgtcgctggccgcgacaatccaggtgccggagctgttccgtcaggcgcagttgattacctcgcgtacgctggaggtgttcaccatgtatctggcggcttcgctcatctactggatcatggcgactgtgttatcgacgttgcatctgacaaatggcagcgcattagctgggaagaagcattctccccaacgaaaccgggatgctgacccagaaatttgcccgctccctcgggatgctggcggtagacaaccaggcgcgcgtctgacacggaccaacgcaagtcttgctccaacatttggtcgcggtgcgatgaccaaccactgggtggatatcaaaaacgctaacgtcgtgatggtgatgggcggtaacgctgctgaagcgcatcccgtcggtttccgctgggcgatggaagcgaaaaacaacaacgacgcaaccttgatcgttgtcgatccccgttttacgcgtaccgcttctgtggcggatatttacgcgcctattcgttccggtacggacattacgttcctgtctggcgttttgcgctacctgatcgaaaacaacaaaatcaacgccgaatacgttaagcattacaccaacgccagcctgctggtgcgtgatgattttgctttcgaagacggtctgttcagcggctacgacgctgaaaaacgtcaatacgataaatcgtcctggaactatcagctcgatgaaaacggctatgcgaaacgcgatgaaacactgactcatccgcgctgtgtgtggaacctgctgaaagagcacgtttcccgctacacgccggacgtcgttgaaaagggatcctctagagaccagagatcccagtggtttaagccatcatccgcaaattatccgtgcctggcagcagggggcggacaatttggcatcggtagcggcggctccggtcacgtcagcggttatagcgtggtgcatcaggcactggaagaagagctggccgagtggcttggctattggcgggcactgctgaatatctctggtttcgtcgctaatcaggcagttattgccgcgatgatggcgaaagaggaccgtattgctgccgaccggcttagccatgcctcattgctggaagctgccagtttaagcccgtcgcagcttcgccgttttgctcataacgatgtcactcatttggcgcgattgcttgcttccccctgtccggggcagcaaatggtggtgacagaacgcgtgttcagcatggacggcgatactgcgccactggcggaaatccagcaggtaacgcaacagcacaatcgctggttgatggtcgatgatgcccacggcacgggcgttatcggggagcaggggcgcggcagctgctggctgcaaaagccgtgcgttacaactggcagaaaaactgcgtcagcaaggctgctgggtcacggcgattcgcccgccaaccgtacccgctggtactgcgcgactgcgcttaacgctaacccgatatcgaccgtctgctggaggtgctgcatggcaacggttaataaacaagccattgcagcggcatttggtcgggcagccgcacactatgagcaacatgcagatctacagcgccagagatgtgacgccttactggcaatgcttccacagcgtaaatacacccacgtactggacgcgggttgtggacctggctggatgagccgccactggcgggaacgtcacgcgcaggtgacggccttagatctctcgccgccaatgcttgttcaggcacgccagaaggatgccgcagaccattatctggcgggagatatcgaatccctgccgttagcgactgcgacgttcgatcttgcatggagcaatctcgcagtgcagtggtgcggtaatttatccacggcactccgcgagctgtatcgaggtggtgcagtgcctcagaggatccctaacctccgccatttaagtgaattcagcagtaagcgccgtcagaccagaaaagagattttcttgtcccgcatggagcagattctgccatggcaaaacatggtggaagtcatcgagccgttttaccccaaggctggtaatggccggcgaccttatccgctggaaanccatgtacgcattcactgcatgcagcattggtacaacctgagcgatggcgcgatggaagatgctctgtacgaaatcgcctccatgcgtctgtttgcccggttatccctggatagcgccttgccggaccgcaccaccatcatgaatttccgccacctgctggagcagcatcaactggcccgccaattgttcaagaccatcaatcgctggctggccgaagcaggcgtcatgatgactcaaggcaccttggtcgatgccaccatcattgagcacccagctcgaccaagaataatgttttcactgagtgcctttggcctgatgcgttcgattacccgaacggggtttatactatcgcgcgttgccgattatcggtattttgctggctggtttggtgtgcgaaaagcgttgctgaattcacagcactgcgcaagtcgtcgagcagattga

SEQ ID NO: 123278 - DNA, 1746 bp, Homo sapiens
  misc_feature (1)...(1746): n = a,t,c or g
atggaactcattgaaaaacatgtcagctttggcggctggcaaaatatgtatcggcattattcccaatcactgaaatgtgaaatgaatgtcggcgtctatctcccaccaaaagccgcgaatgaaaaattgccggtgctgtactggctttcaggcctgacctgcaacgagcagaatttcattactaaatcggggatgcagcgttacgcggctgagcacaacattattgttgttgcgccggacaccagtccgcgaggcagtcatgtcgcagatgctgaccgttacgatctcgggcaaggtgccgggttttacctgaacgcgacgcaagcgccgtggaatgaacattacaaaatgtatgactatatccgcaacgagctgccggatttagtgatgcatcattttccggcaacggccaaaaagtctatctctggtcattctatgggcgggctgggcgcgctggtgctggcgttacgtaacccagatgaatatgtcagcgtctcggcgttttcgcccattgtctccccatcgcaagtgccgtggggacagcaagcctttgctgcatatcttgctgaaaataaagatgcctggttggattacgacccggtgagtcttatttcacaaggtcaacgcgttgcggaaatcatggttgatcaggggttgagtgatgatttttacgcagaacagctgcggactccaaatcttgaaaagatctgccaggagatgaatatcaagacgttaatccgttatcaacgaggagcaatttgttcagccgatgcggctaccaggggcgcaaagcgggagagctgccgaagtggatgtggactgctgatcgcagagcgcccggcaaaggtagaacctggaacagcatcacgccaagacaatacggccatcaacatcgaatacatgaaagccagcatccgggccagggtggagcacccatttcgcatcatcaagcgacagttcggcttcgtgaaagccagatacaaggggttgctgaaaaacgataaccaactggcgatgttattcacgctggccaacctgtttcgggcggaccaaatgatacgtaatcctcacgatctctacgcgccggaagtggtacaccaaaaggcaaaagtgacaacgtccgggtacaggtttctgccctgctgcggttttgccaacaccttttgggggaaaacgaccgccgacgggacattgattgaacactttggtcgtcgctgtcagggatggtttgaagatgacgacggtcatcgcgaacaatgtgacttccgtttccgttttaaaaattgcccgcaatgtaacgcggaaaacgatattgccgcccgccgctgccgcgaatgtgacaccgtactggttgatccggacgatatgttaaaagcggcgctacgactgaaagacgcgctggtattacgctgtagcggcatgtctttgcaacatgggcacgacgagaaaggcgaatggttgaaaatcacctattacgatgaagacggcgcggatgtgagtgagcgtttccgtctgcaaacacctgcccagcgtaccgccttcgagcagctttttatccgcccgcatacgcgcacaccgggcatcnccgtgcgctggatcaccgccgccgatatcctcgcccagcaagccttattgcgacacccggattttgtcgtcacccgcatgaaaggccagtactggcaggtgcgtgaaaaagtgttcgattacgaaggtcgttttcgtctggcgcacgaattacgcggttaa

SEQ ID NO: 123279 - DNA, 2127 bp, Homo sapiens
atgacggatattgttgttgggttgtccactgcagggcggccattcagctatgcaggagacaagaatcgccagcttacccgttacagcgatacccgctggcatgaagattccgtgcgtaaccgctggttcagcgtgatggtggggccgtctgtgcgcgtgaatgaatggttcagcgcgtatgcgatggcgggtatggcttacagccgtgtgtcgactttctccggggattatctccgcgtaactgacaacaagggaaggttggccagtgtgaataacatcgccagttggttatcgtttttcagcagccccttgtatctggctttcacgaagccgaactgccgcttgatgatgcgaaacgggtgctccaccctggcacggatgctggctttcatgtattcgatgttgatggccgttttgttcttgcgcggattctgcttccaagtttttaccttgccggacgctcggggatcagccgtccattcacctcgggcagctctccgctgtgggccttggtaccggatggtggaccctggtctcccgaagggttcccgtttagtcgcctttgcgcgggaaaatcaggactgtgcatcgctgaccccggaaacttttttaccgcgtatccatgtcattaaaggtgtgaacatttccacggcgacagtttgccgtcagtgtgaagatgcaccgtgcgctaacgtctgcccgaatggtgctatcagccgtgataaagggtttgttcatgtgatgcaggaacgttgcattggttgcaaaacctgcgttgtggcttgcccgtatggtgcgatggaagtggtggtacgtccggtgatccgcaacagcggcgcgggtctgaatgtacgggctgacaaagccgaagccaataaatgcgacctgtgcaaccatcgtgaagacggcccggcgtgtatggcggcttgcccgactcatgcgctgatttgtgtcgatcgtaataaacttgaacaactgagcgcagaaaaacgccgccaatacggagcggcggtatcggcgacctgtgactgcgggatgcgaagctgtcgtgtccggcagaggggggtacgccatccaggagtgcgggattactcatggcgaaagccatcttgcgtgtccactggtattcgtggacaggcaggggtcggtttcgccgcttttggggtggcccattactctctcgcagttcgttgtcgtcgcgtttcagctgtggagcgcagcgattgtgttttttatatcgccggacgttgtttaggagatgttgtatcgcactctgtcagcgtgccatcgcctccctccgtccctctttcgtccgcgcctgccccgtcgccccctgtgcgtcggcgaccggccaaagcggttgttgaaaacccgaaagtgaaaaaagccgtactggcagaaaccgaacaaaaagtacgccaggataccgtgctggcgtctaacacttcaaccattcctatcagcgaactggccaacgcgctggaacgcccggaaaacttctgcgggatgcacttctttaacccggtccaccgaatgccgttggtagaaattattcgcggcgagaaaagctccgacgaaaccatcgcgaaagttgtcgcctgggcgagcaagatgggcaagacgccgattgtggttaacgactgccccggcttctttgttaaccgcgtgctgttcccgtatttcgccggtttcagccagctgctgcgcgacggcgcggatttccgcaagatcgacaaagtgatggaaaaacagtttggctggccgatgggcccggcatatctgctggacgttgtgggcattgataccgcgcatcacgctcaggctgtcatggcagcaggcttcccgcagcggatgcagaaagattaccgcgatgccatcgacgcgctgtttgatgccaaccgctttggtcagaagaacggcctcggtttctggcgttataaagaagacagcaaaggtaagccgaagaaagaagaagacgccgccgttgaagacctgctggcagaagtgagccagccgaagcgcgatttcagcgaaagaagagattatcgccgcatgatgatcgcgatggtcacgacgtgttcgctgtctggaggaagggattttcgccatccgggggaacggatttga

SEQ ID NO: 123280 - DNA, 1917 bp, Homo sapiens
atgagccatcaactcaccttcgccgatagtgaattcagcactaagcgccgtcagacccgaaaagagattttcctctcccgcatggagcagattctgccatggcagaatatgaccgctgtcatcgagccgttttatcccaaggcgggcaatggccgacggccctatccgctggagaccatgctgcgtattcactgcatgcagcattggtacaacctgagcgacggtgccatggaagatgccctgtacgaaatcgcctccatgcgcctgtttgcccgattatccctggatagcgccctgccggatcgcaccaccatcatgaatttccgccacctgctcgagcagcatcaactggcccgtcaattgttcaagaccatcaatcgctggctggccgaagcaggcgtcatgatgacccaaggcactttggtggatgccaccatcattgaggcacccagctctaccaagaacaaagagcagcaacgcgatccggagatgcatcagaccaagaaaggcaatcagtggcactttggcatgaaggcccacattggtgtcgatgccaagagtggcctgacccacagcctggtcaccaccgcggccaacgagcatgacctcaatcagctgggtaatctgcttcatggagagaagcaatttgtctcagccgatgccggctaccaaggagcgccacagcgcgaggagctggccgaggtggatgtggactggctgatcgccgagcgtcccggcaagcgtgcagcgggcctgggctttacctacaacgttggcgcattgggcggtgcactggccccaatcatcggcgcgttgatcgctcaacgtctggatctgggtactgcgctggcatcgctctcgttcagtctgacgttcgtggtgatcctgctgattgggctggatatgccttctcgcgttcagcgttggttgcgcccggaagcgttgcgtactcatgacgctatcgacggtaaaccattcagcggtgccgtgccgtttggcagcgccaaaaacgatttaccggttccggacagcccgctcgataaacccgaaatcgtcgccgccatggcattagcggcagaacaggcgggcgcggttgccattcgcattgaaggtgtggcaaatctgcaagccacgcgtgcggtggtgagcgtgccgattattggaattgtgaaacgcgatctggaggattctccggtacgcatcacggcctatattgaagatgttgatgcgctggcgcaggcgggcgcggacattatcgccattgacggcaccgaccgcccgcgtccggtgcctgttgaaacgctgctggcactccttactgaacatcagagacttcatactggtgtgaaacccttacgaattctacataagaaaattcatactgatgtgaagccctacaaatgtgtacgatgtgggaagacctttagatttggtttctaccttactgaacaccagagaattcacactggtgaaaagccctataaatgtaaagaatgtggaaaggcctttattcgtagagggaatcttaaagaacatctgaaaattcattctggtttaaaaccctatgactgtaaagaatgtgggaagtcctttagtcggcgtgggcagttcactgaacatcagaaaattcatacgggtgtaaaaccatacaaatgtaaagaatgtgggaaggcctttagtcgtagtgtagaccttagaatacatcaaagaattcatactggtgagaaaccctatgagtgtaaacaatgtgggaaggcctttagacttaattcacaccttactgaacatcagagaattcacactggtgagaaaccctatgagtgtaaggctctttctggcaaaggtaatgacatacgcatctgtgccagcatcaccaagagtgaggctggtttctggaaatccattctgactctgtga

SEQ ID NO: 123281 - DNA, 3117 bp, Homo sapiens
atgcatatggagccgtgggatggcccggcgggcatcgtgatgtccgacgctcgttttgccgcctgtaacctcgaccgtaacggtctgcgtccggcgcgctacgtcatcaccaaagataagctcatcacctgcgcctctgaagtcggtatctgggattaccagcctgacgaagtggtcgaaaaaggccgcgtcgggccaggcgaactgatggttatcgacacccgcagtgggcgtattctgcactcggcagaaaccgatgacgatctgaaaagccgccatccatataaagagtggatggagaaaaacgtccgccgactggtaccgtttgaagatctgcccgatgaagaagtgggtagccgcgaactggacgacgacacgcttgccagctaccagaaacagtttaactacagcgcggaagagctggactccgtaattcgcgtactgggcgaaaacggtcaggaagcggtcggttcgatgggcgatgataccccattcgccgtgctctccagtcagccgcgcattatttacgactacttccgccagcagttgcccagcgtattgcagcaggtgcgacagctggttgcacagatggaacagcaggaaggggaaaatgatttaccctcgaccgccagtcgcgagatcttgtttatgcaattactgctcttgctgcgtaaaagcagtttgcaggagaacctggaaaacagcgcatcacgtctcaacttgcttctggcctggctggaggaccattttgccgatgaggtgaattgggatgccgtggcggatcaattttctctttcactgcgtacgctacatcggcagcttaagcagcaaacgggactgacgcctcagcgatacctgaaccgcctgcgactgatgaaagcccgacatctgctacgccacagcgaggccagcgttactgacatcgcctatcgctgtggattcagcgacataaccacttttcgacgctttttcgccgagagtttaactggtcaccgcgtagatattcgccaggacgggatggctttctgcaataacgcgaatcttctcaacgtatttgtacgccatattgcgaataatcgacttcgttctctggccgagtggcactttggcatgaatgcccacattggtgtcgatgccaagagtggcctgacccacagcctggtcaccaccgcggccaacgagcatgacctcaatcaggctgagagtaactctgcgtgcactggagaggagcaatttgtctcagccgatgccggctaccaaggggcgccacagcgcgaggagctggccgaggtggatgtggactggctgatcgccgagcgccccggcaaggtaagaaccttgaaacagcatccacgcaagaacaaaacggccatcaacatcgaatacatgaaagccagcatccgggccagggtggagcacccatttcgcatcatcaagcgacagttcggcttcgtgaaagccagatacaaggggttgctgaaaaacgataaccaactggcgatgttattcacgctggccaacctgtttcgggcggaccaaatgatactcacctctgccttggtgaatcctcgcgcctgccacgtgaccggtatgccaatccttcccgccgtgcagatctgtgatctgtcggtggtcggtgcgggacctgctggtctggcgtttgccattgacgcgccggcgcgtgggcatcagatccccggcaaagaggagttgtacgaaacgctgcgctattaccgccggatgatcgaagtgacgggcgtgacgctaaaactcaatcacaccgtgacggcggatcagttacaggctttcgatgaaacgatcctcgccagtgggatcgtgccgcgcactccgcccatcgacgggatcgatcatccgaagaatgaagctgacgacatgctgcgcatgggcttcatcgaagacgttgaaaccattatggcgcagatcccggaaggtcatcagaccgctctgttctctgcaaccatgccggaagcgattcgtcgcattacccgccgctttatgaaagagccgcaggaagtgcgcattcagtccagcgtgactacccgtccggacatcagccagagctactggactgtctggggtatgcgcgaacacgaagcactgacactggaacgcctgaaagatggtcgtctggacatcctgattgcgaccgacgttgcagcccgtggcctggacgttgagcgtatcagcctggtagttaactacgatatcccgatggattctgagtcttacgttcaccgtatcggtcgtaccggtcgtgcgggtcgtgctggccgcgcgctgctgttcgttgagaaccgcgagcgtcgtctgctgcgcaacattgaacgtactatgaagctgactattccggaagtagaactgccgaacgcagaactgctaggcaacgccgtctggaaaaattcgccgctaaagtacagcagcagctggaaagcagcgatctggatcataccgcacactaagcataagatgcacgccacttttatggcgaagccgtatgaagagcacgcgggcagcggaatgcatatccatatcagtatgcaaaataatcgtggcgagaacgtgctttctgacgcggaaggcgaagattcgccgctgctgaaaaagatgctcgccgggatgattgacctgatgccgtcgtcgatggcgttgctggcaccaaacgtgaactcgtatcgccgcttccagccgggaatgtatgtgccgacgcaggcgtcgtggggccataacaaccgcaccgtcgccctgcgtattccgtgcggcgaccgtcataatcaccgcgtggaatatcgcgtggcgggtgccgatgccaacccatatctggtgatggcagcgatttttgccggtattttgcatggccttgataacgagctgccgttgcaggaagaagtcgaaggcaacgggctggaacaggaaggcttaccctttccgattcgccagagcgatgccctgggtgagtttatcgagaatgatcacctgcgccgctatttaggcgaacgcttctgccatgtctatcacgcctgtaaaaatgatgagctgttgcagtttgagcgcctcatcacagaaacagaaattgagtggatgttgaaaaacgcgtaa

SEQ ID NO: 123282 - DNA, 2631 bp, Homo sapiens
tcatccgccggtgccataggatggcactatcccagtgcggcatagcatcctgtaacgctcggcgacaatacgtaccgcacgcacatcaaacagctcatcaaaggcgaggttctttttctgcattttacgccagatgctgtagatgtgtttcggacgaccatacacttccgctttaacgccttcagctttcatctcagcgcgcagatgaccaacgaactcttcgatgtagtgttcgcggtcgagacgccgttcatgcagcagtttggcaattcgtttgtattcggttggatggaggtaacggaagcagtaatcttccagttcccatttcagttgtccgattccgagacggttagccagcggtgcgtagatgttggtacactcttttgccgccagtacacgttcatcttccggcgcatcttttacttcgcgcagatgagcaatacgctccgcctgtttgatgactacgcagaggaaatcatcgaccatcgccaataacatccggcgaacgcaatcgacctgctcggaggacacagaatcagtgtgcgtcgctttcagctggcggatcgccgccatatcacgcacgccgtgaataaggttaacgaccgacttaccgacgctctcacgcagcacatcttcgatgactacgttggcatctggatttgccctatgcggatgccattcgttataatgctcgaacgcctctgcaaggttctttgctgccgttaacccgtctggtttgggcatgatactgatgtagtcacgctttatcgttttcacgaagctctctgctattccgttactctccggactccgcaccgccgtgttcttcggttcaagtcccaacatccgggcgaactggcgtgtttcattagcccggtagcatgaaccattatccgtcagccactccactggagacgacggaagatcgttgccgaagcggcgttccaccgctcccagcatgacgtcctgtactgtttcactgttgaagccgccggtaaagagattttcttgtcccgcatggagcagattctgctggagcagcatcaacgggcccgccaatcgttcaagaccatcaatcgctggctggccgaagcaggcgtcatgatgactcaaggcaccttggtcgatgccaccatcattgaggcacccagctcgaccaagaacaaagagcagcaacgcgatccggagatgcatcagagcaagaaaggcaatcagtggcactttggcatgaaggcccacattggtgtcgatgccaagagtgggctgacccacagcctcttcaatagtttcttcgccggtagcgatggtgcccgcattaatatccattaaatcaaaccagcggttcgccagctcggtgcgggttgccattttaatgacgggtaccgccatcaggccgtacggcgtaccacgaccggtcgtaaacacttgcactgtgatacccgaagccacctgttgcgtgccacagacaaaatcgctggctggcgtcgcggcgtaaattaatccgcgtttagtcgggcgttgaccgggcgacagcacttcaacaattgcgcttttacccgatttagcaatggagccgagtgccttctctaccacgtttgccagaccgcctttcttgttgcccggcgaagggttggcgctgcggtcggtttttcccatattgagatagttatcgtaccactccatctcctccagcagccgttggccgacctcttcgttcacgttgcgcgtcggctgtccagcacgatgggaattcgcgatcaacgcccacttcccggttaacttctgaacaacatcacccgttggcgccgcagcgcaccagtagatcagacgcatagccaatcggcggggtttgccgttacaccagaaaacgcattcgtggccagtagcggacctagcagacatcgtcatcagcgctgaacatcccacgaaaaccagtgctgcattgaaggagtgcagttcacttaccaggtagccaatcaccagtggagtgacaatggaggcaacattgccaaagacgttaaagacgccgccgcagaggccaacaatctctttcggcgcggtgtcagaaatcaccggccagcccagcgcaccaaatcctttgccaaagaaagccagcgccatcagcatgaccaccagcgtggtgttgttggtgtagttacataagatgatggtggaagccagcaacattcccagcacaatcggtagcttacgtgccagggtcagggataaaccgcgtttgatcagataatccgagaagacacctcccagcacgccgcccgcaaaaccacacagtgctggaatcgaggcgaccagacccactttcagaatcgacatgcctttttcctgcaccagataaatcgggaaccaggtgaggaagaaccaggtgatggtgttgataaaatattgtccgaaaaatacgcccagcatcatgcggttagagagcaattgcttgatgtaatgcagtttgggtccgcttgctgccgcactgcccggctttttgtggtccatatcgaccaccgcgccattttcagagataaacttcagctcttccgcagacatacgtgggtgatctgtcgggttatgaatcaacttgatccacagcgccgtcagcacaaaaccaatcaaccccat

SEQ ID NO: 123283 - DNA, 2034 bp, Homo sapiens
atgtgcagcgaaattcaagctgcgtgtcgggaaacggcgcaaccgatcccggaaagtgatgctgaactggcgcgctgcattttcgacagtctggcgctggtgtatgccgatgtgttgcatgagctggcgcatctgcgcggtgaagatttctcgcaactgcatattgtcggcggaggctgccagaacacgctgctcaaccagctatgcgccgatgcctgcggtattcgggtgatcgccgggcctgttgaagcctcgacgctcggcaatatcggcatccagttaatgacgctggatgaactcaacaatgtggatgatttccgtcaggtcgtcagcaccaccgtgaatctgaccacctttacccctaatcctgacaattcactctacacgacagacaaaggagctttgcgcatgaccactcaactggaacaggcctgggagctagcgaaacagcgtttcgcggcggtggggattgatgtcgaggaggcgctgcgccaacttgatcgtttacccgtttcaatgcactgctggcaaggcgatgatgtcagcttgcacttcgtttatagctcacgcctacatatgccgacctgtagccggataggcacttgtgccgcatccggcaatcaatgcctgatgcgacgctgtcgcgtcttatcaggcctacaactgttgccgacccgtaggccggataaggcgctcgcgccgcatccggcagtgtttacccgcggcgactcaaaatttctttctcataagcccgcacgctctccagccattcgctacctgctggcgtatcaccgcctgccacggcaacgatttctgctcttccagcagtgccagacgcgcagtgtaatcgcccgccgcttccagcttgcgcagctcagcggtaggttccagcaacgcacgcagcagggcttttttcatattgcgtgtaccaatgacccacgcggcaatgcggttgatagaggcatcgaagaagtcaaggccgatatgcacccggtcaaacagatcgtgacgcacaatctcactggcaattgcctgggtttcatcatccagcagcactacgtgatcgctgtcccagcgaacctgacggctgacgtgcagcagcatctgcggcacatacagcatggcggcggaaatcttgtcggaaatcactttaatcggatgggcggtgtcgatttacggcttaaattttctggcgattcactgggtgatctctatgaactgacgggcgttctgctgcccgataccccgccgtttgaaacggatggtcggctggtagcgaaaatcgacactgaaaaatcgtcggtctttgattatcgcggttttaatgggcgaattggtgatagcgatatccacggttctctggtctacaccaccggaaagccacgaccaaaactggaaggtgatgtcgagtcgcggcaattgcggctggcggacctgggaccgttgattggcgttgattccgggaaaggggcagaaaagtcgaaacggtctgaacagaagaagggcgaaaaaagcgttcagcctgcgggcaaagtgctgccttatgaccgcttcgaaaccgataaatgggacgttatggatgccgatgttcgcttcaaagggcggcgcattgagcatggcagtagcctgccgattagcgatctttctactcatatcatcctcaaaaatgctgacctgcgcctgcaaccgctgaaatttggcatggcgggcggcagcattgcggcgaatattcatctggaaggcgataaaaagccgatgcaggggcgggcagatattcaggctcgtcgactgaaactgaaagaactgatgcccgatgtggaactgatgcagaagacgctgggggaaatgaacggtgacgcggaactacgcggtagcgctacacaagacacaaatagagatctatattataataccgctcagtgtcgacacccgtcatcacgtatacgatacacccgcaaaaagccccgacggcggcccgacgaacgtcgccccgagaacctccaagacaagaaaagctctgaatttgacggctga

SEQ ID NO: 123284 - DNA, 1698 bp, Homo sapiens
ttatcttcgatcaaatattaaatgcgtatgatagttctgtatatgcaatgatacttgagaatttacaccatttatggaaggccatccaagctccatgcctgcagcatgcctgcaggtctgcaatggcataagccagcttgactgcgagcgtgacggcgcgagcaggtgcgaaagcaggtcatagtgatccggtggttctgaatggaagggccatcgctcaacggataaaaggtactccggggataacaggctgataccgcccaagagttcatatcgacggcggtgtttggcacctcgatgtcggctcatcacatcctggggctgaagtaggtcccaagggtatggctgttcgccatttaaagtggtacgcgagctgggtttagaacgtcgtgagacagttcggtccctatctgccgtgggcgctggagaactgaggggggctgctccagccttggggtaaaacggctcgatgacttccaccatgttttgccatggcagaatctgctccatgcgggacaagaaaatctcttttctggtctgacggcgcttactgctgaattcaccggagtcagtttttaaaaactgtttaaagaaatgcacaagtattgtgattgattttttagttgtttttcttgatgagaagctgatgcaaaattccgtctttataatgaaaatgatgccaaagcgaacgacaaggttgtagttttcactacatgtccatacataaaatggggtaacattcacgcgcctggtagcgttaccaacgctacgctcaaacataatgattctaataaaacgcgacagtgagctggtaccgaatagcacgggtaaaatcagaatcgcgcgggtttgcggttcgcgcagcaacgactgcaactctttgcggattaactgtccataagcgatgaaacatgctcttctccctaatccagccgacgtttggttttcagccacgtcaggccgataaacatcaccgccgaagcgatcaaaaacagcacgtttaccaccagcaccactggaatattcccgtgcgaggaacaggctttgcagggtgctgacgaaataacgagcgggaataatgtacgtcaccgcgcggatcaccgcgggcatactgtcgatctgaaaaataaagccggaaagcataatcgacggcagaaaagcggcgttccagggcgacctagagcccggcattgcacactgggttgccgggctaatccgtggcaaatcagcagccccatccccagggtactgagtaaaaacaggcagcatacacagcaacatcgccagcatcccgagaaagtaataagggatcagcttacacagcagcagttccgtgcgggtaatctccgtagagagcagagcctccatggtgccgcgttcccattctcgcgccaccaacagcgaggtgagaatcgcgccgatgaccgtcatgataatggtcaccgcaccggggattgatgacttcatgtttcttaccctccggcagttggaagtttttgcagaagtattgaaaagtggatcaaccacccaggcgtcggtgatgctggcgttgtcgcaatcaacagtgagcgcagccttgaccgaccggacaagaatgcggttgcagtagctgattttcctcagccccctgaaactgaaagccgtacagcgcacaggtacacgtcgttgccggatcgttaacgtcagaggccaccgcat

SEQ ID NO: 123285 - DNA, 858 bp, Homo sapiens
atggcgatgtctgctcaggcagctgaaatttataataaagacagtaacaagctggatctgtacgggaaagttaatgctaagcactacttctcctctaatgatgcagatgatggtgatactacttatgcccgtcttggcttcaaaggtgaaacccaaatcaacgatcaactgactggtttcggtcagtgggaatatgaattcaaaggcaaccgcgctgaatctcaaggttcctccaaagataaaacccgtcttgccttcgctggcctgaaattcggtgactacggctccatcgattacggccgtaactacggtgtagcatacgacatcggtgcgtggactgacgtcctgccagaattcggtggtgacacttggactcaaaccgacgtgttcatgactcaacgtgcaactggtgttgcaacctatcgtaacaacgacttctttggtctggttgatggtctgaactttgctgctcagtaccaaggcaaaaacgatcgtagcgatttcgataactacactgaaggtaacggtgatggcttcggtttctctgctacctatgaatacgaagggattcggtatcggtgcaacttatgcgaaatctgatcgtaccgacactcaagttaatgcagggaaagttcttcctgaagtatttgcttccggtaaaaatggcgaagttttgggccgcaagtctgaaatatgaccctaaccacatttacctggccactacctaatttgaaaacccaaaatatgactgtatttgctgatcacttcgttgctaataaagcccaaaacttcgaagctgttgcacaatatcagttcgatttcggtctgcgtccgtccgttgcttacctgcaatactaa

SEQ ID NO: 123286 - DNA, 2147 bp, Homo sapiens
  misc_feature (1)...(2147): n = a,t,c or g
atgctccatgcgctgttgccggtaatccntgatagcgcttgcggaccgcacacctatcatgatttcccgccacctgctggagcagcatcaactggcccgccaattgttcaagaccatcaatcgctggctggccgaagcaggcgtcatgatgactcaaggcaccttggtcgatgccaccatcattgaggcacccagctcgaccaagaacaaagagcagcaacgcgatccggagatgcatcagaccaagaaaggcaatcagtggcactttggcatgaaggcccacattggtgtcgatgccaagagtggcctgacccacagcctggtcaccaccgcggccaacgagcatgacctcaatcagctgggtaatctgctgcatggagaggagcaatttgtctcagccgatgccggctaccaaggggcgccacagcgcgaggagctggccgaggtggatgtggactggctgatcgccgagcgccccggcaaggtaagaaccttgaaacagcatccacgcaagaacaaaacggccatcaacatcgaatacatgaaagccagcatccgggccagggtggagcacccatttcgcatcatcaagcgacagttcggcttcgtgaaagccagatacaaaggggttgctgaaaaacgattaccaactggcgatgttattcacgctggccaacctgtttcgggcggaccaaatgatacatctgaattattatcacgatccccattcgacggaaattgaagaggatggcagcactatcagtgacgatgcggtgaagcaacggggtgaaataaaagtgggagtcacgggcaatatcagtcagcgagtgtccctgcgcggcagcgtggcgtggcagaaagggagtgatgattttgcccagacggcagggtttttgtcgatgacggtgaaatgccacagccctgattactatagtaaagcctgttatcactctcctgctacagcatggccttttaaagcctataaactctccttaccattcccccattttacctgtcctaaaaccagacaagccttacaagttagttcagaatctgcgccttatcaaccaaattgtttcgcctgtccaccccgtgtatttattcaggtacttaacccaatgaatattgcctatcgtaaacgggaagcggataaagtactggcaacccggctcgcgctgcgtacccaccgaattagttatatcacgctcatcgcggtgatcctgttttttgccttttcgtttaccttctcaattagccacgaagaagccgtttctgcctttgaacaaaatatctcagcactggcgctggccgcgcaggtgatccctgggcatatcattcatatcacctctacggtgcttaatatctttgccgtactgaccgcattctttggcatttatctcggtttccacgaggccattaaaggcattattctcaatctgttaagccgaattattgataccaagaaaattaactcacgcgtgctgactctggcgatctgcgcttttatcgtcattacgttgacgatttgggtttcgtttcgtgtatcggtgctggtgttctttcagttgggaagcccgttatatgttaaaaatggacagatcattaatcaaccaacaaacgcatttcagtctgatttcagccttgccgctttatggcgtaacgaaaatcatgctggggtaaaagatgcaaatcccgtggcagttaatcaggaaacacctaagctctctatagcgcttaatggcattgtactcacatcgaatgatgagacttcttttgtcttaattaatgaggggagcgaacaaaagcgatactccctcaacgaagcccttgagtcagcgccgggaacgtttattagaaaaataaataaaaccagcgttgtgtttgaaactcacgggcattacgaaaaagtaactctccatccagggctacctgacatcatcaagcagcctgattcagaaagtcaaaatgtactcgctgattatattatcgccacgcctatacgtgatggagaacagatatacgggcttcgattgaaccctcgtaagggcctcaatgcatttaccaccagcttgctacaaccagaggatatcgacctcaggatcaataatctatcgctgacccaacctgatgaggttcacaggcattaa

SEQ ID NO: 123287 - DNA, 2175 bp, Homo sapiens
atggctgaagccagtgtttttcaaactgtggatccctggaggcccggatttgccaccatccccgattttctgaaggaacgttatgataaaacgacgcgtattatcatcgacttctgcttcttaattgccaccggcgtctgctttctgccgattgttctctactccggcgcgttggcgctcaacagcctgtttcacgtcggggaatcgctacagatttctcacggtgcggctatctggctactggtaattttgcttggtctggcgggaattttgtatgcggtgatcggcggactgcgcgcaatggcagtggcggactccatcaacggtattgggctggttatcggcgggttgatggtgccggtatttggcctaatcgcgatgggcaagggcagctttatgcagggcattgagcaactcaccaccgttcacgccgagaaattaaactcaatcggtggcccgaccgatcccttgccgattggcgcggcatttaccggtttgattctggtgaacaccttttactggtgtacaaatcagggcatcgtgcaacgcacgctggcgtcaaaaagcctggcggaagggcaaaagggggcgctgttaacggcggtgctgaaaatgctcgacccgctggggctgaaacccgatctgctggcgtataataccgcgctacgtgcactcatcccacagcggctgatcgctttcgatgacgcggtacgtagcacgttgaaagaggaggaaaaactggtcaactccagcgactggggctacgacgctcaggccttttgcccgctggcgaccggagtagtgaaccaaatcggcggtaaagagcgttatttctttggcaatattttgtggcagacacgggcgttgatggaccgcgcgatcggtcataagctggcgaaaggccgcccggagcgcgaatatttacagactggcgatgcggtggatagctggaaagtgattgtcgttgaaccggaaaaacaacttacgttgttatttggcatgaaagcgccggggctgggacgactgtgttttagcctggaagataaaggcgactatcgtactatcgatgtccgcgctttctggcatccgcacggcccacattggatcgatgccaagagtggcctgacccacagcctggtcaccaccgcggccaacgagcatgacctcaatcagctgggtaatctgctgcatggagaggagcaatttgtctcagccgatgccggctaccaaggggcgccacagcgcgaggagctggccgaggtggatgtggactggctgatcgccgagcgccccggcaaggtaagaaccttgaaacagcatccacgcaagaacaaaacggccatcaacatcgaatacatgaaagccagcatccgggccagggtggagcacccatttcgcatcatcaagcgacagttcggcttcgtgaaagccagatacaaggggttgctgaaaaacgataaccaactggcgatgttattcacgctggccaacctgtttcgggcggaccaaatgatacgactggcacaggcagatgacgccgccccggcagcgggcagtacactggacaaaatcgccaaaaacggtgtgattgtcgtcggtcaccgtgaatcttcagtgcctttctcttattacgacaatcagcaaaaagtggtgggttactcgcaggattactccaacgccattgttgaagcagtgaaaaagacactcaacaaaccggacttgcaggtaaaactgattccgattacctcacaaaaccgtattccactgctgcaaaacggcactttcgattttgactgtggttctaccaccaacaacgtcgaacgccaaaaacaggcggctttctctgacactattttcgtggtcggtacgcgcctgttgaccaaaaagggtggcgatatcaaagattttgccaacctgaaagacaaagccgtagtcgtcacttccggcactacctctgaagttttgctcaacaaactgaatgaagagcaaaacatgaatatgcgcatcatcagcgccaaagatcacggtgactctttccgcaccctggaaagcggtcgtgccgttgcctttatgctggatgacgctctgctggccggtgaacgtgcgaaagcgaagaaaccagacacctggaacatcgtcggcagccgcagcccaggaggctacgggtgtatttgc

SEQ ID NO: 123288 - DNA, 1572 bp, Homo sapiens
atgcaagttattggaaccggtcattttctccttggggaacttataaccgacacccacgatgaaaccgtcagtgcgccagtcgccactgccggggccttcataagcaatatcaatggccacggattcggtcgggttaaactgcacgccagctccccacgccagagacgtgttgctgtggcgaccgtcatcacttccggcgggcaatgccgacggccctatccgctggagaccatgctgcgtattcactgcatgcagcattggtacaacctgagcgacggtgccatggaagatgccctgtacgaaatcgcctccatgcgcctgtttgcccgattatccctggatagcgccctgccggatcgcaccaccatcatgaatttccgccacctgctcgagcagcatcaactggcccgtcaattgttcaagaccatcaatcgctggctggccgaagcaggcgtcatgatgacccaaggcactttggtggatgccaccatcattgaggcacccagctctaccaagaacaaagagcagcaacgcgatccggagatgcatcagaccaagaaaggcaatcagtggcactttggcatgaaggcccacattggtgtcgatgccaagagtggcctgaccctcagcctggtcaccaccgcggccaccgagcatgacctcaatcagctgggtaatctgcttcatggagagaagcaatttgtctcagccgatgccggctaccaaggagcgccacagcgcgaggagctggccgaggtggatgtggactggctgatcgccgagcgtcccggcaaggtaaaaaccttgaagcagaatccgcgcaagaacaaaacggccatcaacatcgaatacatgaaagccagcatccgtgccagggtggagcacccgtttcgcatcatcaagcggcagttcggcttcgtgaaagccagatacaaggggctgctgaaaaacgatagtgtgtgtcttactggctctaaggataatgtactgctggtgatccatcactacggtgatagtagtgtcgtcatcgtgcgaactgaccatcttgtcatcggcaaggtatttttctttggtatacgggtccgtcacctcctggtattccagtttgatgttatcggcaatacacagcgcattcatcaggggctggacggttttttcctgcatatccacgaggtagtagtaactgccatcctcgcagccatcgggcgactggcggtggaagagaacatggcgctgttgatggaacaggctatcgccaacgaaggcctgttttatcgcctactctacctgcagcgcagtctcaccgccgccagcagtctcgacgatatgctgatgcgctttcaccgctgggcgcgcgatctcggcctggcagagctgctggtggtgctaccggaagcgaaagcggtgggatcggtggcgatgtcgatgctgggaagcgatgctgatttgggtgtcgtgctgtttaccagtcgcgatgccagtcactatcaacaggggcaaggaacgcagttacttcatgaaattgcgctgatgttgccggagcttctggagcgttgtattgaacgcgtatga

SEQ ID NO: 123289 - DNA, 1656 bp, Homo sapiens
atgtgtagcttcaggtcgcagacgttttgcagcagcagtcgcttcacgttcgctcgcgtatcggtgattcattctgctaaccaccgggtcctcaacgacaggagcacgatcatgcgcacccgtggccaggacccaacgctgcccgagatgcgccgcgtgcggctgctggagatggcggacgcgatggatatgttctgccaagggttgcggtacggcccgttgccagcgcctgtgcgccaacaagctgctatcataataccctgtcatcgggtggtccgtggtgatggcacactttccggttaccgctggggcgtgtcgcgtaaagcgcaactcgtgcgccgcgaagctgaaaatgaggagaggccaatcaatcgtggctggccgaaacagccgtctgatgacccaaagcactttgtgatgcccaccatcattgaggcacccagctctaccaagaacaaagagcagcaacgcgatccggagatgcatcagaccaagaaaggcaatcagtggcactttggcatgaaggcccacattggtgtcgatgccaagagtggcctgacccacagcctggtcaccaccgcggccaacgagcatgacctcaatcagctgggtaatctgcttcatggagagaagcaatttgtctcagccgatgccggctaccaaggagcgccacagcgcgaggagctggccgaggtggatgtggactggctgatcgccgagcgtcccggcaaggtaaaaaccttgaagcagaatccgcgcaagaacaaaacggccatcaacatcgaatacatgaaagccagcatccgtgccagggtggagcacccgtttcgcatcatcaagcggcagttcggcttcgtgaaagccagatacaaggggctgctgaaaaacgataaccaactggcgatgttattcaccctggccaacctgtttcgggtggaccaaatgatacccgtctataccgacctgcttgttaactacacgtaccgcatcgcttttgaagccgccgggggtcaggacttcggtctgctggcagcaattgccacgctgatcttcctgctggtggcgattatgttcccgctgctgatggtcgtcgctatctcgctgcgtcagggaaactttgcgaccggcagcctgatcccggagcaaatctcctgggatcactggacactggcgttaggttttagcgttgaacaggctgatggtcgcattacgccaccgccattcccggtactgctgtggctgtggaactcggtaaaggtcgccgggatttccgcgattggcattgtggcgctctccaccacctgcgcctacgctgtcgcccgtatgcgcttcccaggcaaagcgacgctgctgaaaggaatgctgatttcccagatgtccccggcagcactctcactggtcgcgtcgtatgcgttgtttgatcgtctggcgcgcgtggtgtccatgccgtctaccgacgcatttgacaagcaggatgctgcttaccgtgaatccgtactgccgaaagcggttactgcacgcgttgctgtagaagcgggtattgctgactactggtacaagtatgttggcctgaacggtgctatcgtcgagctgctgtttgaagagttcggcttcactgttgataacgttgttgcgaaagcaaaagaactgctgtaa

SEQ ID NO: 123290 - DNA, 2496 bp, Homo sapiens
atgacgcagattttcacgggtacattagtggaagccgatcctttccacgccgtgacgctcgttgccaatcacgacacccaaccgttgcaagccctcgaagcgccggtcgaaccgtggtttaaaccgctggcgtatgccttaattttgttgcgggaaaatggcgttccttcggtattctatccggacctctacggtgcgcattacgaagatgtcggtggtgccgggcaaacctatccgatagatatgccaataatcgaacagcttgatgagttaattctcgcccgtcagcgtttcgcccacggtgtacagacgttatttttcgaccatccgaactgcattgcctttagccgcagtggcaccgacgaatttcccggctgcgtggtggtcatgtcgaacggggatgatggcgaaaaaaccattcatctgggagagaattacggcaataaaacctggcgtgattttctggggaaccggcaagagagagtagtgaccgacgaaaacggcgaagcaaccttcttttgcaacggcggcagcgtcagcgtgtgggttatcgaagaggccgccaacaatcgtcagtacgactacggagctggccataaaataccagttatcaattacactgacgtgcatttgcggattgaacgcagctgccgcttccgtgctgatccccgacagcaacacgagctgcaactctccagcaaactggcagttcatgatgtgctgaccaatatttataatcggcgctactttttcaacagcgtagagtcattattgtcgcgacctgttgttaaggacttctgtgtcatgctggttgatattaatcagttcaaacgcatcaatgcccaatggggacatcgtgtgggtgataaagtgctggtttcaattgtcgatattatccagcaaagcatccgccccgatgatattttagcgcgactggagggtgaggtgtttggcttgctatttaccgaactcaatagtgcccaggcaaaaatcattgcggaacgtatgcgtaaaaatgtcgaactcctgaccggctttagtaacagatatgatgttcctgaacaaatgaccatcagtattggcacggttttttcaacgggtgacacgcgtaatatctcgcttgtcatgacggaagcagataaagccttacgcgaagcgaaaagcgaggggggcaacaaacattggtacaacttgagcgatggcgcgatggaagatgctctgtacgaaatcgcctccatgcgtctgtttgcccggttatccctggatagcgctttgccggaccgcaccaccatcatgaatttccgccacctgctggagcagcatcaactggcccgccaattgttcaagaccatcaatcgctggctggccgaagcaggcgtcatgatgactcaaggcaccttggtcgatgccaccatcattgaggcacccagctcgaccaagaacaaagagcagcaacgcgatccggagatgcatcagaccaagaaaggcaatcagtggcactttggcatgaaggcccacattggtgtcgatgccaagagtggcctgacccacagcctggtcaccaccgcggccaacgagcatgacctcaatcagctgggtaatctgctgcatggagaggagcaatttgtctcagccgatgccggctaccaaggggcgccacagcgcgaggagctggccgaggtggatgtggactggctgatcgccgagcgccccggcaaggtaagaaccttgaaacagcatccacgcaagaacaaaacggccatcaacatcgaatacatgaaagccagcatccgggccagggtggagcacccatttcgcatcatcaagcgacagttcggcttcgtgaaagccagatacaaggggttgctgaaaaacgataaccaactggcgatgttattcacgctggccaacctgtttcgggcggaccaaatgatactttgtccagtctttgtccaccacataccacggttcttcggtaccttctttggtgccaccgatacccagacctttacgctgaccgagagtgtgatacatcagcccctggtgctcaccaatttcatcgccatcgacggtaatgattttgcccggttgcgccgggagataacggcccaggaactcgcggaatttacgttcgccaatgaagcaaatgccgaccaagatcttcagcaatcttacgcactgcggtttttccagttcgccgaccgggaacaggctttgcgcaatctgctcatggctgagcgtataaaggaagtagctctggtctttattgctgtccagaccacgcagcaggcggctcttgccatcgacatcggcccgacgtacgtaatgaccggtagcgatataatcggcacctacaaagaggggttctacacggattgggttaaaatgatacctggtcacacgtttttatctgaaggaagaatatttcaaggtgatataccctacaagcccttgacgcggaggaatgaatgtgatgggagtgatgtatctgaatag

SEQ ID NO: 123291 - DNA, 3148 bp, Homo sapiens
atgcagtattggggaaaaatcattggcgtggccgtggccttactgatgggcggcggcttttggggcgtagtgttaggcctgttaattggccatatgtttgataaagcccgtagccgtaaaatggcgtggttcgccaaccagcgtgagcgtcaggcgctgttttttgccaccacttttgaagtgatggggcatttaaccaaatccaaaggtcgcgtcacggaggctgatattcatatcgccagccagttgatggaccgaatgaatcttcatggcgcttcccgtactgcggcgcaaaatgcgttccgggtgggaaaatcagacaattacccgctgcgcgaaaagatgcgccagtttcgcagtgtctgctttggtcgttttgacttaattcgtatgtttctggagatccagattcaggcggcgtttgctgatggttcactgcacccgaatgaacgggcggtgctgtatgtcattgcagaagaattagggatctcccgcgctcagtttgaccagtttttgcgcatgatgcagggcggtgcacagtttggcggcggttatcagcagcaaactggcggtgctgcgtggccgctctccatccttgttattgacaaattaatatatcgtcgcccttgctgtggaacactgcagccagatgtgattattacaccggttctgccggtggcctgcattagcacctggcgccatactgaggcagatcccaaagaaacagcaaagggttggcctccactactctccgatgtcctatgtgtcttggagataccgcgtctgccactggacgataacggtattctgtttatcgaaaacgttggcaacctcgtatgcccggccagcttcgatctcggtgaaaaacacaaagtggcggtgctttccgttaccgaaggtgaagacaaaccactgaaatatccgcatatgtttgccgccgcctcgctgatgctgctcaacaaagttgacctgttgccgtatctcaactttgacgttgaaaagtgcatcgcctgcgcccgcgaacggcgaagggatggaccagtggctgaactggctggagacacagcgatgtgcataggcgttcccggccagatccgcaccattgacggcaaccaggcgaaagtcgacgtctgcggcattcagcgcgatgtcgatttaacgttagtcggcagctgcgatgaaaacggtcagccgcgcgtgggccagtgggtactggtacacgttggctttgccatgagcgtaattaatgaagccgaagcacgcgacactctcgacgccttacaaaacatgtttgacgttgagccggatgtcggcgcgctgttcgccctggcgcagacccgcgagcaaggctacgccctggacagcgaagagaacgagcagggcgtgcgctgcgtggcggtgccggtgtggaaccacgagtcccgcgtcatcgacgacctgagcctgtcgacgctgacctcccgcgctggtaatggccggcgaccttatccgctggaaaccatgctacgcattcactgcatgcagcattggtacaacctgagcgatggcgcgatggaagatgctctgtacgaaatcgcctccatgcgtctgtttgcccggttatccctggatagcgccttgccggaccgcaccaccatcatgaatttccgccacctgctggagcagcatcaactggcccgccaattgttcaagaccatcaatcgctggctggccgaagcaggcgtcatgatgactcaaggcaccttggtcgatgccaccatcattgaggcacccagctcgaccaagaacaaagagcagcaacgcgatccggagatgcatcagaccaagaaaggcaatcagtggcactttggcatgaaggcccacattggtgtcgatgccaagagtggcctgacccacagcctggtcaccaccgcggccaacgagcatgacctcaatcagctgggtaatctgctgcatggagaggagcaatttgtctcagccgatgccggctaccaaggggcgccacagcgcgaggagctggccgaggtggatgtggactggctgatcgccgagcgccccggcaaggtaagaaccttgaaacagcatccacgcaagaacaaaacgggcatcaacatcgaatacatgaaagccagcatccgggcccaggtggagcacccatttcgcatcatcaagcgacagttcggcttcgtgaaagccagattcaaggggttgctgaaaaacgataaccaaatgggcgatgtttttcacgctgggcaacctgtttcgggcggaccaaatgatacacagtcaatattccgcgttgaggagacatcaagatggatcagtctcgtttaagccggagacacacacctgcgatgctcatcgccctgctctaaagccggcgaatgattatgtccgtaccttcttccgtggcgttgatattagtcaggtattcagtgcgaaagatattgcccgccggacaccgaatggcttaattcgtaaaacccctggcttcggcccacgttcggcactgaaattattgcaggatgaagatcgcgaatatggctacgttatcgaacgcggtaataagtttgtcggcgcagtctccatcgattcgcttaaaaccgcggctgtccctcctgttcagctactgacggggtggtgcgtaacggcaaaagcaccgccggacatcagcgctatctctgctctcactgccgtaaaacatggcaactgcagttcacttacaccgcttctcaacccgccgggcagtgacgtcatcgtctgcgcggaaatggacgaacagtggggatacgtcggggctaaatcgcgccagcgctggctgttttacgcgtatgacagtctccggaagacggttgttgcgcacgtattcggtgaacgcactatggcgacgctggggcgtcttatgagcctgctgtcaccctttgacgtggtgatatggatgacggatggctggccgctgtatgaatcccgcctgaagggaaagctgcacgtaatcagcaagcgatatacgcagcgaattgagcggcataacctgaatctgaggcagcacctggcacggctgggacggaagtcgctgtcgttctcaaaatcggtggagctgcatgacaaagtcatcgggcattatctgaacataaaacactatcaataa

SEQ ID NO: 123292 - DNA, 1680 bp, Homo sapiens
atgagtcatcaacttaccttcgccgacagtgaattcagcagtaagcgccgtcagaccagaaaagagattttcttgtcccgcatggagcagattctgccatggcaaaacatggtggaagtcatcgagccgttttaccccaaggctggtaatggccggcgaccttatccgctggaaaccatgctacgcattcactgcatgcagcattggtacaacctgagcgatggcgcgatggaagatgctctgtacgaaatcgcctccatgcgtctgtttgcccggttatccctggatagcgccttgccggaccgcaccaccatcatgaatttccgccacctgctggagcagcatcaactggcccgccaattgttcaagaccatcaatcgctggctggccgaagcaggcgtcatgatgacccaaggcactttggtggatgccaccatcattgaggcacccagctctaccaagaacaaagagcagcaacgcgatccggagatgcatcagaccaagaaaggcaatcagtggcactttggcatgaaggcccacattggtgtcgatgccaagagtggcctgacccacagcctggtcaccaccgcggccaacgagcatgacctcaatcagctgggtaatctgcttcatggagagaagcaatttgtctcagccgatgccggctaccaaggagcgccacagcgcgaggagctggccgaggtggatgtggactggctgatcgccgagcgtcccggcaaggtaaaaaccttgaagcagaatccgcgcaagaacaaaacggccatcaacatcgaatacatgaaagccagcatccgtgccagggtggagcacccgtttcgcatcatcaagcggcagttcggcttcgtgaaagccagatacaaggggctgctgaaaaacgataaccaactggcgatgttattcaccctggccaacctgtttcgggtggaccaaatgatacagctgccaacgtatgagttatcgtcgggtataggcgctgttcgcagacaggcagaacttgatggtacgcctgcgatcaattccaaacgtgtttaccggatcatgcgccagaatgcgctgttgcttgagcgaaaacctgctgtaccgccatcgaaacgggcacatacaggcagagtggccgtgaaagaaagcaatcagcgatggtgctctgacgggttcgagttctgctgtgataacggagagagactgcgtgtcacgttcgcgctggactgctgtgatcgtgaggcactgcactgggcggtcactaccggcggcttcaacagtgaaacagtacaggacgtcatgctgggagcggtggaacgccgcttcggcaacgatcttccgtcgtctccagtggagtggctgacggataatggttcatgctaccgggctaatgaaacacgccagttcgcccggatgttgggacttgaaccgaagaacacggcggtgcggagtccggagagtaacggaatagcagagagcttcgtgaaaacgataaagcgtgactacatcagtatcatgcccaaaccagacgggttaacggcagcaaagaaccttgcagaggcgttcgagcattataacgaatggcatccgcatagtgcgctgggttatcgctcgccacgggaatatctgcggcagcgggcttgtaatgggttaagtgataacagatgtctggaaatatag

SEQ ID NO: 123293 - DNA, 1183 bp, Homo sapiens
tcagagggagaggagtccagtagcagggcctgcagcagcaggcttcgtgtcacaggtctcttctgaactgggtctggaaaatccagggaactctgagaggtctgatgtagcagtcaggctggggtcctggacaccaagctcagggaggggtactgaggctactccttccttgaaagtaggactggggtaagggtggcagactaggtcagactggccacactgcggggccggttcctgtagcaggaggctgctgtctgtgcctcggaggccgaagccgaactgtcgcttgatgatgcgaaatgggtgctccaccgtggcccggatgctggctttcatgtattcgatgttgatggccgttttgttcttgcgtggatgctgtttcaaggttcttaccttgccgggggcgctcggcgatcagccagtccacatccaccttgggccagctcctcggcggtgtgacgccccttggtagccggcatagggtgagacaaattgctactctccatgcagcagattacccaactgattgaggccatgctcgttggccgcggtggtgaccaagctgtgggtcaggccactcttggcatcgaccaccaatgtgggccttcatgccaaagtgccactgattgcctttcttggtctgatgcatctccggatcgcggtgatagctctttgttcttggtcgagctgggtgcctcaatgatggtggcatcgaccaaggtgccttgagtcatcatgacgcctgcttcggccagccagcgattgatggtcttgaacaattggcgggccagttgatgctgctccagcaggtggcggaaattcatgatggtggtgcggtccggcaaggcgctatccagggataaccgggcaaacagacgcatggaggcgatttcgtacagagcatcttccatcgcgccatcgctcaggttgtaccaatgctgcatgcagtgaatgcgtagcatggtttccagcggataaggtcgccggccattaccagccttgggggtaaaacggctcgatgacttcccaccatggttttgccatgggcaggaatctgcttccatggcggggacaagaaaatctcttttctggtctgacggcgcttactgctgaattcactgtcggcgaaggtaagttgatgactcatgatgaaccctgttccatggctccagatgacaaacat

SEQ ID NO: 123294 - DNA, 3488 bp, Homo sapiens
atgttcgcaagggtctcgactacacccgtcactcgatacgagatgtataggaaaacgcggtctactcgtctagaggacaacaacgcactaagtcaatcatgcaagccgctgccgttcagcgaagttactggatcgaaaggtaaagcggataaagaaaaggtgggcgattacgttttttgcctgaaggcgcagggacgatataacggtgaaccgctcacgggtacgggaaaaataggcggtatgctggcgctgcgtggcgaagggacgccgtttccggtacaggctgatttccgctctggtaacacccgtgttgcttttgatggcgtcgtgaatgacccaatgaagatgggcggtgtcgatttacggcttaaattttctggcgattcactgggtgatctctatgaactgacgggcgttctgctgcccgataccccgccgtttgaaacggatggtcggctggtagcgaaaatcgacactgaaaaatcgtcggtctttgattatcgcggttttaatgggcgaattggtgatagcgatatccacggttctctggtctacaccaccggaaagccacgaccaaaactggaaggtgatgtcgagtcgcggcaattgcggctggcggacctgggaccgttgattggcgttgattccgggaaaggggcagaaaagtcgaaacggtctgaacagaagaagggcgaaaaaagcgttcagcctgcgggcaaagtgctgccttatgaccgcttcgaaaccgataaatgggacgttatggatgccgatgttcgcttcaaagggcggcgcattgagcatggcagtagcctgccgattagcgatctttctactcatatcatcctcaaaaatgctgacctgcgcctgcaaccgctgaaatttggcatggcgggcggcagcattgcggcgaatattcatctggaaggcgataaaaagccgatgcaggggcgggcagatattcaggctcgtcgactgaaactgaaagaactgatgcccgatgtggaactgatgcagaagacgctgggggaaatgaacggtgacgcggaactacgcggtagcggtaactcggtggcggcacttttaggcaacagtaacggcaacctgaaactgttgatgaatgacgggctggtgagccgcaacctgatggagattgttgggctgaatgtcggcaactacattgtcggtgcgatatttggtgatgatgaggtgcgggtgaactgcgcggcggcgaatctgaatattgccaacggcgtggcgcgcccgcagatttttgctttcgatactgagaacgcgttgattaatgttaccggcacggcaagttttgcttcggaacagctggatttgactattgatccggagagtaaaggaattcggattatcacactgcgttcgccgctgtatgtgcgggggacgtttaaaaatccgcagtctggttgatggtctgaactttgctgctcagtaccaaggcaaaaacgatcgtagcgatttcgataactacactgaaggtaacggtgatggcttcggtttctctgctacctatgaatacgaaggattcggtatcggtgcaacttatgcgaaatctgatcgtaccgacactcaagttaatgcagggaaagttcttcctgaagtatttgcttccggtaaaaatgcagaagtttgggccgcaggtctgaaatatgacgctaacaacatttacctggccactacctattctgaaacccagaatatgactgtatttgctgatcacttcgttgctaataaagcccaaaacttcgaagctgttgcacaatatcagttcgatttcggtctgcgtccgtccgttgcttacctgcaatctaaaggtaaggatcttggagtatggggcgatcaggacttagtcaaatatgttgatgtaggtgcaacctattacttcaacaaaaatatgtctactttcgttgattacaaaatcaacctgcttgacaaaaatgacttcactaaggaagggttcatcatgagtcatcaacttaacttcgccgacagtgaattcagcagtaagcgccgtcagaccagaaaagagattttcttgtcccgcatggagcagattctgccatggcaaaacatggtggaagtcatcgagccgttttaccccaaggctggtaatggccggcgaccttatgcgctggaaacccatgctacgcattcactgcatgcagcattggtacaacctgagcgatggcgcgatggaagatgctctgtacgaaatcgcctccatgcgtctgtttgcccggttatccctggatagcgccttgccggaccgcaccaccatcatgaatttccgccacctgctggagcagcatcaactggcccgccaattgttcaagaccatcaatcgctggctggccgaagcaggcgtcatgatgactcaaggcaccttggtcgatgccaccatcattgaggcacccagctcgaccaagaacaaagagcagcaacgcgatccggagatgcatcagaccaagaaaggcaatcagtggcactttggcatgaaggcccacattggtgtcgatgccaagagtggcctgacccacagcctggtcaccaccgcggccaacgagcatgacctcaatcagctgggtaatctgctgcatggagaggagcaatttgtctcagccgatgccggctaccaaggggcgccacagcgcgaggagctggccgaggtggatgtggactggctgatcgccgagcgccccggcaaggtaagaaccttgaaacagcatccacgcaagaacaaaacggccatcaacatcgaatacatgaaagccagcatccgggccagggtggagcacccatttcgcatcatcaagcgacagttcggcttcgtgaaagccagatacaaggggttgctgaaaaacgataaccaactggcgatgttattcacgctggccaacctgtttcgggcggaccaaatgatactttcaccttccatgatacacagatcaaaagctgtaccctgcttgatggctcaagattcctatatagtcttctttgtccgcagattattaattaacactttactatgccaaacacatgcattacagatcccaccgacagtcagagaagggtgtgaacagaacacagcagaaatgtcattgttgcaccagctccatgccaggcgctgggggagattcaatggtgtacaagacctagccctgattcacaaggcccctgacctaatggtgagctggagctacgcgtacaaggcaagagccttaaccttcatcacccccaagtggatggtctccattttccaagctggcagctcaccccctctctctgtgcctctgctgctgcggtccacacacctggaatgccctctgcaccctgcacacggcatcccccctccttcaagcatcgctgctcatctgaaatatggagacaaaaatgccttcctatccacctcacagcgcaggaataagccccaaatagaaaaggtggatgggaaagattga

SEQ ID NO: 123295 - DNA, 876 bp, Homo sapiens
atgaagctcgtgaggaagaacatcgagaaggacaatgcgggccaggtgaccctggtccccgaggagcctgaggacatgtggcacacttacaacctcgtgcaggtgggcgacagcctgcgcgcctccaccatccgcaaggtacagacagagtcctccacgggcagcgtgggcagcaaccgggtccgcactaccctcactctctgcgtggaggccatcgacttcgactctcaagcctgccagctgcgggttaaggggaccaacatccaagagaatgagtatgtcaagatgggggcttaccacaccatcgagctggagcccaaccgccagttcaccctggccaagaagcagtgggatagtgtggtactggagcgcatcgagcaggcctgtgacccagcctggagcgctgatgtggcggctgtggtcatgcaggaaggcctcgcccatatctgcttagtcactcccagcatgaccctcactcgggccaaggtggaggtgaacatccctaggaaaaggaaaggcaattgctctcagcatgaccgggccttggagcggttctatgaacaggtggtccaggctatccagcgccacatacactttgatgttgtaaagtgcatcctggtggccagcccaggatttgtgagggagcagttgtgcgactacctgtttcaacaagcagtgaagaccgacaacaaactgctcctggaaaaccggtccaaatttcttcagattgttgatactgaatacgtgctgaagcgacttcggcactgtattgtttatcctcacaacatcgcaaccgtgctggtccccggcggcgcgacgctgcccgcaaaggatggagaagacaacggcatagatatctggcaatgtatccagtga

SEQ ID NO: 123296 - DNA, 450 bp, Homo sapiens
atgaccaagaataaccggacattccgcaatgatagtaagataccgatctgtacggtggttctcaaacttaaacatgcatcaggatcacctggaggaccagctacaagaaggttcctgggctacaccccaaccccagagtttcttattgaggagcctgaagtgggcctggaatgtgcatttataacaagttcccagatgatgctgatgctgctgacgcgggaatacggctacagcgccacgggcaggctggagagtgtgcgcaccctcgcaccagacctggacatccgcatcccgtatgccacggacccggcgggcaaccggctgccggacccggagctgcacccggacagtacactcacagtgtgggatcctatagagtctgcgtgctcacattcttccctttgttttagagtcactccaacttgccacctcctcccagaagccttctga

SEQ ID NO: 123297 - DNA, 1107 bp, Homo sapiens
ctacacgaaggtttttgcgctggatgtggctgcccggcaccgggtgcagtttgcgatgccggagtctgatgcggttgcgatgctgaaacaattatcctgagaataaatgccttggcctttatatggaaatgtggaactgagtggatatgctgtttttgtcgcctggccctgagagagttgcagcaagcggtccacgctggtttgccccagcaggcgaaaatcctgtttgatggtggttccgaaatcggcaaaatccattaattgcgttgcgctcactgcccgctttccagtcgggaaacctgtcgtgccagctgcattaatgaatcggccaacgcgcggggagaggcggtttgcgtattgggcgccagggtggtttttcttttcaccagtgagacgggcaacagctgattgcccttcaccgcctggccctgagagagttgcagcaagcggtccacgctggtttgccccagcaggcgaaaatcctgtttgatggtggttccgaaatcggcaaaatccctgcgctgttgtcaggctttgtttgccgtaatgtttaccggaatagtcagtgtagaataaacggatttttccgtcagatgtaaaggttgcagaaccggaccattcttgcgtctgatctttcaggatcggatcgttggcgtcgaacttatcgctgtctttaaagacacggcccgcgtttttccagctgtcgattgagttgtcgccgaccttttgataaaacatgtagattgatgtgtcatcagcgtctttcgggcttcccgcaagagcaaacacaacgtgatagccgttgtattcagctactgttccgtcagcgttttgcagcggccagctgtcccacacatcaagtccttttgcagactcaatatttttaatcgttgattgatcgaattgaggcacttggtatttttcgttttgctgctgtttagggatctgcagcatatcatggcgtgtaatatgagagacgccgtacgtttctttgtatgctttttggttattttctttcgcgaaggcttgagtcgctcctcctggcactggcgctggcggcagaaggggcgaaagtcggcattctggacgccgatatctacggcccat

SEQ ID NO: 123298 - DNA, 2964 bp, Homo sapiens
ttatccaacagatatccgatcacctgccgctttcaggaaccagtcacgcgcgctatgggcgtaggtcatagtttcctgagtggtgaaggttttagatgctaccaagaacagcgtggtttccgggtttacttttttcagcacttccgcgatgtgagtcccatcgacgttagaaacaaagtgcatgttcaggtggtttttgtacggacgcagagcttcggtcaccatgtatgggccgaggtcagaaccgccgatcccgatgttcactacgtcagtgattgctttgccggtataacctttccactcaccggaaataatcgcttctgagaaggttttcatcttctccagcaccgcgttgacttccggcattacgtctttgccatcaaccaaaatcggggtattgctacggttacgcagcgctacgtgcagcacggcgcggttttcagtgcggttgatcttctcgccagagaacatcgacttaatcgcgcccgccagatcgcactctttcgccagatcctgtaatttcgccagcgtctcttcagtgatgcggtttttggagtaatccaccagcatctgatcgtcgaaggttgcggagaacttagaaaaacgatcgccgtctttagcaaaaagatcggcgatcgtaacgtctttcatttcatcgaagtgtttctgtagtgcctgccaggcagcggtctgcgttggattgatgtttttcattagcaatactcttctgattttgagaattgtgactgcgctagcgcaggccagaagaggcgcgttgcccaagtaacggtgttggaggagccagtcctgtgataacacctgagggggtgcatcgccgaggtgattgaacggctggccacgttcatcatcggctacaggggctgaatcccctgggttgtcaccagaagcgttcgcagtcgggcgtttcgcaagtggtggagcacttgcccaggcctggcagcgtttgtttgtcggcccgtgggcactgccgtctccgccgtgggggtcggtctggctggatcgcgaatctgtgctgtttggcgattcacactgggcctcgtcagtggatgcccgagacaggcttccgttgaattgagccaacgacggagatcttcggtcctgtgtgacgctctcgtgccacatgtcccacgcatcagaagcggctgaccctcccgccaccaccgcatttacagacgaacatatgtcggtcaagctacgccgaacagtcggcgtggcctgttcggtgtgccccggctgggtgacgtccggccatccggtcaatccggctgcttccgtgcaaaggtccttcccggtgataccgacatcgccctgcccggcccgctgccgttcattctctcccgcacagcttcgcgataacacactgatactcagtgataacggcggcctgaatcctgtattttgagctcctgtttcccggtgaggacggttaccgccgctgcgagtctctgtggctggtgcgcggcggtgtggcgaaactggatcaaggtcaccggctggccgcactctggcaggcgctgtcggaagaactccggttaactccgcatcgttatctggcgacaaacagtccgcaggggccgtggtggctgctcggttggtgtgagcgggtgccggaagcggatgaggtgctgcctgcgccgctgccgccgtaccgggtactgaccgggctggtggaccgcatctggcgttcggaagacgtatccgcagcttcagggcttcatcacgataaccgtaacgctccatccctttcagaccaaaccagaactgatccacccatacgcgcccacgccagtagatatcagcgccaaaagccggatggttaacgccgccgttcccagcgggacaaaggtgttgaacgttaaacagcggcgaccagccttccggccctttaccgcgctcaacaatcggtttgcccgcgcagccgttcgccagtggtttatcttcaatacgtacgtcatagtagaactgggtagtcgggtcgaacatacaggtgttgatgtagtccgcgagctgctgtgccaactggcgatagcgtttggcctcttctggcttaccgaggatggttgccatctccgccagataatggttatcgctgtacatatagctggcctgatccaccgactcctgcaatagcgagtagcccagcaacgttccgtcctgactgcggttttcggcgaatttcaccgtccagtcgctacgtttgccgccattagcgacatatttatccaactgttctttgtcgataaacccaaagacggcggcatcatcacgccccgattcccacgatgcagcaacctgtgccggaatttccagactgtcgtactggcctttctccaccacgcgggcgtagttgttcagcccagactgcgtctcttctttatcgccttttttcaccgtaaacagcatctcgccgctctcagtgttgtgggctttgtcgcgggtcgcgccatattccggcacgccgttgccgttgtgatcgcggttacgtaaccaccagtcgtgataggccaccagtttcgggtacatctctgccacccaggttttatcttgggtgacgttatacacttccatcaccgaccaggcggcaaggctgggtttggtattacgttcgttccagttgccgccatcgccaccacgctcggggctaaggttccacgctatcaggtcggggacaaagcccacatcctgcggacgcacgctatcgccaggctggatctgccaggagaagaccgcgcggatattctctttggcgatgtccggattgaaatgcgccatcgcaaacgcctgcttccaggtatcccacgggcaggtctgattggcggagaaccagcgcccggtcaccgacggtgtaacggtgttaaatttcaccgcaccgcccggtgagcgccagtaacggtgaacgtttcgatcgctttcaccgcgacgcgcgtctgttccgggtcgcat

SEQ ID NO: 123299 - DNA, 3294 bp, Homo sapiens
atgtgcggcccgcggcggctcgcagctcccggcagcagcctcggcagcttcggccgcgcctcgagaggcggccgcagaggctccagcggcggccgagcggccgagcccgggctgggagacaccatgcgccgcgtccttcggctgctcctcggttgcttcctcaccgagctgtgcgcccgcgtgtgccgggcgcaggagcgagcgggacacgggcagctggcgcaactgggcggcgtgttgctgctggcggggggcaaccgctccggggccgcctccggagaggccagcgagggcgctgaggcatcggacgcgcccccgacccgggcgcccacgccggacttctgccggggctacttcgatgtcatgggccagtgggacccgccgttcaactgcagctcgggcgacttcatcttctgctgcgggacttgtggcttccggttctgctgcacgtttaagaagcggcgactgaaccaaagcacctgcaccaactacgacacgccgctctggctcaacaccggcaagccccccgcccgcaaggacgaccccttgcacgaccccaccaaggacaagaccaacctgatcgtctacatcatctgcggggtggtggccgtcatggtgctcgtgggcatcttcaccaagctggggctggagaaagcgcaccggccccaaagggagcacatgtccagcctctccgctgggggatgtcaccgggaagccaacttcggcttggaacacggagaaggggcgctgggctcagcacagggggtatccctctcccggtcccgcagccccgcttgttctccgctcttggccaatcccactgtttcggcccccgcctctgttgccactttcctcaccagcatggatcttgccctctcctttgtgtcactcactaaaggctcaaagtctggttcaagcaacgatttgatcaacgaatttaacagcccgcaatgcatgctctgtaccgatgaccgtaacccgtgggagatcgcccatgaaggacacatcgatgccttaattcgccgcctgatcgaacaacacaatgtgccgctgcatgtggcatatcgcgtcgccagctggtcgacggcgcgccactttggtctgaatcacctcggcttactggcacccggcaagcaggccgatatcgtcctgttgagcgatgcgcgtaaggtcacggtgcagcaggtactggtgaaaggcgagccgattgatgcgcaaaccttacaggcggaagagtcggcgagactggcacaatccgctccgccatatggcaacaccattgcccgccagccagtttccgccagcgactttgccctgcaatttacgcccggaaaacgctatcgggtcattgacgtcatccataacgaattgattacgcactcccactccagcgtctacagcgaaaatggttttgatcgcgatgatgtgagctttattgccgtacttgagcgttacgggcaacggctggctccggcttgtggtttgcttggcggctttggactgaatgaaggtgcgctggctgcgacggtcagccatgacagccataatattgtggtgatcggtcgcagtgccgaagagatggcgctggcggtcaatcaggtgattcaggatggcggcgggctgtgcgtggtacgtaacggccagaaattactcttcagaatccccagcttcagcatcatcagcggtttcgtttgcgaaatcatcgcgacgctcacggcgctcgtctttcgctttaaccatcggagatgcttcggtaacagcgtgcttggtacgcataaccatgctgcggataacggcatcgttgaagcggaaggtagtttccagctcatcgatcacttcctgcggagcttcaacattcatcagaacgtagtgtgctttgtgcagtttgttgatcgggtaagccagctgacggcggccccagtcttccagacggtggatcttgccttctgcaccagtgatggcagcagtgtagcgctcgatcatgcccggaacctgttcgctctgacagaagggaataaaataaaaaatcgtcgcgaggaaaaacatcggtgccgaggccagtccaagctcaatattattattgataacgttgttaaagctgtaaacggcggcaaaagtcagcgagagcaagccgaatttgccgattgtattacgtttggtatcagacataacacatctccgaaaatgagtaggttgttatttgttatggaaataaccatcttcgatggtgactttgagaaccacttttttgaccgcgttattgcagataaaccgatacgcttcatggatatcgcaaataacgatttgcccttcgtggacctcaacgaacagttggataaatatgtcgctaatggcggcaaacgtagcgactggacggtgaaattcgccgaaaaccgcagtcaggacggaacgttgctgggctactcgctattgcaggagtcggtggatcaggccagctatatgtacagcgataaccattatctggcggagatggcaaccatcctcggtaagccagaagaggccaaacgctatcgccagttggcacagcagctcgcggactacatcaacacctgtatgttcgacccgactacccagttctactatgacgtacgtattgaagataaaccactggcgaacggctgcgcgggcaaaccgattgttgagcgcggtaaagggccggaaggctggtcgccgctgtttaacggtgcggcaacgcaggccaatgccgacgcggtggtgaaggtgatgctcgatcctaaagagttcaacacctttgtcccgctgggaacggcggcgttaaccaatccggcttttggcgctgatatctactggcgtgggcgcgtatgggtggatcagttctggtttggtctgaaagggatggagcgttacggttatcgtgatgatgccctgaagctggcggatacgttcttccggcacgccaaagggttaaccgccgatggaccaattcaggaaaattacaacccgctgacaggcgcacagcaagcacaccagatgtcagtgcgcgagttgtacaccgatgtcatcgaagagttttactgggttgcgctcccgcttacgacgcaaaattccctttcacaataccaacccgaatggcagtgctgggaacctgatgtcgaatggccaggcatgaccttcgaacaatttgtacgtgagtttgccgaatggatcagcctatcgattcattactgttacccggagtatgctcataaggtgtttcacagacagtactggcgtaataaatgggcaacttcatctgacctagcaatcccatga

SEQ ID NO: 123300 - DNA, 1575 bp, Homo sapiens
atgggcaaagacttcctgtctaatacaccaaaagcaatggcaacaaaagccaaaattgacaaatgggatctaattaaactaaagaacttctgctcagcaaaagaaaccaccatcagagtgaaaagacaacctacagaatgggagaaaattttcacaacctactcatctgacaaagggctaatatccagaatctacaatgaactcaaacaaatttacaagaaaaaaacaaacaaccccatcaaaaagtgggtgaaggacgtgaacagacacttctcaaaagaagacatttatgcagccaaaaatcacatgaaaaaatgctcaccatcactggccatcggggaaatgcaaatcaaaaccacaatcaccaaaattgacagaccgctagcaagactaataaagaagaaactagagaagaatcaaatagacgcaataaataatgacaaaggggatattaccactgatcccacagaaatacaaactaccatcagagaatattataaacacctctacacaaataaaccagaaaatctagaagaaatggataaattcctcgacacatacaccctcccaagactaaaccaggaagaagttgaatctctgaatagaccaataaaaggctctgaaattgaggcaataattaatagcttactaaccaaaaaaagtccagggccagatggattcacagccaaattctaccagaggtacaaggaggagctggtaccattccttctgaaactattccaatcaatagaaaaagagggaatcctccctaactcattttatgaggccagcatcatcctgatactaaagcctggcagagacacaaccaaaaaagagaattttagaccaatatccttgatgaacattgatgcaaaaagcctcaataaatactggccaaccgaatctagcaactcatcaaaagcttatccacatgatcaagtgggcttcatccctgggatgcagacggtatacgagccgggaagcttcacgccgctcatccgggtcgagacagagaacggcgagcgggaaaaagcgcagcggcgcagcctggcagagacgctccagcaggaagggagtgagaacggccacggcgtggtgttcccggctgaactggtgcggctgctggacaggctggaggaagaaatccgggcagaccgcgtgagcagtgaaagccgggcgtggcttgcgcagtgcgggctgacggtggagcaactggccagacaggtggagccggaatacacaccggcgcgaaaagctcatctttatcactgcgaccaccggggactgccgctggcgcttatcagcgaagacggcaatacggcgtggagcgcggaatatgatgaatggggcaaccagcttaatgaggagaacccgcatcatgtgtatcagccgtaccgtctgccagggcagcagcatgatgaggaatcagggctgtactataaccgtcaccggtactacgatccgttgcagggtcggtatattactcaggacccgatggggttgaaagggggatggaatttatatcagtatcctttaaatccactacaacaaattgaccctatagggatcctgtag

SEQ ID NO: 123301 - DNA, 2505 bp, Homo sapiens
atggcttggagaaacagtgtaaactggcagtgtaaacaagagccgggctttctacatcgtcggcatggtcgaaggaaattgactaacggcacaactcggagaagtttacaaaacaaggaggaagacttctacacctcacagccaggattccctgctctggctctcggctgctgcctcagggtgaatctgttgctaggtcatcgtggcatctctgcagggagctcatacagacccatcacatccaccccctgccacctctgcaagcttggacaggaggtgtttgccaaacctttaaatcttcaggatcaatgtcagcaaaatctggtaatgcaggtcttgaaactggtccttaactgccttaactttgacttcattggcagttcagcagatgaatctgcagatgatctttgcacggtgcagattccaacaacttggagaacaatgggtctggtcggatgtgatggcgtgtgttgtcgaacccgctggtgtcagtgtctcgcgaccgcggtggtctctggtgttggcggtggcccctggttgcttccggcctgttcttctggaccgtcgatgatttccaagagaaagaaatttgtacacaaatgggctaaagacttggtggaacctagacacgggcttgaaaacgtatgggacctgcccagggccatggctggaagctacttgatgtacaagcaaagaaagtggaagataatggaatttgggaaatgggcacttcaacacaagatgacagtgaaagacatagaaaggctacagttgtataacaaagttaaggagcaaccagttcaagttgaaggctctgggagggctagcacgattttttgggtgttgaaaacgtttaaggggggaaaaagcccctgtggtgcccccggcgagtgtgtggcgtggacgcaatgcagaattttaggttgggtacaaattcatttcaaagagcatcccgcagatcgcgttgtgggtttaattaagatgcctggcctggatttttattttgccgctgatgtttgttacgccgagaaagttgcgcaagaaaaaggttttttatatcgtttaacatcacgatatcgccattatgccgcatttgagcgagcgactttcgagcagggtaaatcgacgaaacttatgatgctgaccgataagcaaatcgccgatttccagaagcattatcaaactgaacctgaacgttttcaaattcttcctcccggtatttatccggacagaaaatacagtgagcaaatcccaaacagccgtgaaatttatcgccagaaaaatggcataaaagagcaacaaaacttattactgcaggttggatcagattttggccgtaaaggtgtagatcgctcaattgaagctttggcatcgttaccggaatcattacgtcacaatacgcttttatttgttgttggtcaggataagccgcgaaaatttgaagcgctggcagaaaaactcggcagtgaacgtgcatccatggagttcaagcggtatgaatacaacgccgcaggcgacctgactgccgttatcaccccggacggcaaccggagcgagacacagtacgatgcgtggcggaaaggcggtcagcaccacgcagggcgggctgacgcgcagtatggagtacgatgctgccggacgtgtcatcagcctgaccaacgagaacggcagccacagcgtcttcagttacgatgcgctggaccggctgtgaggatgagggacttgtcatcctctgggtactacgatgaatcggaccgtatcactcaccgcacggtgaacggcgaaccggcagagcagtgccagtatgatggccacggctggctgacagacatcagccacctgagcgaaggccaccgtgttgccgtccacgatggctatgacgataaaggccgcctgaccggcgaatgccagacggtggagaacccggagacgggggaactgctgtggcagcatgagacgaaacacgcatacaacgagcaggggctggcaaaccgcgtcacgccggacagcctgccgccggtggagtggctgacgtatggcagcggttacctggcgggaatgaagctgggcggaacgccgctggtcgagtatacgcgggacaggctgcaccgtgagacggtgcgcagcttcggcagcatggcaggcagtaatgccgcatacgaactgaccagcacatacacccccgcaggccagttacagagccagcacctgaacagcctggtatatgaccgtgactacgggtggagtgacaacggcgacctggtgcgcatcagcggcccgcgacagacgcgggaatacggctacagcgcctacgggcaggctggagagtgtgcgcaccctcgcaccagacctgtacatccgcatcccgtatgccacggacccggcgggcaaccggctgccggacaaggagctgcatcccggactagtacactcactaatgtgggggggtaccacctatttttgcaccgagccggtaccatctatctgtttgatatccttacttaa

SEQ ID NO: 123302 - DNA, 945 bp, Homo sapiens
gccattaatcgctaatgtggcagtctctgaagagaatgcgggagaagccaatccataggcaagaaaaataattcctgacagccaatacttattcattgaacgttatccctgtagtaaaggttatgcctggatagaatgagtgcataacaaactatagctgtacatccactacacagccacgaaggatgataatgaagcattgcctgtatgatcaatcgactttgtagagtttcggacgaaggtccgcagaatattcgcagtattaaataagtgttcattaatgcggcaaaaactaatacaccgcatcaatgtaacatctctgcggtgtatgaagaataaccagaatggttaataggcgttagaccgcgcggaaggaaatctcgcctggaatgacttcaccctgccagtagagctgagctgcaacgcggtcagccagctggcggtagatagcggtaaattcgctctccggacggctgataaccgttggcgtacctttatcgagatcctcacgtaaggagatgtgtaacggcatctggcccagcacctgtgtatggaatttttcaacccggtttctctgcacccaccggtaccgaaaatcggttcatggtgaccacagttactgcaaatatgcacactcatgttctcgacaataccgagcaccggaacctcgactttctcgaacatcacaatgccttttttcgcatcgatcagcgcgatgtccattgttggatttgatgggccgtagatatcggcgtccagaatgccgactttcgccccttctgccggcagcgccagtgccaggtttaccgccgtggacgatttacccacgccgcctttaccggaactcaccgcgataatgttcttcacaccgttaattcccggctgattcttcacgcgtttcagagtggctatgttatgcgacagtttccagtcgatagctttcgc

SEQ ID NO: 123303 - DNA, 1857 bp, Homo sapiens
ttaggcagtccgctcaacagtcgggggcacgcgcttgttgatgcggatccagtcatcaacggtcgggatatggcaacctgcctggtgagcaattgccggaatgtgtaacagcaggtttgttgaaccaccgaacgcggcatggaccgtcatcgcattctctatcgctttatcggtgagaatttcccgggtggtgatgcctttttgactcaggttcagcgcagctcgcgcggaagctctggcgatctcccgccacacaggctcaccggaaggggccagggctgaatgtgggattgccagtcccaatccttcggccaccacctgagatgtcccggcagtgcccaaaaattgacagccgccgccggaagaggcacaggctttacagcccgcacggcgtgcgtcctgtagagataattcgccattggcgaagcgtgcgccaatggtttgcaccttgccgttgtcttctccatcctttgcgggcagcgtcgcgccgccggggaccagcacggttgcgatgttgtgctgcgcggcgagtgccatcatggtggccggaagccccttatcgcaactcgccacaccaataactgctttcgcgtcgggcagagagcgaataaggcggcgcattaccatcgatgcgtcatttcggtatggtagcgaatcaaacatccccgttgtaccattgtcggcctgcaaccggaagagggcagcagcattcccggcattcgccgctggcctacggaatatctgccggggattttcaacgcttctctggtggatgaggtgctggatattcatcagcgcgatgcggaaaacaccatgcgcgaactggcggtgcgggaaggaatattctgtggcgtcagctccggcggcgcggttgccggagcacggtcgaccggtcccatcacaaccagccagggacttggcatcgtcaccagccgggaccacgcggacccgcaaagccggcgcggccttggcgtgcagggacacaccttcccactggaacggcaagcgtgcgtcatccatgtctcggacagccgttgcgtgcagagccgcgtccagcagtgccggatgcaccccgaaaccagaatcttccgttcccggccccgcagactgactcggcactcccgggggctgttcgaggatgacgtgcgcgttagtaccactgatcccgaacgacgacacccccacccgacgaacacgaccactcctgggccagggcgtgttctccgtaaggagttgaaccgtccccgccgaccaatccacctccggcgacggcgattccacgtgcaacgtgcgtggcagctgcccgtgccgcatcgccatcaccatcttgatcacaccagccacacccgccgccgcttgcgtatgaccgatgttcgacttgaccgaccccaaccacaacggccggccaggatcacgatcacggccgtaggtggcgatcagcgcggtacgtaacgcgcgtctaggaagaacttcggccggggcaaaacgctggaagctgatactgcgtggatccagcgcggtatgcagagcggtggtgttaatgagaacgcggtggcttccggcaaagcgcgggggcgtcaggaaaagaatcaccgtgcatgcctgccggataacaaaggtccggtttccggtccgaagatcatcgacggtgcagagcttctgatcccgatggctggcctcatcaacaaagaagatgagctggcgcgtctggcgaaagaagtggcgaagattgaaggtgaaatcagccgtatcgagaacaaactggcgaacgaaggctttgtcgcccgcgcaccggaagcggtcatcgcgaaagagcgtgagaagctggaaggctgggccccctacaagcctggtcat

SEQ ID NO: 123304 - DNA, 2681 bp, Homo sapiens
atgctggtgctgccactcttccagccgtttatgcgcattctcgatcatgacgatagcagcatcgaccatcgccccgacggcaatcgcaatgccacccaacgacataatattggcattcagtccctggaagtgcatgacaataaaagcaatacacaaccccagcggcaacgaaataatcgccaccagcgccgagcgcacatgccagagaaacagcgcacagactaccgccgggatcctctagagtcaccgaaggcagcagctgcctgcctctttcccgctattgctgaccccaatactccccccgtgtttaccccccctgcctccttaccgaccaccgggatgttgattcgccaccattccgaaatgacgcatagatggtaatgcggagccttattcgctctatgaccgtcgcgagagcagttattggtgtggcgatttgcaataaggggcttccggccaccatgatggcactagccgcgcagcacaacatcgcaaccgtgctggtccccggcggcgcgacgctgcccgcaaaggatggagaagtcaacggcaaggtgcaaaccattggcgcacgcttcgccaatggcgaattatctctacaggacgcacgccgtgcgggctgtaaagcctgtgcctcttccgtgcggcgatcatgtcaatttttgggcactgccgggacatctcaggtggtggccgaaggattgggactggcaatcccacattcagccctggcaccttccggtgagcctgtgtggcgggagatcgccagagcttccgcgcgagctgcgctgaacctgagtcaaaaaggcatcaccacccgggaaattctcaccgataaagcgatagagaatgcgatgacggtccatgccgcgttcggtggttccacaaacccgctgttacacatcccggcaattgctcaccaggcaggttgccatatcccgaccgttgatgactggatccgcatcaacaagcgcgtgccccgactggtgagcgtactgcctaatggcccggtttatcatccaacggtcaatgcctttatggcaggtggtgtgccggaagtcatgttgcatctgcgcagcctcggattgttgcatgaagacgttatgacggttaccggcagcacgctgaaagaaaacctcgactggtgggagcactccgaacggcgtcagcggttcaagcaactcctgctcgatcaggaacaaatcaacgctgacgaagtgatcatgtctccgcagcaagcaaaagcgcgcggattaacctcaactatcaccttcccgtggcaatatgcttggattttgcaccctgatttggatcctgagactttgctgaagttgcttatcagcttaaggagattttgggctgagacaccggtcggcaagaaccggattacgcagatgactaacgcccgccaccgcaccggctttcagggtgttaccatccatcacacaggcgtccagttcatgggtttcatcacgcgtaaagacagcgccaattccggcgttaaacagtggacactcttccagcagacgcaccgcttccgtcaccacatccagcgcactttcgcccgcttccagcattttctgcccggtttcaacaatggcagacaacgcctcgatgtagcgagtgttttcatggaatttaccaccggattgatgtcgctcgacaccgcgcttaatgagatgctttctcgcgtcaccccactgaccgcccaggaaacgctgccactggtacagtgttttggtcgtattctggcgagcgatgtcgtttcgccgcttgatgttccggggtttgataactccgcaatggacggctacgcggtgcgtttagccgatattgcctccgggcaaccgctgcccgttgccggtaaatcctttgccggtcagccataccatggtgaatggcctgcgggtacctgcattcgtattatgaccggtgcgccggtgccggaaggctgcgaagcggtggtgatgcaggagcagactgaacaaatggacaatggcgtgcgttttactgctgaagtgcgtagcgggcaaaatattcgccgtcgcggtgaagatatctctgcaggtgcggttgttttcccggcgggaactcgcctgactaccgcagagctgccagtaattgcttcactggggattgccgaagttccggtgattcgtaaagtgcgtgtagcgcttttttctaccggtgatgaactccagttgcccggtcagccgctgggcgacggccaaatctacgataccaaccgtctcgccgtacacctgatgttagaacagttgggatgcgacgtaattaacttagggattatccgcgacgatccccatgccctgcgcgccgcatttattgaagccgacagccaggcggatgtgaactcaggcaacgtatcaaaggcctgtaaattcatgggcgtttcgcgtgatacgttttatcgttaccgcgaactggtcgctgaagccggtgtggatgcgcagattaatcgtagtcgccgcgctcctaaccttaagaaccgtaccgatgaggcaactgaacaggctgttgttgattacgccgtcgctttcccgacacatggtcagcaccgggccagcaacgagctgcgtaaacagggggtttttatctccgacagtggtgtccgttctgtctggttactccataaccttgagaatctcaaaagacgatactga

SEQ ID NO: 123305 - DNA, 3035 bp, Homo sapiens
atgaccggtcgagagttaccacctaacccctacgtctatgataccttcccattccgcgctttccaagcgatcctccctctccggcgtacctcacggggcgcgcggcctccgcgtggcacccggctgtcccgtcgacgccctggcagtgtgcgaggcaccgctctgccccttcaccctcgaaccctgaggcgcgacgccaccttgccatcacgatgcgctcacggcacccctcggggccgcaagtgctgggctatcgctattgcaggagtcggtggatcaggccagctattgtacagcgataaccattatctggcggagatggcaaccatcctcggtaaccagaagaggccaaacgctatcgccagttggcacagcagctcgcggactcatcaacaccttattgaagataaaccactggcgaacggctgcgcgggcaaaccgattgtgagcgcggtaaagggccggaaggctggtcgccgctgtttaacggtgcggaacgcaggccaatgccgacgcggtggtgaagcaataatttgcaactgctggcggatgcggcgtaaacgcctttccgccctacatgtgcaatcctcctggccggataaaacgcggcaagcgttgcatccggcaactgcaccgcgccactggcggatgcggcgtgaacgccttatccgccctacatgtgtgttcccgtaggtcggataagacgcgacaagcgtagattcgggcatctgcaccgcgcccttggcggatgcgcgtggaagccttaacggcctaatgtgcatccgtaactggataaagcgaaaaggtgatccgggacacggggagacattgaaccacaaaaacccgcgccaatactttaccggagggaaaaaaacaccgagcccttcccgctatccagcggtggtccctggtcggggattgctgtccaatgagtgtctcgtattcacgtcctggtgtggcaaccgcgtatgccggcacctcctgccgtggattggcttacgtatgcagcggtatcctgtcggaaataagctggtcgggacgcctctggtcgagtatacgcgggacagtctgcacctgagacgttgcgcagcttcgctagcatggcaggcagtaatgccgcatactactgaccagcacagacacccccgcaggccagttacagagccagcacctaacagcctggtatatgaccgtgactacggttggagtgacaacggcgaccggtgcgcatcagcggcccgcgacagacgcgggaatacggctacagcgcccgggcaggctggagagtgtgcgcaccctcgcaccagacctggacatccgatcccgtatgccacggacccggcgggcaaccggctgccggacccggagcgcacccggacatgcgggctgacggtggagcaactggccagaaggtggagccggaatacacaccggcgcgaaaagctcatctttatcactggaccaccggggactgccgctggcgcttatcagcgaagacggcaatacgggtggagcgcggaatatgatgaatggggcaaccagcttactgaggagaaccgcatcatgtgtatcagccgcggtaaacctggcactggcgctggcggcagaaggggcgaaagtcggcttctggacgccgatatctacggcccatcaatcccaacaatgttgggcgcgaaaatcagcgtccaacttcgccggacggtacccatatggcaccgattagtctcatggcctggcaaccaattcaattgcgttatcgtggtcacgtacgccaacggttatcagccgtcggagagcgaatttaccgctatctaccgccagctggctgaccgcgttgcgctcagctctactggcaggttaaaaccttatcaatcacaacttatcggtcacacgttacccatgtggaaacgcgtgattaaaccaaatcgccttctgagtttcgggttgccacgacaaagccagtcatcgccacgcatatcgccaataaaccgttttgatggttacaccggaatgcagatgaacattgttttccgccaccagttagcgggtaacacctgctgtaactgcggggaatcttccagcaacatggatttcgagagtggaggtcgttcataaggaagatgtcgctcatcggaaaacagatgcagctcaccgtggaagtggcctccacaacaccggccccaacatttgtcactaacccgccccctggacagacgccgttcacccaagtaggccacttggacgttgacagaaaagtgcagtacaaggaaacctaccaagaggaccccattttgcagttccggaacattcccttgcaaagcacaacatcgcaacgtgctggtccccggcggcgcgacgctgcccgcaaaggatggagaagacacggcaaggtgcaaaccattggcgcacgcttcgccaatggcgaattatcttacaggacgcacgccgtgcgggctgtaaagcctgtgcctcttccggcggggctgtcaatttttgggcactgccgggacatctcaggtggtggccgaagattgggactggcaatcccacattcagccctggccccttccgagcgtgtgctggagattgtcctgcaagcctggacgaaccgccaaagggcgcttatcagtgcctaccgttaccgggaacagctgcttgagaacgctgccggtcaaatggtttgcccattgacattcatcacccgtgcctgctgctttaccccctgcctgaatggaaattatcgagcaaaaattatcgcgtctgtcgagcatgaacccggttggcgccgtgtgcagcgcctactgttaggtcatgccagcgaatgtcagatgatggcgcaggcccaaattgtatcgccgctcgacgtggctttgggattcattcgacaaatcttctacgtttggcacatacgacacgcttggatacaccatcgcgttgccgcctatagcgcccttgcgctccagatacgatggtctttgcgaggcctagtgtcgagtctatcgaagcggttgttagaacggccctatcgttgctaa

SEQ ID NO: 123306 - DNA, 1459 bp, Homo sapiens
atggagtgcgatgcgtctgcgttgctacgttacgattcgcggcagtttattccgcttgccatcgacggtctggcaaaggatgtactcggtagacgctttgcgctggaagggcatccacggctggaagcgattgcccgcgccggggatgtggtgcgctttcccgcagacagcgaattgcccgatccctatgacggtttgattcctgggcaggagagtctgaaggttcacgcctgcgttggtctgccattgtttgccgggcaaaacctgatcggcgcactgacgctcgacgggatgcagcccgatcagttcgatgttttcagcgacgaagagctacggctgattgctgcggctggcggcgggagcgttaagcaatgcgttgctgattgaacaactggaaagccagaatatgctgccaggcgatgccacgccgtttgaagcggtgaaacagacgcagatgattggcttgtcccctggcatgacgcaactgaaaaaagagattgagattgtggcggcgtccgatctcaacgtcctgatcagcggtgagactggaaccggtaaggagctggtggcgaaagcgattcatgaagcctcgccacgggcggtgaatccgctggtctatctcaactgtgctgcactgccggaaagtgtgcggaaaagtgagttgttcgggcatgtgaaaggagcgtttactggcgctatcagtaatcgcagcgggaagtttgaaatggcggataacggcacgctgtttctggatgagatcggcgagttgtcgttggttttgcaggccaagctgctgagggtggggcagtatggcgatattcagcgcgttggcgatgaccgttgtttgcgggtcgatgtgcgcgtgctggcggcgactaaccgcgatttacgcgaagaggtgctggcagggcgattccgcgccgatttgtttcatcgcctgagcgtgtttccactttcggtgccgccgctgcgtgagcggggcgatgatgtcattctgctggcggggtatttctgcgagcagtgtcgtttgcggcaggggctctcccgcgtggtattaagtgccggagcgcgaaatttactgcaacactacagttttccgggaaacgtgcgcgaactggaacatgctattcatcgggcggtagttctggcgagagccacccgcagcggcgatgaagtgattcttgaggcgcaacattttgcttttcctgaggtgacgttgccgacgccagaagtggcggcggtgcccgttgttaaacaaagcctgcgtgaagcgacataagcgttccagcgtgaaactattcgtcaggcactggcgcaaaatcgtcgcaagtggactgcttgcgcgcggatgctggaaaccagcgtcgccaacgtgcatcggctggggaaacgtctggtattgaagaaataaataatcccggcctgatagaaatccagcacgcctatagccccagttatt

SEQ ID NO: 123307 - DNA, 799 bp, Homo sapiens
atgaccgacgttcctgtaccggaactcgggcataacgatctgctgattaaaatccgtaaaacagccatctgcgggactgacgttcacatctataactgggatgagtggtcgcaaaaaaccatcccggtgccgatggtcgtgggccatgaatatgtcggtgaagtggtaggtattggtcaggaagtgaaaggcttcaagatcggcgatcgcgtttctggcgaaggccatatcacctgtggtcattgccgcaactgtcgtggtggtcgtacccatttgtgccgcaacacgataggcgttggtgttaatcgcccgggctgctttgccgaatatctggtgatcccggcattcaacgccttcaaaatccccgacaatatttccgatgacttagccgcaatttttgatcccttcggtaacgccgtgcatgtttattcacccgctggatgcgaaacgcgcgatctgcgccgtggcgacaaagtgaaagtggtttctcgccgtggcgaagtgatctcgattgttgaaacgcgcggtcgtaaccgtccgccacagggcctggtgtacatgccgttcttcgacgccgcacagttggttaacaaactgacgctggatgcgaccgatccgctctcgaaagagacggacttcaagaagtgcgcggtcaaactggagaaggcttgcccttacgacaccttaaaactggcgacgctggcctctggtctgtcggcgggcacgccatattttgtcgcacgggatattccttgcgaaatgtgtgaggacattccgtgcgccaaagtgtgcccaagcg

SEQ ID NO: 123308 - DNA, 1500 bp, Homo sapiens
ttaaggagcatgttgtttattctttatcaacttgaggaagttgctctctattcctagtttattgagagtttttatcacaaattggtgttggattttgtcaaatgctttttctgcatctattgatatcatcatgtgaggagtacgttgtttaatttctacctcttgtgaattgggttcagctttgtctgactggctgataacaaacagcatcttatgccggtatgcttcgccaatcaccatttctcggaaagggcatctttccttataattgtctcttctaaaaattttgcccttttgttgttctgttcttgactggtaagaaatgttattacgtttgccgaggtagatgtattgatcaccatgctggcgcgcagtgccgttggtgcacgtttgacgggatacaacacctggctgacaggaccgcgcgaagctgggcacgttgatggtcctgaagagtttcatctggttattgtcgataacgggcgttctgaggtgctggcctctgaatttcgggatgtgctgcgctgtattcgctgcggggcttgtatgaatacttgtccggcatatcgccatattgctcagtatagaggcatccccccattccggcgaaaatcggtctgcacgcggtggcacaagaccgtgcgcaacaacatgcaggccgggccgaacatcaatgaagagcgtatgccgggctggcgcgatccgcgcaacttcatcatcgtctccgatccgtatccgacagtcagtgcgctggccgccgacttgatccggaagtgagcaaattcccgggatccgaactggcggaagatcagctgaacgatgaatcccgcgagctgggcttctatctgcaaaaagggctgttcgaagagtacgcatggtttggtcgcggtcacggtcacgatctggcaccgttcgatgactaccacaaagcgcgcggtctgcgctggccggtggtgaacggtaaagaaacgcagtggcgttacagcgaaggtaacgacccgtacgtgaaagcgggcgaaggctataagttctacggtaaaccggatggcaaagcggtgatcttcgcactgccattcgaaccggcggcggaagcaccggatgaagagtacgacctgtggctctctaccggacgcgttctggagcactggcacaccggcagtatgactctccgtgtaccataactgcaccgggccttcccggatgcgggcctgtttattttacccgctggatgcgaaagcgcgcgatctgcgccgtggcgacaaagtgaaagtggtttctcgccgtggcgaagtgatctcgattgttgaaacgcgcggtcgtaaccgtccgccacagggcctggtgtacatgccgttcttcgacgccgcacagttggttaacaaactgacgctggatgcgaccgatccgctctcgaaagagacggactggcctcacttttcttccacatacaatggacctcttctgcaaggtgccaataagggcatcctggtccagcagcat

SEQ ID NO: 123309 - DNA, 1701 bp, Homo sapiens
atggaacgtgagcaggacagcatcattatggatgccgcgacgcgtcgtaatctggaaatcacccagaacctggcgggtggtgcggaaaatacgctggcttctgtgctcgactgcaccgtcacgccgatgggcagccgtatgctgaaacgctggctgcatatgccagtgcgcgatacccgcgtgttgcttgagcgccagcaaactattggcgcattgcaggatttcaccgccgggctacagccggtactgcgtcaggtcggcgacctggaacgtattctggcacgtctggctttacgaactgctcgcccacgcgatctggcccgtatgcgccacgctttccagcaactgccggagctgcgtgcgcagttagaaactgtcgatagtgcaccggtacaggcgctacgtgagaagatgggcgagtttgccgagctgcgcgatctgctggagcgagcaatcatcgacacaccgccggtgctgagctggatgagtggcgcgcgctggctgacggcgcgaccgattatctgtaactacgaagtcgatcgcaccattcgtcataccaaaatgaacgtgggcgatgtgcaacgtctgtcagtcgcggtcgtggtgaattacaaaaccttgccagatggcaaaccgttgcctctcagcaacgaacagatgaagcaaattgaagatctgacccgcgaggcgatgggcttttctgaaaaacgcggtgactcgctcaatgtcgttaactcgccgttcaatagcagtgacgaaagcggcggagaactgccattctggcaacagcaagcgttgttgttcgtctttgctcaggcggacttccaccgcatcttccacttcctcgcgggcctgcgcctgttgctgtacagctttcatcgcctcagcgaccgattacgtcgcctcaatcaacaagagcggctaccgttatcacccgggcgagccaagaaccttcttgctcacagccaatatgcatttctgattcagatgtggggcgcaggccccactttttggagaaattgtatgatgtaccacattcccggcgtgttatcgccacaggacgtcgctcgttttcgcgaacaactggaacaacccgaatgggtggatggacgcatcaccaccggcgcacaaggtgcgcaagttaaaaacaatcaacaggtcgacacccgcagcacgttatacgccgccctgcaaaatgaggtgctgaacgcggttaaccaacatgctttattctttgccgcggccttgccgcgtaccctttccacgccgctgtttaatcgctatcaaaacaatgaaacctatggtttccatgtggatggcgcagtacgcagccatccacaaaacggctggatgcgtactgacctttctgccacgctgtttttaagcgatccacaaagctacgacggcggcgaactggtcgttaatgacaccttcggacaacatcgggtaaaactcccggcaggcgatctcgtgttgtatccctccagcagcctgcattgcgtgacacccgtaacccgcggcgtacgagtggcatcatttatgtggatccagtcgatgatccgcgatgataaaaagcgcgccatgctgtttgaactggacaacaatattcagtcgctgaaaagccgctacggcgaaagtgaagagatcctgtcgctgcttaatctttatcataatctgctgcgggaatggtcggagatctga

SEQ ID NO: 123310 - DNA, 2271 bp, Homo sapiens
ttaatcgtctttcggtgcgcggttggcgcggcgacgatcgttttccgtcaggtgacgtttacgaatacggatagaggtcggagtcacttctaccagttcgtcatcatcgatgaactccagagcttgttccagagtcatgcggataggcggaaccagaacaacggcttcgtcagtaccggaagcacgcatgttggtcagtttcttcccggtcaagccgtttacagtcacgtcgttaaaccgggttgtgcccggcgaggccgacgtgagtccctgaatttctcgtccaatcgggaaaccgatcagatcgccacttattttgcgggcacgtcccagcggatcggagattcgcatgctggtgacccggaagcggtatgcgttaatgagctgcaggactttaacctgcttcacattggtgtcagggtcggagatcgttgaagagtaacgtgaagcgtctttcgccaggcggcggaaatattcacgcgtttgagagtggaattgatccggtttgactcccgtaccaggtaactgctggaacgtcgaacgccagttagcgtcaaccgagtcaggatcggttaagaagtcttcatagagctgttctatccagctttcgccgtggatactaccacgcacagtgatgtgcgtgccggggttcacttgcgagctcttgtctacgtagtggctcgcgaaggaacctttaaaaactgtctcctggatcacaatccgctctttcaccgccgagacatccacttttggcccgacgatgaccgcatcaatgacctttttaccgacatactgctccataattgccagcttgctttccagcttcaaattagccgcagctatactcaactcactgccccagattggccgatatataaccatcggctctggcgtgcggcgtaatgcctgacgatttcgttcagcagcagattggcataagctgtagtaggtccagggttcacgctcgcggacttccagacgctccagataatcggtcgcgccgtcagccagcgcgcgccactcatccagctcttcgttatagcccgatgcgataacaccaccgtcgcgtaccagcaccggcggtgtgtcgatgattgctcgctccagcagatcgcgcagctcggcaaactcgcccatcttctcacgtagcgcctgtaccggtgcactatcgacagtttctaactgcgcacgcagctccggcagttgctggaaagcgtggcgcatacgggccagatcgcgtgggcgagcagttcgtaaagccagacgtgccagaatacgttccaggtcgccgacctgacgcagtaccggctgtagcccggcggtgaaatcctgcaatgcgccaatagtttgctggcgctcaagcaacacgcgggtatcgcgcactggcatatgcagccagcgtttcagcatacggctgcccatcggcgtgacggtgcagtcgagcacagaagccagcgtattttccgcaccacccgccaggttctgggtgatttccagattacgacgcgtcgcggcatccataatgatgctgtcctgctcacgttccatggtgatggaacgaatatgcggcagagtcgtacgttgggtatctttcgcatacggaccagatcgcggggtcccaaatcgcagattcaactgctggcgcgcggtgtcgatttcaaactcccacagcgggcgacggcgcaggccgcgacggccttcaattaacgacatttcagcaaaatcttctgcatacagcagttccgcaggattagtgcgttgcagttctgccgccatcgtttcgcggtcagccggttcgctcaggcgaaaacgcccggaactgatatccagcgtcgcgtagccgaaacctttgctgtcctgccagatagccgccagcaggttgtcctgacgctcctgcaacagggcttcatcgctgatggtgcctggcgtaacgatacgcacaactttgcgctcaaccggacctttgctggtcgccggatcgccaatttgttcgcagatggcaacggactctccctgattcaccagtttggcgagatagttttccaccgcatggtagggaatccccgccatcgggatcggctctcccgccgaagcaccgcgtttggtcagtgaaatatccagcagttgcgacgcgcgttttgcgtcgtcataaaacagttcataaaaatcacccatccggtaaaacagcaggatctcgggatgctgggctttcagcctgagatactgctgcatcatgggcgtatgggcgtcgaaattttctattgcactcat

SEQ ID NO: 123311 - DNA, 1545 bp, Homo sapiens
atggctaacagaatgattctgaacgaaacggcatggtttggtcggggtgctgttggggctttaaccgatgaggtgaaacgccgtggttatcagaaggcgctgatcgtcaccgataaaacgctggtgcaatgcggcgtggtggcgaaagtgaccgataagatggatgctgcagggctggcatttgcgatttacgacggcgtagttgccaaccaacattactgtcgtcaagacagctcggaagattttgctgaaatgtcgttaattgaaggccgtcgcggcctgcgccgtcgcccgctgtgggagtttgaaatcgacaccgcgcgccagcagttgaatctgcaatttgggacccgcgatctggtcggttttggcgtcgagaacgcgccgcgcggactttgtgctgccggttgtctgttgcagtatgcgaaagatacccaacgtacgactctgccgcatattcgttccatcaccatggaacgtgagcaggacagcatcattatggatgccgcgacgcgtcgtaatctggaaatcacccagaacctggcgggtggtgcggaaaatacgctggcttctgtgctcgactgcaccgtcacgccgatgggcagccgtatgctgaaacgctggctgcatatgccagtgcgcgatacccgcgtgttgcttgagcgccagcaaactattggcgcattgcaggatttcaccgccgggctacagccggtactgcgtcaggtcggcgacctggaacgtattctggcacgtctggctttacgaactgctcgcccacgcgatctggcccgtatgcgccacgctttccagcaactgccggagctgcgtgcgcagttagaaactgtcgatagtgcaccggtacaggcgctacgtgagaagatgggcgagtttgccgagctgcgcgatctgctggagcgagcaatcatcgagacaccggcggtgctgaaatgttcccagaaaacggggctgggtgagctgaagcgcaatgcccagcctattatgtttgccccgtcgttggttaatgaaggccagatcccgttcatcaagatgaaaatagcgcgccagttgcacgtcattaggttctgcagcataacaaccgtaattctgtttttggtcagagacactgcttgtccgatatttgatttaggatacgatttttatgcgacttttggttacgcacgggtatcaaccagccagcaatctctcgatattcaggttcgggcactcaaagacgcaggcgtgaaagcaaatcgcatctttactgacaaggcatcgggcagttcaagcgatcggaaagggctggacttgctgaggatgaaggtggaggaaggtgacgtcatcttggtgaagaaacttgaccgacttgggcgcgatactgctgacatgatccagttgataaaagagtttgacgcccaatgtgtatccattcggtttattgatgacggaatcagtaccgatggggagatgggtacaatggttgtcactattctatctgcagtgtgccaggacgaacgacagagaaatactagagcgtaccaatga

SEQ ID NO: 123312 - DNA, 889 bp, Homo sapiens
caagttgtggcccagattgagatggtcgtctattggttccaggccctggccactgcagtcatcccccagtggcagaaggatgaattgcgggagactctcaaatccctaaagaaggtcatggatgacgttggaccgagccagcaaagccgatgtccagaaacgagtgttagagaagacgaagcagttcatcgacagcaaccccaaccagcctcttgtcatcctggagatggagagcggcgcctcagccaaggccctgaatgaagccttgaagctcttcaagatgcactcccctcagacttctgccattgctcttcacggtggacaatgaggctggcaagatcacgtgcctgtgtcaagttccccagaaatgcagccaatcggggctttaaagccagcgagtgggtgcagcaggtgtcaggcttgatggacggtaaaggtggtggcaaggatgtgtctgcacaggccacaggcaagaacgttggctgcctgcaggaggcgctgcagctggccacttccttcgcccagctgcgcctcggggatgtaaagaactgagtggggaaggaggaggctcccactggttccatccgtccagccaagagctcttcatctgctacaagaacatttgaatcttgggacctttaaagagcccctcctaacccagcagtaactgggaacacacttgggagcagtcctatgtctcagtgccccttaaatttctgccctgagccctccacgtcagtgccatcggtctagaaccactaaccccgcattgctgttgatcgtcacgctcgcatctatagataacggctctccagacctgagctttccgcgtcagcaagtaggaatcgtttttgctgcagagaataaaaggaccacgtgcaatacttaa

SEQ ID NO: 123313 - DNA, 3155 bp, Homo sapiens
tcacctttttgtactttcatactgctttccgttactcacaatgatatacgtagcaacgacaaataccagcacgtcgagttccgccagcgcgctcccgactgggtgcaacgcttccagatgcggcaacagcaggtcgaacagctcttcataaagcgtgtttttccagtgccagtgctttgccttttgaggtgagaactttatcttcgtactcttttagctctggaatgatgtagcgctcggcgtttttcagcgtctggcgacgcatgtagttgatgggtgccagatggctttgcccacggctgatttgaatgtagtagccgtgcaccgcattaaagccaactttcagcgtgtccaggccggtacgttcacgctcgcggacttccagacgctccagataatcggtcgcgccgtcagccagcgcgcgccactcatccagctcttcgttatagcccgatgcgataacaccaccgtcgcgtaccagcaccggcggtgtgtcgatgattgctcgctccagcagatcgcgcagctcggcaaactcgcccatcttctcacgtagcgcctgtaccggtgcactatcgacagtttctaactgcgcacgcagctccggcagttgctggaaagcgtggcgcatacgggccagatcgcgtgggcgagcagttcgtaaagccagacgtgccagaatacgttccaggtcgccgacctgacgcagtaccggctgtagcccggcggtgaaatcctgcaatgcgccaatagtttgctggcgctcaagcaacacgcgggtatcgcgcactggcatatgcagccagcgtttcagcatacggctgcccatcggcgtgacggtgcagtcgagcacagaagccagcgtattttccgcaccacccgccaggttctgggtgatttccagattacgacgcgtcgcggcatccataatgatgctgtcctgctcacgttccatggtgatggaacgaatatgcggcagagcagccatcgtatagcgccgattttggtgcctgacatagctaccactggagtccaaatggtaattgtactttggggaatcatctgtgacctccagaccccgtgcccggagctcttcgatagcgtaaatgtccagcataatgaggtcttccccaccagctcccttgccctgtgatttcagatccccgaggcgcagctgggcgaaggaagtggccagctgcagcgcctcctgcaggcagccaacgttcttgcctgtggcctgtgcagacacatccttgccaccacctttaccgtccatcaagcctgacacctgctgcacccactcgctggcttttaagccccgattggctgcatttcgtttctggacatcggctttgctggctcggtccaagtcatccatgaccttctttagggatttgagagtctcccgcaattcatccttctgccactgggggatgactgcagtggccagggcctggaaccaatagacgaccatctcaatctgggccacaacttgctgggatgtcagggtccagcccaccccacccgaacccaagtcctccctgactagtgtctgaagtgcctcggatgtcttcagggccagattgtaactacacagaacccagggaaggggtaagctgaactgcacattgacaaacacaaacgatgagtcacaggactctacagtagttacaatggcatttttatatgtcccaagtgttgactggagagtaaagtgttaactgagcttgctagaacaccctttcactgaaagagctttctaccccacgcccattgttccgaagaaggagaggcttatgtggggcgggatgggaacccacacaccgagaatggatcttttatctttctaccaaatctgcacccaccatctgacattctggagtgtaaggcactagaacctggcttagagaatagtggggctctaagctccagttcttggtgtgcaaaggaaattctgacatacatcttttgaaagagatgctaaaaaaccctccctatctcctgtaattttctgtctttgaacagacaggaaaaataagaaggccagaagatggtctgcaaaggataaaaacaggtgcatctaagaatgagaaaaatggctcatgaaagaaatgtgtaactctcccaagagatgcagacactctgctccagagaagtcaagaaccataaacaacgtcttcatgtttcatggacaaagggaaggcaaaggcatacaaaaatactcagttgtcttgaaaagtgtactggtagtgatcagggctacaaaggcgagccctgtactgacaatggagggagccttacaactcagcaccttaaattgttggcctgaagtggtggcggggagggaggcgctgacggagagacccatggctcaccacttattgcgtgtacacaaggcctggggcaagcctcacaagtctaccatttcttccactcaactgtgcttctcctgaatccatgtgcctgaaatgactatatgcaaggtgaacattctttatactgtgttaatactgcttatatcaatgttccgtgaggggtgtgtgggggatggggtgcagcaggaaaattagaatggcaagaggttcttatttattattaagcactgttgaccaaacctctatcttagattttttttttttttttttttgagacaagagtctcactctgttacccaggctggagtgcagtggtgcaatctcagctcactgcaacctctgcctcctgggttcaagcaattctcccacctcactgggcctcccaaagtgctgggattacaggagtaagcgaccacgcccggccaaccaaacctctatcttagatgttaaagaagacccttattgactacactggccaagaagcaacagagatataaagctgaatcttgtagctaacccctgaaagcaagccaacgcaaattcctccgccaggccagtcttctagggccaatatggagactgtgggccacagaagattcccttctatttcaggttctcaaaaagtggtgtagactcaggcaaatgccaggaaatgtgtccatatgccagaggagacacagagccagaaatgaaggctatgggtcctgtcttcagtgaaacactgaacgctctcggaaagctcccatcattcttgcatcgctactgccacaaagacggtgg

SEQ ID NO: 123314 - DNA, 3372 bp, Homo sapiens
atgatcgctattactggtgccactggccaacttggtcatctgtttattgaatccttgatgaaaacggttcctgccagccaaatagtggctatcgttcgtaatccggcaaaagcccaagccctggcagcacaaggcattaccgtgcgtcaggctgactacggcgatgaagccgcactgacatctgcacttcagggagtggaaaaactactgctgatctcttccagcgaagtgggtcaacgtgccccgcagcatcgtaatgttattaatgccgcaaaggcggctggcgtgaaatttatcgcttataccagcctgctacatgcagatacctccccgctcggcctcgccgatgagcacatcgagacggagaaaatgctggctgattctggcatcgtttacaccctgctgcgcaacggctggtacagcgaaaactacctcgccagcgccccggcagcactggaacacggcgtatttatcggtgcggcgggcgatggcaaaatcgcctcagcaacgcgggcagattatgcggcagctgcggcacgcgtgattagcgaacgcggtcacgaaggcaaggtttacgaactggcgggcgatagtgcttggacgttgacacagttagcggcagagctgaccaaacagagcggcaaacaggttacctatcaaaatctgagcgaacgcgatttcgccgcggcactgaaaagcgtcggactgcccgacggactggcggatatgctggcggattctgacgttggcgcatcgaaaggcggtctgtttgatgacagcaaaacacttagcacattgattggcccaccaacgacaacagtgcgtatggatgcggtcgctttgtttgttattgtcgcgtttgcattaagcggaacgctgacagtcccagaagtattttccggcttttctgatcctaacgttgtcctgattgccgccttgtttattattggcgatggtttggtccgtaccggtgttgccaccgtaatgggaacatggctggtcaaagttgcgggcaatagtgaaatcaaaatgttggttttgttgatgctgaccgtcgcggggcttggcgcgtttatgagttcaaccggcgttgtcgctatctttattcccgtggtgttaagcgttgccatgcgtatgcaaacgtcgccgtcacgtctgatgatgccgttaagttttgccgggctgattagcggcatgatgacgctggtggcgacgccgccgaacctggtagtcaacagtgaattgctgcgtgaaggctatcacggcttcagtttctttagcgtaacacctattggcctggtcgtgctggtgctgggtattttgtatatgttagtgatgcgtttcatgctgaaaggggatacccagaccccgcagcgcgaaggctggacgcgtcgaacctttcgcgatcttatccgtgaatatcgactgaccgggcgtgcgcgacgtctggctattcgccccggatcgccaatgattggtcaacggctggatgatctcaaattacgtgagcgttatggcgctaacgtcatcggtgttgaacgctggcggcgttttcgtcgcgttatcgtgaacgttaatggggtttctgaatttcgcgcgcgtgacgttttgcttattgatatgtctgcggctgatgtcgatctccggcaattttgtagtgagcaattgctggagccgatggtattgcgcggcgagtatttttctgaccaggcccttgatgtgggcatggcagagatttcattaattcctgagtcagaactgattggtaaatcggtgcgcgaaattggttttcgtacccgctacggactgaatgtggtggggctaaagcgcaatggcgtggcgctggaaggttcgctggcggatgagcctctgctgctgggcgatatcatcctggttgtgggtaactggaaactgatcggtatgctggccaaacagggccgcgacttcgtagcgctgaacttaccggaagagctggccagcgagccgtcaggccaggaatttctggtatttacccttggtgatgaagagtacggtattgatatcctgaaagtgcaggagatccgtggctacgatcaggtaacacggattgcgaacacgccagcgtttatcaaaggcgtcacgaatctgcgcggcgttattgtgccgattgttgacttacgaattaagttcagccaggtggatgtggactataacgacaacacggtagttatcgtcctgaatctcggacagcgggtggtcggcatcgtggttgacggcgtctcagacgtgctttcattgacggcggagcaaattcgtccggcaccggaatttgccgtgacgctttcaacagaatatctcactggactgggcgcactgggcgaccggatgttgattctggtgaacatcgaaaaactgctgaacagcgaagagatggcgctgttagatagcgcggcgtcagaagtggcccagaagagctttgtggtttccaatcaattacgggaacagcagggcgagctgacgtcaacctgggatttaatgctgcaaacgcgcattaacctgagtcgttcagcggtacggatgatgatggattcctccaatcaacaaagtaacgccaaagttgaattgctcgatagcgccaggaaaacattggcgcaagcagcgacgcattataaaaaattcaaaagcatggcaccgttacctgaaatggtcgctaccagtcgtaatattgatgacaaatataaaaactattacacagcgttaactgaactgattgacctggcagatggaaggtgccgacaactatgtaactccctgatggataacttcattatggatgtgcagggtagtgggtatatcgactttggtgatggcagtccgcttaactttttcagctatgcagggaaaaacggtcatgcctatcgcagcattggtaaggtgctgatcgaccgtggcgaagtgaaaaaagaagatatgtcgatgcaggcgattcgtcactggggcgaaacacacagtgaagccgaggttcgcgagctgctggaacagaacccgtctttcgtcttctttaaaccgcaatcttttgctccggtgaaaggggcaagtgcggtgccgctggttggtcgcgcgtcagttgcctctgatcgttccattattccgccaggtactaccttgctggcagaagtgccgttgctggataataacggcaaatttaatggtcagtacgaactgcgtctgatggtggcgctggatgtcggtggtgcaatcaaaggccaacacttcgatatctatcaagggatcgggccggaagccggacaccgcgcaggttggtacaaccactatggacgtgtctgggtgctgaaaaccgccccgggcgcaggtaacgtctttagcggctga

SEQ ID NO: 123315 - DNA, 2367 bp, Homo sapiens
ttaccggttgattaataaccaatatagggaagcgatgccccaattggacagcgacataccgcgactaattccgcaaaacttaccacataggcaaatccgggagggtcttagaaacacaccatcgcaagattgctccccacaacgtgcttcggcccgacatgtcgggccttccccttgccattcaatggtgaaggtttcattgcgtaacgccagccagaaatggtgctcggtaaaggcgttcagttcatccgcgccaaagtttgctaccagcatggggccgctaaaggtgatgacattgccatgcgccagaagaccgcactgaatggcggtaaaatcgctatgtccgcaaatgagcaacgggtcatgttgttggcgagccaccagtgcctgccagtcaatatctgccagtaaacgactggcaccgtaaccgccgcgtacagccagcacgatggtgttgggggtagtcagtctggcaagggaattgagatcttccagacgctctgtttccgtacccgcaaaacgctcacaacgacgggcaataacctcgacgttattgacttgatgccccgcgtcggtaaggcgctggataccacgcagcgcggcgtgctgtttaatgcagtaacccgatggggcaattaagtgaaacagagacatggcaattccttgctgtttgccgctctgtttggtcagctctgccgctaactgtgtcaacgtccaggcactatcgcccgccagttcgtaaaccttgccttcgtgaccggcttcgctaatcacgcgtgccgcagctgccgcataatctgcccgcgttgctgaggcgattttgccatcgcccgccgcaccgataaatacgccgtgttccagtgctgccggggcgctggcgaggtagttttcgctgtaccagccgttgcgcagcagggtgtaaacgatgccagaatcagccagcattttctccgtctcgatgtgctcatcggcgaggccgagcggggaggtatctgcatgtagcaggctggtataagcgataaatttcacgccagccgcctttgcggcattaataacattacgatgctgcggggcacgttgacccacttcgctggaagagatcagcagtagtttttccactccctgaagtgcagatgtcagtgcggcttcatcgccgtagtcagcctgacgcacggtaatgccttgtgctgccagggcttgggcttttgccggattacgaacgatagccactatttggctggcaggaaccgttttcatcaaggattcactaacatagtgaccaagttggccagtggcaccagtaatagcgatcatgggaagtctccatcgtagagttttacgtagtacgtccaacagggcacgtttgacatgcgtccggtaacctgtcgcaccaccgaaagcggcacccccttgcggaccaggccgcccgcaagggggaaaccgtaccaccccgcgggcgcagatctgtggcgcacccaggcccacccctaacacctgcggcaacaccggggccaacaccctgcctctctccctacacgcacgggcaccccacagcccggccgccgcgcaatctacaggatccccgttcgaacagcaggtcaattccagcggatcgaggtcggtgattttcagcgcgtaggccaccagtgaacccgcaccggagccacggcctggccctaccggtacgccgttatctttcgaccactggataaattccataacgatgaggaagtagcccgggaagcccatctggttgataacctgaagttcagtctccagacgttcgtcatattccgggcggcgcttaagacgttcttcctcatcagggaataaaaaggccagacgctcttccaggccctcttttgcacgcttgaccagataatcttcggtgctcatgtccccggtcgggaactgcggcaggaagtattcaccaagacgcacggttacgttacagcgtttggcgatctcaacggtgttggcaagggcttcggggatgtcggcaaacagctcacacatctcctcttcgctacgcatatattgctgcggcgaatagttacgcgggcgtttaggatcgtcgagggtaaagccgtcgtggatcgcgacgcggatttcgtgtgcgtcaaagtcgctgctgtcgataaagcgcacgtcgttggtcgccacgacgggcaaaccgcgcgcttccgccagttccaccgccgcgtgcagatagctttcttcatccggcctgccggtgcggatcagctcgagaaaatagcgatccgggaagtgttcttcataaaacgcgacacactcatctaccagcggcctggtaacagacaaaagaaggctccgaagtggccaggggtcgcggcagaaggttaacat

SEQ ID NO: 123316 - DNA, 2480 bp, Homo sapiens
atgaatgcgttaagcaaagcgcgccagtatgtcgaagagtttgacggcaacatcgccagcttcatcttttctggtaagccaggaaccggcaaaaaccatctggcggcggcaatctgcaacgagctgctgctacgcgaacgaaatcttggagaatcagaaatccatacgaccagtgatcatatggtgacggcgacgctgccaggagagacgcaaacgtggccagaggattttcgggatgtcgaacagcgccagcaggttgtcatctttcagcaccttgtcggttgcgtgaaagtggacggtaaatacattcaggtatgtaccttcaccgttggcggcaactacggtgggacgtgtttgcgcggtgatgaatcactggtcatcaaaaaagagagtgatattgaaccgttaattgtggttaccgttgtccagcagttccatatcggcaatggttacgtggtgatcaccattaccccgagcgaaggcgaacgctatcagggcgtagttggtctggaaggccggataaggcgtacacgccgcatccggcataaacaaagcgcacgttgttacaatttacgttttaaacctacgtgcgcaataacccagactacgccaacagaagtcagtccagtcctaaagaagcaattagttctggtgccaaatccgcattacccaggcaataaaccgaacttcaaacgggtatcggtaaaaattattggtgaaagtgcctcccgtcgcctgcagctctcccgtggcgacattgacattgccgatgcgctgtccgatcgcttcgtcagtgaagcgattaccgccaaagttgaagcggcgattaagaactcaattcacatttgcgccgaacaccgggtgcaaggtatgatcgccagcgggctgttgatcttgttgttcggtggtcgggatggcttagtccgatgttccacggtatggcgttaccatcgtattacgccattcgccatacgaggcatatcccgtcactacgccgttttcctcgctcaccagcactggataacctgctatagtccgcgcttcgaaccaggcaatgcggttatcagcagccaccgtttggtcattccagatagccgccaatatcaacaggcggtgaataagatggctcatcgctcatacgtccacgcatatacgggtccagggacaaataaactgtgcgcagtaacacctgtccttcacccggtgtggcgacatcatcttcttcaagacggaaattctccggaacaggatggagtccacttctcggtggacgaaaaatctcgccaggtgaacctgaccgaacgtggtctggtgctgattgaagaactgctggtgaaagagggcatcatggatgaaggggagtctctgtactctccggccaacatcatgctgatgcaccacttgtgtgagcaaccagtccagctcgtgatctttcgccatcagcggatcgccgccggagaaaatcatctcgtccagttccggatgcgcagcaacatactcaagtgcagtttgccagttacgcttgttgccctgattttcggcataggggaagtgacgacggaagcaatagcggcaatttaccgcgcagccgcctttgaccagcaaaagcgcccggttgtggtatttatgcaacaaaccagacactacgctgtgctgttcttccagtgggtcggtggagaatccgggcgcgatgacaaactcatcttgcgaggtcaacgtgaacagcccttccaggatggcgttggacgccgcagccagtgtggcgtcggtttcggtgataccacctacgccagaaccgatgatcttcactttaacttcgtcagtagacagtttcagcaaggagtcggagatcgcttcgacagaaccctgtacgtctgccttcaggacgatattcacttcgtgaacttcgccttcggtcatgttggcgaacatgttctcgagtttagatttctgctgacgcgccagtttaacttcgcggaatttaccctgacgatagagtgcaacttcacgcgctttcttctcgtcacgtacaacggtaacttcatcacccgcagccggtacgccggacaggccgaggatttccaccggaatggacggacccgcttccagcacttcctgacccagttcgttacgcatcgcacgaacacgaccgtattcgaagccacacagaacgatatcgcccttgtgcagagtaccttcacgtaccagaacggtaacaaccgggaccacggacctttatcgagggaagggaattcgataaccgcaccgctcgccatacctttacgtaccgctttcagctccagaacttccgcctgcagcaggatagcgtccaagcagttcatcgataccggtacccgctttcgcagatacgtgtacgaactggctttcaccgccccactcttccggcaggatgccgtactgggagagttaattcttattttgtaatagaggatacgtggaagcaagttaaatgtcagtag

SEQ ID NO: 123317 - DNA, 3039 bp, Homo sapiens
atgatcgctattactggtgccactggccaacttggtcactatgttattgaatccttgatgaaaacggttcctgccagccaaatagtggctatcgttcgtaatccggcaaaagcccaagccctggcagcacaaggcattaccgtgcgtcaggctgactacggcgatgaagccgcactgacatctgcacttcagggagtggaaaaactactgctgatctcttccagcgaagtgggtcaacgtgccccgcagcatcgtaatgttattaatgccgcaaaggcggctggcgtgaaatttatcgcttataccagcctgctacatgcagatacctccccgctcggcctcgccgatgagcacatcgagacggagaaaatgctggctgattctggcatcgtttacaccctgctgcgcaacggctggtacagcgaaaactacctcgccagcgcccggcacgggggtctctcaatggactgccgatgcagtcactcaaaaagtattcttcgcggatcattgtcttctgaatttttttgtagggaaaaaatggttttcggttccgactctgccattaatatggcaagtcaacacattaatatccatacaaccggtgtgatgtcggaaaatgtcaccactgcaggggggaaaccggggaatgtactgactcgttaacggcaactataccggaaacaatggcctgatgacgttcaacgcgacgctgggcggcgataattcgcccaccgataagatgaacgtgaaaggcgatacccaagggcacgcctcgcgttcgggttgataacattggcggcgtcggtgcacaaacggtcaacggtattgaactcattgaggttggcggtaattctgcaggtaacttcgcgctgacccaccggaactgtcgaagctggggcttacgtctacacgctggcttaagggaaggggaatgacgagaaaaaactggtatctgaccagtaaatgggaacggcgtaacgccagcggatacacccgatcccatcaataatccccctgttgtggatccggaaggcccatcagtttcccgcccggaggccgggggatacaattccttattaatggttacccatggaaaagttataaacggcgggagggggatcctcatagagtccgatggaacccggggacgcgcgttagtcaagcggctcgtgtgccaggcacggactcgtattctggttgtgctcttgtcgccggtgtatgccgcagaccatcgaagcaatccagcacccgaatgcggcgcagtgaacaagatcgatagaccagaagctgatccggatcgcgttaagtacgtactctcccagtacggcatcctgccggaagagtgggtcggtgaaagccagttcgtacacggatctgcgaaagcgggtaccggtatcgatgaactgctggacgctatcctgctgcaggcggaagttctggagctgaaagcggtacgtaaaggtatggcgagcggtgcggttatcgaatccttcctcgataaaggtcgtggtccggttgctaccgttctggtacgtgaaggtactctgcacaagggcgatatcgttctgtgtggcttcgaatacggtcgtgttcgtgcgatgcgtaacgaactgggtcaggaagtgctggaagcgggtccgtccattccggtggaaatcctcggcctgtccggcgtaccggctgcgggtgatgaagttaccgttgtacgtgacgagaagaaagcgcgtgaagttgcactctatcgtcagggtaaattccgcgaagttaaactggcgcgtcagcagaaatctaaactcgagaacatgttcgccaacatgaccgaaggcgaagttcacgaagtgaatatcgtcctgaaggcagacgtacagggttctgtcgaagcgatctccgactccttgctgaaactgtctactgacgaagttaaagtgaagatcatcggttctggcgtaggtgtgattgaagcggaaagcctggatctgcgttactactccgtcatctataacctgattgacgaagtgaaagcggcgatgagcggtatgctgtctccggaactgaaacagcagattatcggtctggcggaagttcgtgacgtgttcaaatcgccgaaatttggtgccatcgcaggctgtatggttaccgaaggtgtggttaaacgtcacaacccgatccgcgttctgcgtgacaacgtggttatctacgaaggcgagctggagtccctgcgccgcttcaaagatgacgttaacgaagtccgtaacggtatggaatgtggtatcggcgttaagaactacaacgacgtccgcactggcgatgtgatcgaagtattcgaaatcatcgagatccaacgtaccattgcttaaggtttttagggttccatgcgggataaggcgtttacgctgcatccggcatggattgcctgatgtgacgctggcgcgtcttatcaggtcaacgtgaacagcccttccaccaccgtttccggtgtcgaaatgtctcgcgacctggcgtatgccaaagtatatgtgacgttcctcaacgacaaagatgaagacgcggttaaagcgggcatcaaagcgttgcaagaagcttctggtttcatccgcagcctgctggggaaagcgatgcgcctgcgtatcgtgccggaactgaccttcttctacgacaactctctggttgaagggatgcgcatgtcaaacctggtgaccagcgtggtcaaacatgacgaagaacgtcgtgttaacccggacgacagcaaggaggactaatgagtcgtcctcgtcgtcgcggtcgcgacattaacggcgttttgttgctggataaacctcagggtatgtccagcaacgatgcgctgcaaaaagtgaaacgtatatataacgccaaccgtgccgggcataccggtgcgctggacccgctggcgaccggcatgttgccgatttgcctcggggaagcgacgaagttttcccagtatctgctggactccgacaaacgctatcgggtcattgcgcgtcttggacagcgtaccgatacttctgatgccgacggaca

SEQ ID NO: 123318 - DNA, 748 bp, Homo sapiens
atgaccgacctctatgcgtgcggcggcgatctgatcacccttatctatcttcttgccctgtttcgttttttctttgctctttccgggctggataccggaagtccgtttgcgggagtcggtgccagtcgcgagttgacgctcggcattctggtcgaaccaatgcttattctctcactgctggtattggcgctgatagcaggttccacgcatatcgagatgatcagcaatacgctggcgatgggctggaactcgccgctaaccaccgtactggcgttactggcctgtggttttgcgtgcttcattgagatgggaaaaattccctttgatgttgctgaagcagaacaggaattacaggaaggcccgctgaccgaatattccggtgccgggctggcgctagcgaaatgggggctggggctgaaacaggtcgtgatggcatcactgtttgtggccctgtttctgccctttgggcgcgcgcaagaactttctctcgcctgcctgctgacttcacttgtcgttacgctgctcaaggccgataaagttgccgtcacgttgacgttggtcaacgtgggggatgtggcgttgtttggcctggtcattgatcgcgtgagtacgctgattctgtttgtggtggtgtttctcggtttgctggtcacgatctactccacgggttatctgacggctctagagatccccgggtaccggctgagttcaatacccgcttcagccatcgcgatatctcgtttcaccc

SEQ ID NO: 123319 - DNA, 1785 bp, Homo sapiens
tcaccatgatgttcgataataggggcgatataacaccgccctgtggcaccctttcctggccgcccgaaagagaccgacatcgatatgtcccgccttgatggttttccacagcagagtcatgaaacgtgcgtcactgatcctgcggcgtacagctttcatcagcagtcgatgatgtacggtgtcgaagtaactggacaggtcgccttcaatcacccagcgtcccccgggtttcaccacagtcgtgcggatcgcgtggtggacactgcgctcaggccggaagccatatgagagcgtatgaaaatcactctcccatatcggctccatcgccatcagcatggcccgctgaacaatacgatcccgcaacgcggggatacccagtggtcgcagtttgccgttgcttttagggatgtaaacccgtctggcgggcaagggctggtagtggcctgagagtaattcatccctgaggatttgcagctcaacagccagtctggcctgtagcattgttttgttcacgccatcaacgccgggggtatgggccccctttgatgaaagcgtgatccgcgccgcttcagccagccattctggttgtgttatcagacgcagcagccgttgaatccgtagggacggatcggtggccttctcggcggtagtggtctggcaagggcgtttctggttactgtcctttattcccggtggctttctcggcatgacgctgttttttgccagcgggatgaactggacggtgacgttactgggttttgacaacatctgcaggaagtgttttgggcgtgtcatggtcttgtacagcaacatggcaccctcatccaggagcacattggctgagagacgcaggtgcttcagggactggttggctttgaggacatagaagaattcagcccactgctccggggtggcacagtgacctcccaaccttgcgcgctgcagccccagcgccatggctcgccagtcgccgatccggagccctcggaggcccctagccccctccccggccttgcgagccccctccccagctcctccccacgccgcgcggttggctgtgccacgccaggcctgaggcttgctgctattggcgctgatagcagtttccacgcatatcgagatgatcagcaatacgctggcgatgggctggaactcgccgctaaccaccgtactggcgttactggcctgtggttttgcctgcttcattgagatgggaaaaattccctttgatgttgcggcatcgtggatcatcatgatctggtcgcagtcatctacctgtaccgcgccaacacttaaaccgttacgttcggtaaccttgatgagattaacccctgtctctgcacgcgacttggttgggtatttcgcaactgcggtacgtttaccgtaaccgttttccgttgcggtaaggattgcgccatcgccacgaggcacgatcagagagacgactttatcgccttcacctaagcgaataccgcgaacaccggtggtgttgcagcccatcgcacggacagaagactctttaaagcgcaccactttaccggcggtacgcagacggttgaactcggtgaggacagttttcttcacggtaccgttagcggtcgccatgaagactttcacgccttcttcaaactcggtcactggcaggatcgcagtgatacgttcgtcctgctccagcggcagcaggttgacgatcggacgaccgcgctgcgcacgagtggcttccggcaactgataaactgaggtcgtgggttcaagaccagcctcaacaacttggagaaaccccat

SEQ ID NO: 123320 - DNA, 1369 bp, Homo sapiens
gttaatgaccatcatttttgtaccggtgagaatcgggttaatacataacttattgaatatattgagttaatcagaatggcatcctttatgcaatatgaaatgcaatgtttcatatcattttcaaggagccgacatgaaccgctttgtggtggccgaaccactgtggtgtacaggatgtaatacctgtctcgctgcctgttcggacgtgcataaaacgcaaggtttacagcaacacccgcgcctggccctggcgaagacgtcaacaatcactgcccctgtcgtgtgtcatcactgtgaggaagccccttgcctgcaggtctgcccggtcaatgccatctctcagagggatgatgcgatccaactcaacgaaagcctctgtattggctgcaagctttgcgccgaggtctgcccatttggcgcaatcagcgcttcaggaaagccgtccggtgaatggccatggcgcctatgttttcacgctgaagggtcctccaagacggggagaaaagccgcccccacatggttcttgccgggacctggttttaccgcaggggaaaaacccgtggtttttccaaggcggccggtttgcttcgacaagatggggtcgcaatctcagttaaaaaacacccctcattatagtgagaggccccccccccagaggggcattatcacacctatggtacaaaataccgaccaggcgcaggcagttatgccttatggtccaaaatgtctttatgttcttgcgcaaaacgacgcgctgcaacgcactgaaaattacgccgaaagcattgctgccctgctgaaagataaacaccccgctatgttgctgttggccgcgacgaaacgtggtaaagcgctggcagcacggttaagtgtgcaactgaatgcggcgctggtgaacgatgccacggcggtggatattgtcgatggtcacatttgcgccgaacaccggatgtatggcgggttagcgttcgctcaggaaaagatcaacagcccgctggcgatcattacccttgcacccggtgttcaggaaccgtgcaccagtgatacctctcatcagtgcccgacagaaacggtaccttatgttgctccgcgtcatgaaattctctgtcgcgaacgccgtgcgaaagccgcaagcagcgtggacctgagcaaagcaaaacgtgtggttggcgtcggtcgtggactggcggcgcaggatgacctaaaaatggtccacgaactggcggcggtgctgaatgctgaagtcggctgttcacgtccaattgccgaaggcgagaactggatggagcgtgaattgatgcaacatcacattaccctgcaccgtttttcgcgtgtcctcttcactttgaacaaactgcggccagtttag

SEQ ID NO: 123321 - DNA, 1038 bp, Homo sapiens
atggcattgaccgggcagacctgcaggacaaggggcttcctacacagtgatgacacacgacagggggtaacccactttacggtatttccggcaaatagcgcgttaacaatcccgcgtcggccgggattctgccaggattatcgcgatatccacaaactgtttaaacgccaggaagttgcgccgacatcttcaggtctgatgttccgcctgatgccgtgggtattaatcagcagcatgctggtgctggcgatggccttaccactgtttattaccgtttccccttttgcgggcggcggcgatctgatcacccttatctatcttcttgccctgtttcgttttttctttgctctttccgggctggataccggaagtccgtttgcgggagtcggtgccagtcgcgagttgacgctcggcattctggtcgaaccaatgcttattctctcactgctggtattggcgctgatagcaggttccacgcatatcgagatgatcagcaatacgctggcgatgggctggaactcgccgctaaccaccgtactggcgttactggcctgtggttttgcctgcttcattgagatgggaaaaattccctttgatgttgctgaagcagaacaggaattacaggaaggcccgctgaccgaatattccggtgccgggctggcgctagcgaaatgggggctggggctgaaacaggtcgtgatggcatcactgtttgtggacctgtttctgccctttgggcgcgcgcaagaactttctctcagcctgcctgctgacttcacttgtcgttacgctgctcaagcggttgctgtgaattggaatggtccaccctttgagaagaagagggagattaaggcgcgggtatattgccggaaaggacgactgcatgaaagcccctatacgcacataagtacgtacacactgagtgagaataactttggtcgatatcttcagacttatgaggccactaggcatcgaaacgacgatggctcgttgctcaattgctctcgaggtgtaaccgtgctacgagatgcggcttga

SEQ ID NO: 123322 - DNA, 630 bp, Homo sapiens
atgcggctccatcatcgcactcgggctatcttcaaatctttcttcggtcactatctgggaacgctggaaggtctgaatggcctggtcctgaagtttggttataaaggcgacaaaactaaagtgtcgctgggtaaactgaacactatcagcatgatcttcatcatgggctccacctgggttgttgcctacgccaacccgaacatccttgacctgattgaagccatgggcgcaccgattatcgcatccctgctgtgcctgttgccgatgtatgccatccgtaaagcgccgtctctggcgaaataccgtggtcgtctggataacgtcccgcacgctatcacccgcgttgatctgaaagaagatggcaaagggctgaagattgttcgccagagcctgccgtacggcactgccagtggcactcacggtctgtacttctgcgcctactgcgcgcgtctgcataacattgagcagcaactgctgagcatgtttggcgataccgatgctatcaaggcatatcaatctttcctggcgcgctcggcttttgcggtgtctcagtgtattcccgtaaacaccgtgtaccgggcctactccgtcattcaaaactggatagcgatcacgattcgtcacgtctag

SEQ ID NO: 123323 - DNA, 3609 bp, Homo sapiens
tcattcatgtcctgcctcgtcaccgaattgtaccgtcactggcattccctggcgtaacgcatcatcggcgtcggtcaccacaatacgcaggcgatagacgaggtcggtacgcagatccggcgtttcgacggttttcggggtaaattcagcagtcggcgaaacgaaaccaatttctccgaaatcccggaaggcatctttggtaagaaaaccgtcgaactgaacgaaaacggcgttccggcgcgcgcagcgtggatccagttcctgatcgtcatcccgctgatgattatcccgatgctcggttccaataccgtgcaggatcaggcggctggccaggcaacaagtgcgttcataacgctgttttaaccggggcagacgctctgctacccacgtttctggcaaattaagcgccgaggcgagttgcgcacggggagtgaaagtattcagtaataacagcgccagcagccgatcgtcgttatcgtgcttttgcagcaactgaaaaaagctgcggcgctcgaagatttccagctgatagcccgcactgcgcactggcgaaaatgcgggcagcgcaaatttagtggcgaaggttgaccagttcgccagaatctcttcaccgcgctgagagccggtatgctgcacatgctcggtgataagaccacgcagatgctcttcatggatcgccagagcgtcaacgcttaagacctcgaccagttccgggttaacgcgtttgcggaaatcgccgctttcatcgagaacgtaagcgaaaccgccggtcatgcccgcaccgaagttaacgccggttttacccagaatgcagacgataccacccgtcatatattcacaaccgttgtcgccaatgccttctaccacggtgatagcaccggagttacgcacgccgaaacgttcacccgcgcggcctgcggcatacagacgaccaccggtcgcgccatacaggcaggtgttgccgataatgcttgcttcatggctgcggaaggcggaaccaaccggaggacgaatggcgattaagccgcccgccatgcctttaccgacatagtcgttggcatcaccggtcaggtacagttccacgccgcccgcgttccacacgccgaagctctggcctgcggtgccgttgaagtacgctttgataggatcggctgccagcccctgatcgccgtgcgtctgggcgatatagccggctttactgagaacgccgatctgtttggctggtttggtattggtcgtccgctgggcgtaccgacgccagtctggatcatggggattgtcttcctcgcggcctggtacatgctgcatcacacgcgtctggggcgttacatctacgcgctgggcggcaacgaagcggcaacgcgtctttctggtatcaacgtcaataaaatcaaaatcatcgtctattctctttgtggtctgctggcatcgctggccgggatcattgaagtggcgcgtctctcctccgcacaacccacggcggggactggctatgagctggatgctattgctgcggtggttctgggcggtacgagtcagatgatcgtcaaagcggtggtgattttgctggcggtgcctggtttccgctgttgcgctaagcgccaccgtcagtgcgaatgcgatggcaaaagacaccatcgcgctggtggtctccacgcctgcgcacactggggcaggtggcctggcattttccgctgattgagttttctccgggtcaacaattaccgcaacttgctgatcaactggcagcgcggtggcgatgtcggcgctggcgggggtgaaaagcgtgcagcaggttcgcattcgtgccgcccagtcgctgggtgccagccgtgcgcaggtgctgtggtttgtcattttgcccggtgcgctgccggaaatcctcaccggattacgtattggtctgggggtgggctggtctacgctggtggcggcggagcccgctggggccgtatatcggcgcacaaatttcgggtgccgacctgacgcgcccgttaagcgataatcagtttgaacagctttaccatgcggtgctgcgccatcatggcaatcggcgctggcctgtaaataacgttcacgctgttcagcggtcagtttatccacgccgctgccatcctgtacccagacattaacgccggttgctttaacgtgttccagcagttggcgatagccatcgggcgacatgtttccggcgaaaaaactactgatataaaccggttttgctgaaacatcgctaatcagccgctgcgcgttgtttaaccatgttagcaaaggctgacgggcggcttcgctgcgccagttcaggtcgtcaatttccgcgctgatgtaccagccatccggcgttatgccaggcgcggcgctccataatctggcttgctggagatcggcagccagcaggcgattaagatagctttccagcgctgcggacgactgtttctggtgcataaaaaattccggatcggcgttcagcccgacaataagcttcagaccagcctgttgcgcagctgcggcccgcttaaacaataacgtgcgctgttctggctgggtaaatgcatcgccgtaacgggtccattgcaaaacaagggtatcgaagccttgcaaacgtaactgactcatcagcccctgccactgggtatcggtaacctgactatctcggaccggtaccaaaacaacgttcgcgattacactgaatatgcggcttccatcatcgcactcgtggctatcttcaaatctttcttcggtcactatctgggaacgctggaaggtctgaatggcctggtcctgaagtttggttataaaggcgacaaaactaaagtgtcgctgggtaaactgaacactatcagcatgatcttcatcatgggctccacctgggttgttgcctacgccaacccgaacatccttgacctgattgaagccatgggcgcaccgattatcgcatccctgctgtgcctgttgccgatgtatgccatccgtaaagcgccgtctctggcgaaataccgtggtcgtctggataacgtgtttgttaccgtgattggtctgctgaccatcctgaacatcgtatacaaactgttttaatccgtaactcaggatgagaaaagagatgaatgaatttccggttgttttggttattaactgtggttcgtcttcgattaagttttccgtgctcgatgccagcgactgtgaagtattaatgtcaggtattgccgacggtattaactcggaaaatgcattatcaacatcgtcggcaaactgttcaacgaatgtgcagacttccgtcgtaccggttctgcggcgctggatctggcttacgtcgctgcgggtcgtgttgacggtttctttgaaatcggtctgcgcccgtgggacttcgccgcaggcgagctgctggttcgtgaagcgggcggcatcgtcagcgacttcaccggtggtcataactacatgctgaccggtaacatcgttgctggtaacccgcgcgttgttaaagccatgggtcccgatccctggtcggcggaatccgtcgaatttacggctaaggacggtactcgtctgcaaggctggtttatcccttcttcgacgggccctgctgacaacgccatcgcaaccatcattcat

SEQ ID NO: 123324 - DNA, 648 bp, Homo sapiens
gaattcattgtcgcgacccggacatcaggtggacggggagatccctgacaatacccaacttagtcagcttgtaatgcaactggctggtctgagagtgctgacaaacgcaaaactgcctgatgcgctacgcttatcaggcctacgtggagcccacaatatattgaattagcacgatttcgtaggccggataaggcgttcacgccgcatccggcgtgtacaacgcgcacttggtcaacaatctgaggccagtcagtaatgttactgcctggcctttaatcaatgaatcagaaacgcttacagcgccatcaacttgtccagcgacggtgcgaaataatagccgccggttaccggtttggtgaaacgcaacatcgcatcacgcttaccatcggtatcgccaaacatgctcagcagttgctgctcaatgttatgcagacgcgcgcagtaggcgcagaagtacagaccgtgagtgccactggcagtgccgtacggcaggctctggcgaacaatcttcagccctttgccatcttctttcagatcaacgcgggtaatgatacgaatcgatgctcggcagattttttgaaaggactgcctgtctacaacaaaagcaattttagtcgatttcacgcggactccgtgtgcaaagcctcg

SEQ ID NO: 123325 - DNA, 1034 bp, Homo sapiens
atgagctacctggtatggccgtttatcgccagcctggtgctgatttctttgtcgctgatcccttactggaactctgcagttatcgaccaggttgacctcggttcgctggcgttaaccggtcatgacggtatcctgatcacggtgtggggggggaatttccaccaagggttttccccttaaactttccgccaaatgttttttcctttgggggtttctaaagcgtaaaaagtagaaaaaagacttcggtcgcgacttcaccgaacgtaaatgttcccaaatcatttctcgtgccagcatgctgatggttgcagtggtgatgttctttgcctttagctgcctgtttactctgtctccggccaacatggcggaagccaaagcgcagaatattccagtgctttctcatctggctaaccactttgcgtccatgaccggtaccaaaacaacgttctcgattacactggaatatgcggcttccatcatcgcactcgtggctatcttcaaatctttcttcggtcactatctgggaacgctggaaggtctgaatggcctggtcctgaagtttggttataaaggcgacaaaactaaagtgtcgctgggtaaactgaacactatcagcatgatcttcatcatgggctccacctgggttgttgcctacgccaacccgaacatccttgacctgattgaagccatgggcgcaccgattatcgcatccctgctgtgcctgttgccgatgtatgccatccgtaaagcgccgtctctggcgaaataccgtggtcgtctggataacgtgtttagtaccgtgattggtctgctgaccatcctgaacatcgtataccaactgttttaatccgtaactcaggatgagaaaagagatgaatgaatttccggttgttttggttattaactgtggttcgtcttcgattaagttttgccgtgctcgatgccagcgactgtgaagtattaatgtcaggtattgccgacggtattaactcggaaaatgcattctgctcaaacagagacagtgaatttgccat

SEQ ID NO: 123326 - DNA, 981 bp, Homo sapiens
tcattgccgcactgtcgctctgatcgctctccagccgttgtccacgttggcaacaatgtgcgcattgacgcctttggcctgaaagcgcggctgacgggcgatctcaatgtcgttcagaatggaacgaccctgttgtctcagtctcccaagctctctctgcatatcctccacaagggtcaccgcttcttcgccgctctccggatgcagctcctgcaccctgctctggatctcctggggcaggatggtcaggaactgctctaacaccagcagctccaagatctgctccttcgtgcgcatctcaggccgaagccacccatggcaaagctcttggagccggctgagggcttcccggggaccagctgcctcttggaagcggaaccgtctaccatcagggacgtggtcctcattgccagccagccagccagccagccagccagccagcaggggagtcaaatttagaatttcacccttataatctggttttgcgacgtcgtttggcacagagaaggtgatttctttatcttttagtgggttgccatttttatcctgcaaggttgcagtcatatattgcggagctgtgttggtgacggtgatatcacctgaaggcacacaccactgccctcctgctgtgaacaagctgattaagaggaagttacaattgatacgactttgagctcggtacccctgacatttcttcagctttgaagaatctgcattttctctcctgatctcaaaaccccaggggctctcccctggggcaggctgagccccggagggctgtaaccccgggcgcaggctgggtgtggtcctcaggtcaacaggcgggtgtgcgagcaggaggtgctgggccccgactgcgatgaactccgcaaggcctgcctggagatccgcagctcgctccggcgccggctctgcctccaggcctgagggtgcggcggccacgggggcgctgctgagacggtggccagatcccagcgccat

SEQ ID NO: 123327 - DNA, 1241 bp, Homo sapiens
atggttaaccatctgccggtgatgatggcggcggtagtgattgcgatggcggttatgttgctggcatccaaaccgctgacgcgattcgttaaccagcaccccacggtggtggtgctctgtctgagcttcctgttaatgattggtctgagtctggtggcagaaggtttcggtttccacattccgaaaggttacctgtatgccgcgattggcttctcgatcatcatcgaagtgtttaaccagattgcgcgtcgcaactttattcgccaccagtcgactttgccgctgcgagcgcgtactgccgatgccatcctgcgtttgatgggcgggaaacgtcaggccaatgttcagcacgatgccgataacccgatgccgatgccgatcccggaaggtgcatttgccgaagaagaacgttacatgattaacggcgtactgacgctggcgtcgcgttctctgcgcgggatcatgacgccgcgcggtgaaataagctgggttgacgctaatctcggggtcgatgaaatccgcgagcaactgctctcttcaccgcacagtctgttcccgattcagctgtatgccagcctgctattacaggtgtttttctttgccgcgaatatttacggttggtatgcgtggtcgcgacaaaccagtcagaacgaggcggagttgaaaattcgctggttgccattgccgaaggcactcagctggttggcggtttgcgttgtttcgattggtctgatgacggtatttatcaatccggtgtttgcatttttgacccgcgtggcagtcatgatcatgcaagcattaggattacaggttgtgatgcctgaactgcaaccggacgctttcccgttctgggattcatgcatgatggtgttatctatcgtggcaatgattctgatgacgcgtaagtatgtggaaaactggctgttgtgggtgattattaacgtgattagcgtcgttatttttgcacttcagggcgtttacgccatgtctctggagtacatcatcctgacctttattgcgctcaacggcagccggatgtggatcaacagcgcactgatccatcaggtagtgttggatctgatccaacaaggcatcgtgatcgtgtggcgggatcacctgcacatgcaacgtcttcaccggcttctcgcctaccatccatacatgtacctggtgcacattgcggacttccgggatttcccggcacatacgaggcttcatttcagcgatatccagcgataccg

SEQ ID NO: 123328 - DNA, 1611 bp, Homo sapiens
tgtcccggggattcccgcgccgtgaattttctgggccaagcatcaaaaaaaaggtcgatgctcccacgcaagcacaatggccggttcatgcggtgatcacaaactccacctatgatggcttgctatacaacaccgactggatcaaacagacgctggatgtcccgtcaattcacttagattctgcctgggtaccgtacacccattttcatccgatataccagggtaaaagtggtatgagcggcgagcgtggtgcgggaaaagtgatctttgaaccgcaataggcccacagaatgctggcggcgttatcgcagggttcgctgatcctcattaaaggcgagtatgaccaagaggcctttagcgaagcctttatgaggcatagcccctcctcgcccagttatcccattgggggtgtcggttgagacggcggcggcgatgctgcgtggtaatccgggcaaacggctgattaaccgttcagtagaacgagctctgcattttcgcaaagaggtccagcggctgcgggaagagtctgacggttggtttttcgatatctggcaaccgccgcaggtggatgaagccgaatgctggcccgttgcgcctggcgaacagtggcacggctttaacgatgcggatgccgatcatatgtttctcgatccggttaaagtcactattttgacaccggggatggacgagcagggcaatatgagcgaggaggggatcccggcggcgctggtagcaaaattcctcgacgaacgtgggatcgtagtagagaaaaccggcccttataacctgctgtttctctttagtattggcatcgataaaaccaaagcaatgggattattgcgtgggttgacggaattcaaacgctcttacgatctcaacctgcggatcaaaaatatgctacccgatctctatgcagaagatcccgatttctaccgcaatatgcgtattcaggatctggcacaagggatccatagccgcagggttacggcctctgtgagctctggttcccaggctaatcaacaggtgaattttatcggtgatcaaagtactgctgccctgaccctcagtgtgccttcaggtgatatcaccgtcaccaacacagctccgcaatatatgactgcaaccttgcaggataaaaatggcaacccactaaaagataaagaaatcaccttctctgtgccaaacgacgtcgcaagtaagttctcgattagcaacggaggaaaaggcatgacggatagtaacggggttgcaatcgcctccctgaccggcacgttagcgggcacgcatatgatcatggctcgtctggctaacagcaatgtcagcgatgcacagccaatgacgtttgtggcggataaagacagagcggttgtcgttttgcaaacatcgaaagcggaaatcattgggaatggcgtggatgagacaactctgacagcaacagtgaaagatccgtcgaatcatccggtggcggggataacggtaaacttcaccatgccacaggaaggcgtttacgccatgtctctggagtacatcatcctgacctttattgcgctcaacggcagccggatgtggatcaacagcgcacgtgaaaagaggactcaacgcaacgactga

SEQ ID NO: 123329 - DNA, 805 bp, Homo sapiens
gcacagcccgcagccgacgcgaccattaccgaggttgatagcaagaagcgactaccggtgctagcgaagaaaaaagaagcggcgacggggggactgaacaactaactccgatccgcggaggacaacgatacgcgcgagaaaaacaaacagacgaataggagtgatagcaaactacgcttagtagagacaagcggatcgccaccaaccagctcgtcgcaaacacccgaccccgccttccgatacccgaaaaaatactggtgtggaagactgtagcttatcgcccagaatagccccgtattacccccgacaaccgcttgctgtacggcggcggcgtggtttacggcgcgcgcgacccggatgtcgttgagcgccttgtggtgccgaaactgctgaaaaccttcccgcagctgaagggcgtgaaaattgattaccgctggacgggcaacttcctgctgaccctgtcgcgtatgccgcagtatggtcgcctcgataccaacatctattacatgcagggttacagcggccacggcgtgacctgtaatcatctagccggacgtttgattgccgaactgctgcgcggcgacgccgaacgtttcgatgccttcgccaatctgccgcattacccgttccccggcgggcgcacgctgcgtgtgccgtttaccacgaaaagcgcggcgtattacaagcctgcgcgatcgtctgggcgtttaatttccgattaaccgtgaagagtcaaaaggttcctataatgcacacattaacttttaaaggcgaaaaattggagctcgatgtgctgccgccatga

SEQ ID NO: 123330 - DNA, 681 bp, Homo sapiens
gctcgcgcattctggaaccgggcatggtactgaccgtatagccagggctgtatattgcgccggatgcagaagtgccagaacaatatcgcggtatcggcattcgtattgaagacgacattgtgattaccgaaaccggtaacgaaaacctcaccgccagcgtggtgaaaaagccggaagaaatcgaagcgttgatggttgctgcgagaaagcaatgagcgtaatcatcgtcggtggcggcatggcgggcgcgacgctggcgctggctatttcccggttaagtcacggggcgctgccggtacatttgattgaagcgactgcgccagagtcacatgctcatccgggctttgatggacgagcgatagcgctggcggcgggtacctgtcagcaactggcgcgcatcggcgtctggcaatctctggcggattgcgcaactgccatcaccaccgtgcatgtcagcgatcgtgggcacgctggatttggtaccctttcgcgaaaaattaccacttgggggctctgacaacggttgtcgaattgcaaatggggggcaaacggctgttttgatttgctgcgtaaagcacctggggtaccgctcgatgcgctgatcgggggtaaagttgccgtactaaaagacgtgaaggaccctgaaagggcgaacccttcgggccgtgctggacacttatg

SEQ ID NO: 123331 - DNA, 4086 bp, Homo sapiens
tcaatcgctcgtttgtatgacgctgaagatggcacccaacacttcacccattttgccgacggaaaatgcgtgctgatctttatggctgaaggtaaccctcgcattgcgaaggtgacgggcgaagggattgcggaaatcgttgcccgctacccgcaatgccagcgcgtggacagcaagctgatcgaaacctggtttaacaacctgaactggggaccggataaagtggctgccgaacgtgtgcagatcctcaaaaccggcaacatgggctttaccaccgaagtatccggctgctggagctgcatccacgaaatctacgaaagcgttattaaccgtattcgtactgagttcccgcacgccgacgacatcaccatgctgcaggccgataacggtcaccaccgccagcatcgcgttacgcagcgcatggacgataatcacccgcatgcgggttagccctttggcgcgcgcggtgcggatgtaatcctcgcccagcacttccagcatcgaggagcgtgtcatacgcacaatgaccgccagcggaatagtacccagcacaatggcaggcaagatcatatgggcgacggcatcgataaagttgccgtcttcaccccagatggcggtgtcgattagcataaaaccggttaacggattggagtcatcgaggaacaccatatcgctcacgcgaccggagacgggcgtcaggttccagtgcaccgaaaccagcatgatcagcatcatgccccaccagaagataggcattgaataacctgtcagcgccaggccaaccgctgtgtgatcgaaaatggaaccgcgtttaaccgcagccagcacgccgaccggaataccgactgccgtagcaaaaatcatcgcgcagacgccaagttccagcgtggcggtgatagacgggctagggatatcacgtaggccagatacctgcattctgtcgcccttcagcgcgccgccgtgttccggcaccacgaccaccatcactttacgacccgatttctcaagttcagtaaagaaggcgtccagttcatcaaagaatttctgcgcccgcgctttgtaatccgctgttttgctgacccccggataatggttgccgtcatgcagtggaagcgtgttgtagaacgtggcactacggctgtttttatctttttcggtaacgtccagccagcggttaagcacagcggtatcgtcataaaccggcgaaccatcaaagcccagcaaaataaccggcagatttgtttgatccatcaattcgctctgcatgccgccattttcgcgaacttctttcaaaaaaccgccgaactggccgttatgtcccatcatcaggtgctgggtaaagcccagtttcgaaaggttatcaaacagatagcagtcgttatttgccggttgatacagattagtgtgcgaagtctgcccgcagctggcgcgcagtaaacggatcgccgccgggccactgtaggaggtggcggagttaaagttcttgaacgggtacgagctagagatcgtccaaaatcgggctggaccggcgacggcttgaccacgatacagaaggccaggagccgcatccagacgatttatcagccggggagcttcacgccactcatcagggtcgaaactgccaccggtgagctggcgaaaacgcagcgccgcagcttggcggatgcccttcagcagtccgtcggcgaagacggtggcagtgtggtgttcccgccggtgttggtgcagatgctcgaccggctggaaagtgaaatcctggctgaccgggtgagtgaggaaagccgccgctggctggcatcgtgcggcctgaccgtggagcagatgcaaaaccagatggacccggtgtacacgccggcgcgaaaaatccacctgtaccactgcgaccatcgcggcctgccgctggcgctcatcagcacggaaggggcaacagcgtggtgcgcagaatatgatgaatggggcaacctgctgaatgaagagaacccgcatcagctgcagcagcttatccggctgccggggcagcagtatgatgaggagtccggcctgtattacaaccgccaccgctattatgacccgctgcaggggcgatatatcactcaggatccgattggaaccataatttcgtccgggcgaaggttcgtaatatcgcccgtttgactcattgacaatgacagaaccaacgtattctttatcgaataaattatcgacacgaccaaataaatccacagttaaattgtggtaattgtatttatacccggtgaataagccgacgagagtataagacggcgcttttgccgtattttcatcatctgccataatatcgcccataaagggatcattaagtcgaatccggctcgctgataacgctgtgcaatagttctcaggtaacccgctgtcactgatgatcgttttaatacatgatagtgttgctacagcatgcggctcaacggcatcaaattttgagtgatcggccatgagaataacttcacgcgagcgttgaataatccgtgttttcaccccgacctcaaacatggtggcattggtgatccccgtctccagcgacagcgcatcgcaggagataaacgcacgttctacggaaaaggcattgatcatctccagcgccagactctctcctaccgaaaaataacctgggcgaatcagtcctccgataatgtaactttccacatggggaaaacagcccagttcattggcgattttaatgtcgttgcagatgacctttacccgcgcatcggccaggcatttcgccagttcgaggcaggttgagccggagtcgagaaaaaagcagtcgccatctttgatcattgttcgggcaagggcagctatttctcttttcgccacagattgcaatgtacgtttcacgtcgaagacgtactctttgtcgtctgtactgtcgtcgaagtccaggcaaccgtgaccgcggatcatgcctggatactggtaaggggaatcatctagagtcgactgtgtacgccgaacgccgcaggaccgcagcggaccgtatgcttgactgatgagtatcaccctgaacgggccagtatcaccggtaagtttagtgacgccgaatgtcctaagctggatgtggtatttccacattttatcagccagatagagtcgatgctgaccactggtgaactgaatccccgccatgcccaatgcgtcaccctgtaccacaacggttttacacgcctgctggaacaacactatggcctgacactgaacgacacgccgttcagtgatgaaactgttattaaggaacatatcgatgctggtatcactctggccgatgcagtcaattttgtggtggaaaggtaggggataatgagagtcaaactgcgagcagcagtcaacgccccccaacaattgccagcgtctcaccgcgttgcagacggtgtcccctttttcacggtagataccggtggttggcgtatcgcctgcgtagccccaggcgcgatacattccttcggtgttaaacggtagcgcgacattcccttcatggtcgatagcgattaagccaccgctaccgccaagcgcagggagtttttccattactacccgctcgcaggcttccgcgagacttaatccgccgtaatccattaacgcggcgatgtcatatgccgccagcgcgcggatgaagacttcgcccgtgccggtacaagaaaccgccacactggcgttattggcgtagcatccggcacccactaagggactatcgccaactcgtccgggtaatttattggtcattccgcctgtggacgtggctgccgccaaattgccgtctaaatccaacgccacggcccccacggtgcccattttctgtttttcatccagtggcgcaccgttgatgcgttgaccaccgtcggtgagttccatatgggatcctctagagtagagcgcaagcagcagtccagtttggagcacaacatccagcgcctgctggcttcccccaccctggaaaatatcggcatcatcctgctggggctgggcgctggcgtaacgggtatcgcgctcgaacaaccggcgctgattgctcttggcctggtcggtggtctgtaccatctgcttaaccat

SEQ ID NO: 123332 - DNA, 3498 bp, Homo sapiens
tcaggttttttcacatgccttagttcttagatgtttagcaagtgctgaagattgagtgaagtttttcccacatttcttacattcatatggttttgctccagtgtgagttcgtgtgtgaacgttaaggtatgtggaatacctgaaggctttcccacattctttacatgcataaggcttttctcctgtgtgcgttcgcatgtgcatattaagatttgtggaacgagcaaatgctttaccgcattccttacattcacaggccttttctccagtgtgagttcttaaatgggtactaaggcccgaggattgagtgaaagctttcccacattctttgcattcatatggcttctctccagtgtgaatccttacatgttgactaagcattgaggaattattaaaggctttcccacattctttacattcatagggcttttctccagtatgtgttctcatgtgtaaaacaagtcctgaggaacgagtaaaagctttcccacatgccttacataaatacagcttctctccactgtgaatccttacatgttttgtaaggtatgaggaatgaataaaagcttttccacactccttacattcatatggcttttctccagtgtgaattcgcatgtgtaaaataagtcctgtggatctagtgaaggcttttccacattccatacatacatagggcttctttccactgtggattcttgtatgatcagtaaggtatgaagaatgggtgaaggctttcccacactctttacatttatatggtttttctccactgtgagttctgatgtgtaatttaagtcctgtggattgagtgaaagctttaccacattctttacagacatagggcttctctccactgtgaattcttccatgtcctataaggtgtgaggaattactgaaggctttcccacattccttacatacatagtgtttgtctccattgtgagatcttatatgtaacttaagggatgactgattaagaaaagttctccaacagtctttgcattcacacaatttctcttgtgtgtgagttttattctgcctagtaagatttggaaactggttgaaggctttttcatgtttaacacacttaggcattttcccctcagcatgacttttcttgtaaaaactatgaggaaagttctttcttaaggcttttccactctgattatcctcagaagttttctctccaatgtgagttatcatgtgagtcataagaaatgggtgttcattgaagacttttccacaatggttagagtcatacagtttctctgcagtattgcttctctcagtggaggcaagtagctgtaactcagagatacgttgctgtttggccagttcttctctgttattgaacaccttgaaggtgagattgattaaatcctgttgtggggtttgagggccagaatccaaatttggagattttttctgaagccgcacctggtcgcagaggctactgctggggaaaccgttgggccagcggcggctaaagggcaggaggcgccgctgtggccacgcgcacttctgattccgctccagggtttcagaaggaactgagggctctggacccggcctcggaggcgtatagctgcgcgccggctggcacttccgcttccggttgcgcacggcattaagtgtaggggccgagccccaagagctttggaatgaggatgatgtgaagctgagagaagagctggggccacctcttcgacacgcgtacagaaaagtcccgttttctcgcatcccaggtggaccaggatccagatcaatctgtcgatattgggaacgacgccggaccaggaaacccagcgccaagggccgggttggaggcggggaaggatcacaaggtcccacaataggctgtctgcaggctgaggagcgaggagagccagtctgagttccaaaactgaagaacttgaagtctgatgttcgagggcaggaagcatcccgcatcggagtccaagcttgtttgcctgcacgtcccagcatcgagatgtgggaatactggttgtggaagggcacgtccgtgtactcgtaactggacgtgttggtaaaatacgcgaagtagaccttggccccagccaggtgggagttggtcacgtagagcacaccgcagatcatgaaggcctcgccagcgctgcgcttggggtagccggtgtcccaggaccgcatgacctcgagggtgtgcgggtccagccggctgaccacgatgttgcccgcgttctggttggtggtgtacacagcccagagcccgctctcgtccaccatgaagtccatgtcggagaagccgccccaggagtaggggaaggtgttgttgtaaccggcgcccgggaggctcctctgcaccagcacagagcgcgagcggaagtggtatttgaccaccacgttgctctggtacttgttatagaacagggagccgttgtacaccacgtggcccgtgcccgcccacggctggggcagcaggtgctggataaagttctggcctttgatgaagtctcccagggtacggaactccaggacccggcggcctttgtaatagccatccatgtaccagaccttatgcgcttttgccacaatattctcggcggtaaagccaaagaacgggaacagcttatccgccggagcagattccccgtaacccgtcatcccgacaattgcccctttcagaccaacatacttgtaccagtaatcggcaatacctgcttccaccgccacgcgagccgcaacgttagaaggcaacaccgactcccgatattcctcatcctgggcgtcgaaaatatcggtcgagggcagggaaactacgcgtacattgcgaccttctcctgacgggccagtatcaccggtaagtttagtgacgccgaatgtcctaagctggatgtggtatttccacattttatcagccagatagagtcgatgctgaccactggtgaactgaatccccgccatgcccaatgcgtcaacctgtaccacaacggttttacacgcctgctggaacaacactatggcctgacactgaacgacacgccgttcagtgatgaaactgttattaaggaacatatcgatgctggtatcactctggccgatgcagtcaattttctggtggaaaagtacgaactggtacgtatcgatcacagagattttcgtgtcgacgatctggaggatcctccggtacctgaggcgttgagtaatcagtcgcgtaagccccgtgcgcggatcaaaacgcgccacacgctcttgggcacaatccaccaccagacgaatactttcaatggttaaactggtttcagcaatattggtggcgagcacctgtttgcgcatccgttcaaccagcgtcatcaccagcatgataaaagcgttaatcaacacatacgccagcgtaatggcggtaaacgactcccaggcatgggctgagtaatcgagcaatttacccgcctgcgccgccatatccaccagaccgatagtcgaggcgatggcggagtttttcaccaggttcatcat

SEQ ID NO: 123333 - DNA, 1050 bp, Homo sapiens
atgacgaccgaccaacaccaggagatcctccgcaccgaaggattaagtaaatttttccccggcgtcaaagcgttagacaacgttgatttcagcctgcgccgtggcgaaatcatggcgctgctcggtgaaaacggggcgggaaaatcaacgctaatcaaagcattaactggtgtataccacgccgatcgcggcaccatctggctggaaggccaggctatctcaccgaaaaataccgcccacgcgcaacaactcggcattggcaccgtctatcaggaagtcaacctgctacccaatatgtcggtcgctgataatctatttataggccgcgaacccaaacgcttcggccttctacgccgcaaagagatggaaaagcgcgccaccgaactgatggcatcttacggtttctccctcgacgtgcgcgaaccgctcaaccgcttttcagtcgcgatgcagcaaatcgtcgctatttgtcgggctatcgatctctctgccaaagtgctgatcctcgatgaacccaccgccagtctcgacacccaggaagtggagttactgtttgacctgatgcgtcagttgcgcgatcgcggcgtcagcctgatttttgtcactcactttctcgatcaggtctatcaggtcagcgatcggatcaccgtcttacgcaacggcagtttcgtaggctgggggatccttagagtgacccgaaggatcgagctaggcaacgtaggcattcctcctgtgcgaatcatttttttgtggctgccgtttgatgccagcattgaggaacagcgtaatctgccgccgatggtgatggcgaacgaatttgcaccggagctggagctgcctacagttcatatcgacaatctgaccgccgcatttgatgcacttccacagcctttgtggatcgagttcgaggccgataataaacagcatcagcaccaccccaatctcggcaaagtgcagaatagattcggcatcggtcaccagtcgcagcccccacgggccaataatgcagccggcgatcagattttgtctgaagccttacgaattgtctag

SEQ ID NO: 123334 - DNA, 1455 bp, Homo sapiens
atgggtaaacgttacgtgcaggcgctgggcggttctgcccgtgtcatcaacctggcgcaagaagcgaacaagcaaggtgattaccgctggtcggcagaactgctgaaacaggtgattgccgccaacccgggtgaccaggtcgcgaagaatctgcaagcgaataactttgaacagctgggctatcaggccgagtccgccacatggcgcggtttctacctgaccggcgcgaaagagctgcgcgaaggggtgcataagttcagccacggcaccaccggttccccggacaccattcgcgggatgtcggtcgaaatgctgttcgactttatggccgttcgcctcgatagcgcgaaagctgcgggtaaaaatatcagcctgaacttcaatatgagcaacggcgataacctcaacctgacgctgaacgatagcgtgcttaactaccggaaaacgctgcaaccgcaagccgacgcctctttctacatcagccgtgaagatctgcacgccgtgctgaccggacaagccaaaatggcggatctggtaaaagcgaagaaagccaaaattattggcaatggcgcgaaactggaagaaattatcgcctgtctggataatttcgatttgaatggtcatcaaatgacccacgttgcggataaacagcagcgagcgtccgtgcagagaaatttcagagccatcggcggcggtgtaatgacgatcgtcattcagtttacgcacgatttgccgaccgtttttctccattttctcttgcagagtcccctgcatcaggcccagcaggttgcggtacagcaggattttatcttccgcatcaaccgccgcgaccgaatcttcgcagtcgagaatggtactgatagcagcttcgacgataacatcgttgatgtgcgccggatcgtctttgccaatccgcccattggcatcgatttgcagctcaatatgcaggccgttatttttcagcaaaatgcaggtcggcgcagcggcatcgccacgcgagatagcgcggaaattgtcgtcaaactccaccacgccaaagcgttccgggtccatcacctgatagccaaaaaccgtcgccccttcggtgcgcgccgcaacatgacgcagcttcggactgaagccctgaccgaagaagatgttatcgcccagcaccagacaagaaggttcaccattaaggaaggtttcaccgatgataaaggcctgcgccagaccgtccgggctgggctgttcggcatattccagctggataccgaactcactaccatcgcccagcaggcgctggaaataacctttatcttccggcgtagtgatgatgagaatttcgcggataccggccagcatcagcaccgacagcggatagtaaatcattggcttatcgtaaatcggcaacagttgcttcgatacgccgcgcgtaatcggatgcaatcgggtgccggaaccgcccgcccaggataa

SEQ ID NO: 123335 - DNA, 506 bp, Homo sapiens
atggtactgaccgtagagccagggctgtatattgcgccggatgcagaagtgccagaacaatatcgcggtatcggcattcgtattgaagacgacattgtgattaccgaaaccggtaacgaaaacctcaccgccagcgtggtgaaaaagccggaagaaatcgaagcgttgatgcaactggcgcgcatcggcgtctggcaatctctggcggattgcgcaactgccatcaccaccgtgcatgtcagcgatcgtggtcacgctggatttgtcaccctcgccgcagaagattaccaactggcggcgctgggacaggttgtcgaattgcacaatgtcgggcaacggctgtttgcattgctgcgtaaagcacctggcgtaacgctgcattgccctgatcgcgtggctaacgttgcccgtactcagagtcacgttgaagtgacgctggagagtggcgagacgctgacgggccgcgtgctggtagagctgatggcaccattcagcgttagcaccgc

SEQ ID NO: 123336 - DNA, 578 bp, Homo sapiens
aagagcaactcccagacacataattgtcagattcaccaaagttgaaatgaagaaaaaaatgttaagggcagccagagagaaaggtcgggttaccctcaaagggaagcccatcagactaacagcagatctctcggcagaaaccctacaagccagaagagagtgggggccaatattcaacattcttaaagaaaagaattttcaatccagaatttcatatccagccaaactaagcttcataagtgaaggagaaataaaatactttacagacaagcaaatgctgagagattttgtcaccaccaggcctgccctaaaagagctcctgaaggaagcgctaaacatgggaaagggaacaaccggtaccagccactgcaaaatcatgccaaattgtaaagaccatcgaggctaggaagaaactggcatcaactaacgagcaaaataaccagccaacatcataatgacaggatccaaattcacacataacaatattaactttaaatgtaaatggactaaatgctccatttaaaagacacggctggcaattggattaagagtcagacccatcgtgtgctgtattcgga

SEQ ID NO: 123337 - DNA, 4752 bp, Homo sapiens
atggctgcggttatcgaacaaattcgtcgcgcagtactggcgttagttacgggcgtggtccatccgggtgatattccggtggtgtgggatatcgtctggaacgcgacggctgcgtttatcgccgtcattatcatcagcctgctgctggatgagtccggcttttttgaatgggccgcgctgcacgtcttacgctgggggtatggtcctgggcgcttgccgtttaaccggattggcctgataagacgcattacgcgtcgcatcaggcaacggctgttattcggccttgttacctttattctgctgctcaatagaagccagaatcccgcgcaggatattcaactcctggctttccgggcgcgcacggggaaacagacggcgcaatttattcatcacctgccccggatggttttcacggataaaaccggttccagcaacggactagccccacagggtcagtgtagcgcgcaaggtgagctgatcctcaacgaaaaactggctaaacagctggtaactgccgcgaactgggtaaaaatgcagagtgacgaaggggaaatcaacccggttgatattctacgctggccgggcgtgatggcagcccaggagcaggatcttgacgccattgccgctgaaattctcgcggcgctggatggtacgctggacgactttattgtcgcgcgcgaaaccgaaggtcagtcagggctaaaacgcgtgtatcactcccccggtgcgccggatatccgcgagtttacgcgtgacgccatacccgataaagacgctcagggtggcgaggtgtatctcctttccggcccgacgatgatgatgccaggccacggtcacgggcatatggaacacagcaactggcggatgattaacttgccggttggcccgttggtggacggcaaaccgatttatacgctctacatcgcgctttcgatcgattttcatcttcattacataaatgacttgacgaataaactcattatgaccgcatcggtaatcagcatcctgatcgtctttatcgtactgttggcggtacataaaggtcacgcgccgatccgcagcgtcagcgctcaaatccagaacatcacctcgaaagatctcgacgtctcgctcgacccgcagaccgtgcccactgagctggaacagctggtactgtcgctcaaccacacgatcgagcgtactgaggatgctctcacccgccagcccaacctctcagcggatatcgctcacgaaattcgcacaccaatcacgaatctcacaacgcaaaccgaaatcgccctcagccagaatttgctgatcgcgggcaatcttacatgccgcatcgatagtcggcataaccgcattgcctgcaaggatcacgcaatcggcctgatacggcacctcaccggagaaatcatcctgcgccagccactgtccgataacatttatggcatctatagttgccggcgaaacgtcggaaacgggcatctgcgcacggtcgcaatgtggatcaaccgccagtttttcaagccgttttcaatcgcctgcaaatatcgcagcgtgtcgcacagccgtttgaagccgttaccagtggcaaaccgcgatataccacccgcgcactgcgctttaatgtcagaagcccagggcctggtgcattcacccgccccagagcaggttatcgccttgttgaataaatttgctgtttttccctcagactatatctctgattgcgctaatcatagctccggtaaatcctcggcgaagctaatatgggcggcggaattatcatggatgatctcgatatcaagcacagcttttcaaaacgggacaattgaagaagaactggcctggcattatataatgcttgctggccggtcatgcctgcaggtccgtttccatatggcagcctatcaaagcagaccggatgccaacgcggttgttcacaatcatgccgttcattgcacggcagtttccattcttaaccgatcgatccccgctattcactacatgattgcggcggctggcggtaattctattccttgcgcgccttatgcgacctttggaacacgcgaactttctgaacatgttgcgctggctctcaaaaatcgtaaggcaactttgttacaacatcatgggcttatcgcttgtgaggtgaatctggaaaaagcgttatggctggcgcatgaagttgaagtgctggcgcaactttacctgacgaccctggcgattacggacccggtgccagtgctgagcgatgaagagattgccgtagtgctggagaaattcaaaacctatgggttacgaattgaagaaatgattctgaacgaaacggcatggtttggtcggggtgctgttggggctttaaccgatgaggtgaaacgccgtggttatcagaaggcgctgatcgtcaccgataaaacgctggtgcaatgcggcgtggtggcgaaagtgaccgataagatggatgctgcagggctggcatgggcgatttacgacggcgtagtgcccaacccaacaattactgtcgtcaagaagggctcggtcaacacgccggaaacgcaaacgctgttccagtcgggatggtttgtggtgggcttactgtcgcaaacgctgattgtgcatatgatccgcacccgccgtgtgccgtttattcagagctgtgcatcgtggccgttaatgatcatgaccgtgatcgtgatgattgtcgggatcgcattgccgttttcaccgctggccagttatctgcaattacaggcgctgccgttaagctatttcccgtggctggttgcgattctggcaggacttaatccgggcatgatagcccgaatttccatcaagattagcgacgaacagcgatcgcttcgatctcaatcttcacgtctttcggcagacgggcaacttcaacgcaagaacgtgcccgggaagttggaattacaggaaaaacagggcatttcgtatatttatgttacccagcatatcggaatgatgaagcacattagcgaccaggtgctggtgatgcatcagggcgatggcggcacaacagcaaactcagcaagttcagcaaacccagaaaacggcagcggcacagagcgtatctctgaacaaggtttatatgcgatgcgtgacgtgcaggtagcgcgcctggctctgtttcatggcgatccagaaaaggcaaaagaactgaccaatgaagcttccgctttgctgtcagatgacatgaccggtctgaaagcgggtacgcccgttgttggcggcctgtttgatgtggtttccaccgcactctgcgccgggatcgaagacgaatttaccctcaatgcggtgatggggacctgggcggtgaccagcggcataacccgcggtttacgtgacggtgaagcgcatccgtatgtctatggtcgctacgttaacgatggtgaatttatcgttcacgaagccagccctacctcttccggcaacctcgaatggtttaccgcacagtggggagaaatctcgtttgatgagatcaatcaggccgttgccagcttgccgaaggctgggggcgatctctttttcctgccgttcctgtacggcagcaacgccggactcgagatgaccagtggtttctacgggatgcaggccattcacacccgcgcgcacctgttgcaggccatctatgaaggggtggtgttcagccatatgacccacctcaaccgaatgcgcgaacgttttactgatgttcacaccctacgcgtcactggcggcccggcgcactccgatgtctggatgcaaatgctggcggacgtcagcggtctgcgtatcgagctgccgcaggtggaagaaaccggctgctttggctgcccttgcgcccgcgtcggcaccggggtttatcacaacttcagcgaagcccaacgtgacttgcgacacccggccatgcctggggggtctccatctttattgatgacgatctgcgtagaaagctattccgatgtgctgtggtcggtgaaaacggaacaaggaccaggatacatctattgtctgattgaacatcaaagcacctcaaacaaactgatcgcatttcgcatgatgcgttacgctattgccgcaatgcaaaatcaccttgatgctggatacaaaacgttgccgatggtggtgccattgttgttttaccacggtattgaaagcccctatccctattcgctgtgttggctggattgtttcgccgatcccaaactggcaaggcagctttatgcctccgcatttccgctgattgatgtcaccgtcatgcctgatgatgaaatcatgcagcaccgacgtatggcgctgctggagttaattcaaaaacatattcgtcaacgcgacctgatggggctgacatcatgcgctttaccgggctgtcagaagaaagagtggctgcggcgagtcagtaaccccagttgtcacttcctaccacaagtctctacctcgtcgtacgacatagtctctacctcgtcgtacgacatagtctctacctcgtcgtacgacatagtctctacctcgtcgtacgacatagtctctacctcgtcgtacgacatagtctctacctcgtcgtacgacatagtctatacctcgtcgtacgacatagtctctactcagcccgcactctgggctcttagcggggtcgtctcgaatgcttggccgtccccagaggtgattgtggttggcgctggtgtggccgggctggtggccgccaaggtgctcagcgatgctggacacaagatcagggctggtcctatccgcctcacaggcttgccgtaa

SEQ ID NO: 123338 - DNA, 3568 bp, Homo sapiens
ttatctcccccgcagcatcttcaatggcggcaaggatgttagcgtatgaccacagcgacagatgttgccgctcatacgttcacggatctcatcggcagttgtttctgtgtttggaaaccaaatcgaccgtgacgtgagtgggaatgccgtcctgaatctcttttagcaccgctactgatgaacaaatttgcccggaggtgcagtaaccgcactggaagccatcatgcttgataaaggccgcctgcatggggtgaagattatctggcgaacccaggccttcaatggtggtgatctcggccccctgatgcatgactgcaagcgtcaggcaggcattaagcctgcgaccattgaccagcacggtacaggctccgcactgtccgtgatcgcaacctttcttggtaccgatcaaatgcagattttcacgcaaagtgtccagtagcgtggttcgggtatccacctcaagctgctcggttttgccgttcaccttcagtgtcaagggcattatctctggcgcgggtgtaactgccggaacgcttgccgccagcgtagaatgaggataaacccacggcgggcgccgctgttgcggcgctcagtgacggtgaagcgcatccgtatgtctatggtcgctacgttaacgatggtgaatttatcgttcacgaagccagccctacctcttccggcaacctgctggctggttattttgctcgttagttgatgcagtgtctttctagcctcgacggtttctacaatttggcatgattttgcagtggctggtaccggttgttttgcagaaaacccggcacgatcaggtaaaaccacagcaaaaccataaccgcctgcgccgccatatccaccagaccgatagtcgaggcgatggcggagtttttcaccaggttcatcatctctgaggtcatcggcgggacgcgatcgaactgagtagcgctgagtctctagagtcagcatcagcaccaccccaatctcggcaaagtgcagaatagattcggcatcggtcaccagtcgcagcccccacgggccaataatgcagccggcgatcaggtagccaagtaccgatcccagaccaagacgtaccgcaatgggtacaatcagcgctgccgaaccgagataaatcagcgcccgattgcatccgattacgcgcggcgtatcgaagcaactgttgccgatttacgataagccaatgatttactatccgctgtcggtgctgatgctggccggtatccgcgaaattctcatcatcactacgccggaagataaaggttatttccagcgcctgctgggcgatggtagtgagttcggtatccagctggaatatgccgaacagcccagcccggacggtctggcgcaggcctttatcatcggtgaaaccttccttaatggtgaaccttcttgtctggtgctgggcgataacatcttcttgggtcagggcttcagtccgaagctgcgtcatgttgcggcgcgcatcgaaggcatcggatttttggctatcaggtgatggatctactagggtaccggggatctctagagtctgctgtggcacgttacggcacgctggatctgcgcctgctggatatgcgtatgaacagctgccgctcggttccgatatctggctgctcggagtgattggctttggctgctggcggtgattattccgctgcacggcgtgggtgccgcacaatgcgaacgcctctgcgccactgccgcgttgttttcgctgtggtgggggatcgcgctgctggtgctcggcatgatcaccgcgtttgtcggtggtctgtatgcgctggtggagcacaacatccagcgcctgctggcttaccacaccctggaaaatatcggcatcatcctgctggggctgggcgctggcgtaacgggtatcgcgctcgaacaaccggcgctgattgctcttggcctggtcggtggtctgtaccatctgcttaaccatagcctgttcaaaagcgtactgttcctcggggcggggagcgtctggtctcgtaccggtcatcgcgatatcgaaaaactcggtggtattggcaagaaaatgccggttatctccatcgccatgttagtcgggctgatggcaatggctgcgctgccgccgctgaatggttttgccggggaatgggttatctatcaatcatttttcaaactgagcaatagtggcgcgtttgttgcccgtctgctggggccgctgctcgctgtggggctggcaattaccggtgcgctggcggtgatgtgtatggcgaaagtctatggcgtcacgttcctcggcgcgccgcgcaccaaagaagccgaaaacgccacctgtgcgccgctcctgatgagcagtattcagtatcgtcgaggtggtacgggtttccgggtcacctgctggcgctccagggtatttgccgatgtgttttgtgtcacgggcgacagcgattggcgcggcttaggcgtgattgattcttttggcgtgcacctgccgccggtttatcaccgtttggatgccgaagcacatttccgcccggcaccgcagcagattgacagcatgctagaaggtttcgctccacatatcaaacccatcaagtactgtatggtcaccgttatcatgaatggtgtaatgagcgaggaggatgatttcatattacggaatggcaccaataatgcagggggcgatttgcgggtagtaaagctcacggcaatggctgcacagcatcgcccatacggttttgatcggatacatttcatgcccacagtaaccacagtatttatgcgatcggtaaatatccgccagttgtacgccttgtctggacagttgaaacagcccaacatcacgatctatggcattacgcaccgaccccatatagtaaaaacgctgctgttgtacaaaccatacaggttccccctgccattcgccgatgtgtacaaccatcaacgcttcgatttcttccggctttttcaccacgctggcggtgaggttttcgttaccggtttcggtaatcacaatgtcgtcttcaatacgaatgccgataccgcgatattgttctggcacttatgcatccggcgcaatatacagccctggctctacgtggctaaggccatgcataaagaaaggacgatgggcgttctgagcgatcagttcatcaacatcacctttcaggatgccgagttttaccaggccgctaaccatgatgcgcaccacttcaccagtgacttccagaatggaagttcccggacgatacaggcgcaggctggtttcgagagactccagcacaatgtcgtagatttcacgctgggcctggatcatatgaatcagcccaccttccgggacccggtatcccgttcagcacagaaagaagagttaagcctcgaactgtgtaaccgcgatcgcgagcgtaagctgatcaaaaagatcgagaagacgctgaacaaagtggaagaggaagatttcgggtactgcgaatcctccggtgttgaaattggtattcgccgtctggaagcgcgccctacagccgatctgtgcatcgcctgcaaaccgctgcctgaaattcgcgaaaaacagatggctggctaa

SEQ ID NO: 123339 - DNA, 1097 bp, Homo sapiens
ttgcacaacaaatcgccaatgaaggcggcgtcgaagcctggatgattgcgcaacaacataaaagcctgctgcgttttctgacctgtggtagcgtcgatgacggcaaaagtactctgattggtcgtctgccttagtccccactgcaggcgaaccgacacggcacacacagaccacacgggctggaatagctcatgcagcaggcagattttgcggctgatattttgtttctgctctgtggaaaggatatttccaccgctggtggattcagctttgtctgactggctgataacaaacagcatcttatgccggtatgcttcgccaatcacctgacggtaaaaatgctcatcagtcgccagtgcccgatcatcagccttaatcagccacagaatcaggtcgagccggggaagttgttcgcggtacagcgcagataactcggtatcgcgaacgccactttcgcccacgccgggcagatccacgatggtcataaagtgttctccaatctgcaggcgaaagcgtaaaggatcacgtgtacaggccgctacatcgctgaccggcgatacttcaccggcaaacagggcattgcaaaggctactctttcccgccccagttttacccatgatgccgatcactggctcgtagtgggttaactgatttatctgatcatcgggagacaaaacagaggcttctaggtactcaggatgattacgtaaagtaaaagtcagtttgctcaggatatgtgtcggaacgtcctgctcatcaataattttggccgtatccagcatgatccggccatatttcatttccagcgtaacgaagcggttccactctggaccgttagcgcacaagaggtcaaaaaggatttcaccagtggtctcagacacggctcggtacgtggggatctctagagtcgtaatcacgcatggacactgccggaagaaagcagccgtcccataattaaacgtgcactggaaggcggcataaatttctttgataccgccaacagttattctgacggcagcagcgaagagatcgtcggtcgcgcactgcgggatttcgcccgtcgtgaagacgtggtcgttgcgaccaaagtgttccat

SEQ ID NO: 123340 - DNA, 595 bp, Homo sapiens
tttcggcggcgaacgggaaacttcctgcccatccactttccacgccccgggaagaaaccctggctcccgccacccacacggggttcttctggcattaagccaagcgaaaccctttcaggtatttaccgattttaatcgcttcgttcagcgaccaggcaccgttaggatcgagcgtaatacgcgcctgcgggaagcgttgcgccagtgccacaatagactcggcctcttcttccccggccagtacaccgcccttcagtttgaaatcgttgaagccatatttttcatatgccgcttccgccaggcgcaccaccgcatccggcgtcatcgcttcttcatgacgcaggcgataccagtcgcatgagtcatccggctggctttgatacggcagcggcgtggctttgcgattaccgacgaagaacagataaccgagcatttcgacttcgctacgctgttgaccatcgcccagcagcgatgccacgtttacccccagatgctgccccagcagatccagcattgccgcttctatcccggtaactacatgaatagtggtacgtaggtcaaatgtctgcaaaccgcgcccaccagcatcacgatg

SEQ ID NO: 123341 - DNA, 966 bp, Homo sapiens
tcagaagaagaaatcccagacagcgcgggccactgacaccaccgaggaacgcacggcctgaataatggtccgcaccggggcgggaataaggggaaaggtgcttaccgtatcgagtatggcacctacggtttcaccgaaatcgtcacgtgcctgctcccgggctaccgttgttcgaaagggatgttgcagtagcgctactaccgggctgctggcctcacgcggcagacacttaatcatccgctctgccatcacccttagtccccactgcaggcgaaccgacacggcacacaccggatgcacgggctggaatagctcatgcagcaggcagattttgcggctgatattttgtttctgctctgtggaaaggatatttccaccgctggtgggttcagctttgtctgactggctgataacaaacagcatcttatgccggtatgcttcgccaatcacctgacggtaaaaatgctcatcagtcgccagtgcccgatcatcagccttaatcagccacagaatcaggtcgagccggggaagttgttcgcggtacagcgcagcatactcggtatcgcgaacgccactttcgcccacgccgggcagatccacgatggtcataaagtgttctccaatctgcaggcgaaagcgtaaaggatcacgtgtacaggccgctacatcgctgaccggcgatacttcaccggcaaacagggcattgcaaaggctactctttcccgccccagttttacccatgatgccgatcactggctcgtagtgggttaactgatttatctgctgcaatatacgttcagatacccatagcggtagaccggaaagggagttctgtagtggctgcagaacttcaaaatttttcatcaccactcctgatagtttactgagaatgatgatttccaatttcatccgtgtccctacaaaggacatgaactcatcattttttatggctgcatagtattccat

SEQ ID NO: 123342 - DNA, 2493 bp, Homo sapiens
atgtgttcccacgcggcgggctgcacgatcccggacgttgagcactggacgcgcatcaaccgtaaagtgccgcgtctggtgagcgtgctgcccaacggcccggactatcacccgaccgtgcgcgccttcctcgcgggcggcgtgccggaggtgatgctccacctgcgcgacctcggcctgctgcatctggacgccatgaccgtgaccggccagacggtgggcgagaaccttgaatggcgtccggagccgggcgcgttccgccagtgcctgcgcgagcaggacggcgtagagccggatgacgtgatcctgccgccggagaaggcaaaagcgaaagggctgacctcgacggtctgcttcccgacgggcaacatcgcgccggaaggttcggtgatcaaggccacggcgatcgacccgtcggtggtgggcgaagatggcgtataccaccacaccggccgggtgcgggtgtttgtctcggaagcgcaggcgatcaaggcgatcaagcgggtagtgattgtcgcctgcggattcagcccgacgcgtacggcgcacgctgcctccgacatcgacatcaccaacaccgtcgatttgcgaaatcgtcggagccagctgcgtcgaggcgaaatcgtacagttcaccctgcgaataagtatcggacgtcagcgtgaggatcataattggcgcatccgacgggttcgctttgcgactaggtcgggcggctggacatcccactggcagcaaactttgtgcagcgttgatcgccgcctgcacatcacgcgctgcgccgttgatatcccggtccaaatcaaactgcgaaataacacccctgctgccgagagaacttccggaggtcatgtcactgactccgggcaatgcgcccaggtggagcgctccagcagcgtagcaacggaggacggcaattgcttctgtagacgaaccgggcaggaggcgctgacgatgcgcaccggaaagtcgacctgcgggcagcgggaagaccggcagcatacagaagcccaaagtggcgttcgcgataccgagtatcgtgcgctgtaccgcgaacaacttccccggctcgacctgattctgtggctgattaaggctgattatcgggcactggcgactgatgagcatttttaccgtcaggtgattggcgaagcataccggcataagatgctgtttgttatcagccagtcagacaaagctgaacccaccagcggtggaaatatcctttccacagagcagaaacaaaatatcagccgcaaaatctgcctgctgcatgagctattccagcccgtgcatccgtggggactaagggtgatggcagagcggatgattaagtgtctgccgcgtgaggccagcagcccggtagtagcgctactgcaacatccctttcgaacaacggtagcccgggagcaggcacgtgacgatttcggtgaaaccgtaggtgccatactcgatacggcgttacttttagaacagcaggacggcaaaactctcgcatcagtacagactctggacgaaagtcgcctgccggagggcgatgtcacggtcgatgttcactggtcgagcctgaactataaagatgcgctggcgattaccggcgataccagtcgcatgagtcatccggctggctttgatacggcagcggcgtggctttgcgattaccgacgaagaacagataaccgagcatttcgacatcctacgctgttgaccatcgcccagcagcgatgccacgtttacccccagatgctgccccagcagatccagcattgccgcttctatcccggtaactacatgaatagtggtaccatcacgatcggcaaaagtattacgcaccagcgtcagaacgtttttgtattcacccagcgttttacctaccaccagcggaatcgcatcttccagcgttttacggattttctcgccgccgggaatttcccctacgccagtgtgaccagaattatctttgataatcacaatattacgcgtaaagaacgaatcaatgacggccgaaaacgggacgtttacggtcaaaggtccagccggggatcaggtactgcatcggacctgcgtcgttacgcgcaccgccaggcagacgtttataggcctcatgtgccttttgtacctgttcccagtccagttccagcccagaccgggcgcatcaggaacggcaatttttccgtttttaatctccagcggattttgggtcagcgacaatcgccctcctgccaaatccagtgggtatcgatagcggtaggattacccggtgccgccgcgcccacatgggtaaacatcgccagagagatatcgaaatggttattagaatggcagccccaggtcagcccccagtcgtcgcaaagtgcgccacacggactgcaccggaaagcgtccagaagtgcggatcggactctagagatccccgagtaccgagctagaattcgagtaacagattgtgtcgccgacaaacttaaaaccacgttttttcagtgccttagatag

SEQ ID NO: 123343 - DNA, 3372 bp, Homo sapiens; identical to SEQ ID NO: 123314

SEQ ID NO: 123344 - DNA, 2367 bp, Homo sapiens; identical to SEQ ID NO: 123315

SEQ ID NO: 123345 - DNA, 2475 bp, Homo sapiens
atgaatgcgttaagcaaagcgcgccagtatgtcgaagagtttgacggcaacatcgccagcttcatcttttctggtaagccaggaaccggcaaaaaccatctggcggcggcaatctgcaacgagctgctgctacgcgaacgaaatcttggagaatcagaaatccatacgaccagtgatcatatggtgacggcgacgctgccaggagagacgcaaacgtggccagaggattttcgggatgtcgaacagcgccagcaggttgtcatctttcagcaccttgtcggttgcgtgaaagtggacggtaaatacattcaggtatgtaccttcaccgttggcggcaactacggtgggacgtgtttgcgcggtgatgaatcactggtcatcaaaaaagagagtgatattgaaccgttaattgtggttaccgttgtccagcagttccatatcggcaatggttacgtggtgatcaccattaccccgagcgaaggcgaacgctatcagggcgtagttggtctggaaggccggataaggcgtacacgccgcatccggcataaacaaagcgcacgttgttacaatttacgttttaaacctacgtgcgcaataacccagactacgccaacagaagtcagtccagtcctaaagaagcaattagttctggtgccaaatccgcattacccaggcaataaaccgaacttcaaacgggtatcggtaaaaattattggtgaaagtgcctcccgtcgcctgcagctctcccgtggcgacattgacattgccgatgcgctgtccgatcgcttcgtcagtgaagcgattaccgccaaagttgaagcggcgattaagaactcaattcacatttgcgccgaacaccgggtgcaaggtatgatcgccagcgggctgttgatcttgttgttcggtggtcgggatggcttagtccgatgttccacggtatggcgttaccatcgtattacgccattcgccatacgaggcatatcccgtcactacgccgttttcctcgctcaccagcactggataacctgctatagtccgcgcttcgaaccaggcaatgcggttatcagcagccaccgtttggtcattccagatagccgccaatatcaacaggcggtgaataagatggctcatcgctcatacgtccacgcatatacgggtccagggacaaataaactgtgcgcagtaacacctgtccttcacccggtgtggcgacatcatcttcttcaagacggaaattctccggaacaggatggagtccacttctcggtggacgaaaaatctcgccaggtgaacctgaccgaacgtggtctggtgctgattgaagaactgctggtgaaagagggcatcatggatgaaggggagtctctgtactctccggccaacatcatgctgatgcaccacttgtgtgagcaaccagtccagctcgtgatctttcgccatcagcggatcgccgccggagaaaatcatctcgtccagttccggatgcgcagcaacatactcaagtgcagtttgccagttacgcttgttgccctgattttcggcataggggaagtgacgacggaagcaatagcggcaatttaccgcgcagccgcctttgaccagcaaaagcgcccggttgtggtatttatgcaacaaaccagacactacgctgtgctgttcttccagtgggtcggtggagaatccgggcgcgatgacaaactcatcttgcgaggtcaacgtgaacagcccttccaggatggcgttggacgccgcagccagtgtggcgtcggtttcggtgataccacctacgccagaaccgatgatcttcactttaacttcgtcagtagacagtttcagcaaggagtcggagatcgcttcgacagaaccctgtacgtctgccttcaggacgatattcacttcgtgaacttcgccttcggtcatgttggcgaacatgttctcgagtttagatttctgctgacgcgccagtttaacttcgcggaatttaccctgacgatagagtgcaacttcacgcgctttcttctcgtcacgtacaacggtaacttcatcacccgcagccggtacgccggacaggccgaggatttccaccggaatggacggacccgcttccagcacttcctgacccagttcgttacgcatcgcacgaacacgaccgtattcgaagccacacagaacgatatcgcccttgtgcagagtaccttcacgtaccagaacggtagcaaccggaccacgacctttatcgaggaaggattcgataaccgcaccgctcgccatacctttacgtaccgctttcagctccagaacttccgcctgcagcaggatagcgtccaagcagttcatcgataccggtacccgctttcgcagatacgtgtacgaactggctttcaccgccccactcttccggcaggatgccgtactgggagagttaattcttattttgtaatagaggatacgtggaagcaagttaaatgtcagtag

SEQ ID NO: 123346 - DNA, 3039 bp, Homo sapiens; identical to SEQ ID NO: 123317

SEQ ID NO: 123347 - DNA, 951 bp, Homo sapiens
  misc_feature (1)...(951): n = a,t,c or g
atcacgcaatattgtgattcgttcaccatttgcctgtcgaaaggtcttgggacgccagtcggttcattactcgtcggtaatcgtgattacattaaacgtgccattcgctggcggaaaatgacaggtggcgggatgcgccagtccggcattctggctgccgccgggatatatgccctgaaaaataacgttgcgcgcttgcaggaagaccacgacaacgctgcctggatggcggagcagcctgcgtgaaacaggccgcggaatgtgatgcgtcaggacaccaatatgcttgtttgttcgcgtcggggaagaaaatgctgccgcgttaggcgaaattacatgaaagccgaagaaacgtgctgatttaacgcctcgccgattgtccgcctggagagagacgtgccgcaacgcattttagttctcggtgccagtggctacattggtcagcatctggtgcgcacactcagccagcaagggcatcagatcctggcggcggcacgtcatgtcgacaggcttgcaaagctgcaactggcaaacgtcagttgccataaagtcgatctcagctggccggataacctaccggccctgttgcaggatatcgatacggtctattttctggtgcacagcatgggcgaagcggcgatttatcgctcaagcgccggggttgcttctgtttcatctgtgttccgctactgtcttcgtccttcctatgatcctcgtgtctttccttgttttctctgctgtcgtgcgctgctcgttcttccctgccgtttgatctattcgcctttgtcgttcgctctcgtgctctcgctcgctcccatcaaanagatatttattattcgttttgatatcgtcgaccacccgcccacgatcgctggctgccgcctgaaaagagtaaaagttcacctgcacccagcccagactgctggtgctgttcactattacttgtgttaa

SEQ ID NO: 123348 - DNA, 5421 bp, Homo sapiens
ttattgcgaagccgcatccggtttacgcaatgccagtggattgagctttatcccttcgtaataactcacccatgaagaatatctctccggggaattccagacacggaaatgcagacgggccatcgtcaccggatcgcttagcagcaccaggcgacgatcgcgattcagcttctctggcgtctcgttcagcgcctgttcaacgtggcggtcacgggcgatttccagcaccttactggcgcggtgacgcgcggtcgccattgcggttgccagagcgttaaatgacgggttaaacactgcgtgcataaagccatcatcaagggagcgttgacgattcatctcaaggaaccgatcggtatcaaccagcacctgcggcggcgaatactcttccgggatcaggaacagtttccagcgtctggtgcgcagaacaacggtggccggctgggaatcaccgaaacaacggtgaccggatccacgagaagacatcggtgccggcagacatgaacgcagatccagcagcatccaaagccaaataacccggagtggtccatacgcgggtaatccacctccgcagaagctgaacaaccgtgcccttttcgaccacagaaaactcccagaaatacgcaaggatttgctgagaaagtactggacccgacaggtaatacgagacaggaagtgaccccctgtactggccagaaatatattcaggatcagcacccggaagtgaaaactgtctcttatgacagttatcagaatgcctttatcgatctgaaaaatggtcgtattgatggggtatttggtgacacagcggtggtaaacgaatggctgaaaaccaatccacaacttggtgttgctactgagaaagtgaccgatccgcaatattttggcaccggcctgggcatcgctgtacgtccggataacaaagccctgctggaaaaactgaataacgcgcgactttgctggagattgctgctttggctccccatgtacagataatatcactcctcgctctcgggtgtcttctccttcgtcctcgtatcggctttgcctcgtctcctcacctgggtggcgattgaagctggcatcgatggtgacagcactttcagttgggtggtgattgaaaacgccagccagcgcggcgaggcgcgttcggctactttgccgttgcctgcggtgattctcttccagccactggcgcagctcgacgggcgcggctttcaggctgttagatccacgcgtaatcgtcgcgatgcctgcgccgagttcattttttaactcacgctggctcatttcgccgcgcaacagctcttcgacaatacgcacgcgagtccccaacgcttcgcgctcatctggcgtcagcatcaggtttaacaacggtaaatggagatcgtataggtaggcattcttaagcaggtcgacaaaaagtaacttggtgctgaagttcgcaatacgcttgtacttgatacgcttcggctccagcgcgtctgcgcccagcgtgcgtttcttgtactcttcgtactcggtaaagttaccttcgaagaactcaactttaccttcatcctggtaatccagaatgtgcgtggcgatacggtcgaggaaccaacggtcgtgcgagataaccatcgcacagcccgggaactccagcagggcgttttccagcgcgcgcagggtttcgatatccaggtcgttggttggttcgtcgagcagcagcatgttgccgccaacctgcagcagcttcgccagatgcagacgaccgcgctcaccaccggagagttcaccaacgcgtttaccctgatcaacccctttaaagttaaagcggccaacgtaggcgcggcttggcatctcggtgttgccgatcttcatgatatccagcccgccggaaacttcttcccaaacggttttgctgttatccattgagtcacggaactgatcaaccgacgccagtttcaccgtttcacccaaagtgatggtgccgctgtccggctgttcctgagcagagatcatacggaacagggtcgatttaccctgcacgatcggaccgattgatccgaagatcgctctaacagggatcagtttagaagcgaacacaggctcaatgagacatacgggcatctgctgggagctgttaaaagttttcctcactcttcctgctcctacaagagaaggtccgtgaggacaaagggggcctctcttggcgttcactatcacctgttgtacggattggcaacgtccagtgcattctacagcaggtgcttcgtagatgtttgctgaatgagtgtccaaatcaacatgcccgtgttctccccaaggaccccagcccccagggcaggccacagctgactcaactcctgcccttagcacgtggtggggtaaggcagctgcatgcattttggaattggcggaattggcgtctgtcatatgacggcgtagtactatgccactgagaaatgccggttcactttcttcgaatcggctttcaatgtgtatttcacacaaattaatcaacttccccttccgaggatctggcgcaaaatcaaacttaaactggtggctgatgaaggcaatataaatgcccaacgcgttctgaatatgcaggaaaatcccggcatgttctttaccgtggtccaaatcggtctgaacgcagtggcgattctcggcggtatcgtcggtgatgcggcattttctccagcttttcaactgttgcggatgcgggtaacgccttatcggcctacggatggtgcgggaatttgtaggcctgataagacgcgcaagcgtcgcatcaggcagttggcactgttgccggatgcggcgtaaacgccttatccggccaaaaccgtcgattttgcaatcgatgttatggtcgccttcaaccaggcggatgtttttcactttggtgccaattttcagcatcgaagagctacctttcaccttcagatctttaatgatggtaacgctgtcgccgtcagccagcagattgccgttagcatctttaacgatcagctcgtcgctttcctgtgcaggttctgcgtcgttccattcgtaggcacattccgggcagatgtacatgccgttatcttcgtaggtgtattcggagttgcattttgggccgtgtggtaatgacttgtggatttcccgtactagccggtccgacgcagcatgcggacacggtgttgatcgaccgtcaggcggaaacaagccaaattcggcattatcttcaaatagagagttcgcccatgccggcccacgaccgttggcatcggtggtatacggtgtagagggcaggttaccgccataaattgaagaacagccagtggcgttagcgatcaacatccggtcgccatagagctgagtcagtaatttaatatacggcgtctcgccacaaccggagcaagcacctgaatattcaaacagcggtgtaatcagctgcgatgtacgaatatcaatacgttccagtttgctacggtcgatttctggcaggttgaggaagaaatcgtaattgattttctcttcttcgacatgttccaggcgagacatcatattgatggctttaatctctggattctgacggtctttcgccgggcaaacttcgacgcacaggttacaaccggtgcaatcttccggtgccacctgcaagacatatttctgcccgcgcatatcacgcgatttcacatccagcgaatgcaggctggcaggggcgttttccatcgcttcaggcggcaccacttttgcgcgaatagctgagtgtgggcaagcggcaacgcagtggttacattgggtacagagttcctctttccagatggggatctcttcggcgatatggcgtttttcccagcgcgtagtggccatcgggccagttgccgtgctttcccgaactcggggggttcggaccccgggggcattgggcggggggtccgggggcgggcttcttagggttcgccgaccagcttcgtgtctccctatctggctgccgacttgatgacgcaatggagcactccggatgttgaaaacccgtttgtcctgcatgtagcggcacgtaccgttgccacacatgcactctctatttttggcgatcattccgacgttatggcggtgcgccagacgggttgcgcgatgttgtgtgcagcaaacgtccaggaagcgcaagactttgctctcatttcgcaaatcgcgacgctgaaaagccgcgtgccatttattcatttctttgatggtttccgcacgtcccacgaaatcaataaaattgtcccgctggccgatgacacgattcttgatctcatgccgcaggtcgaaattgatgctcatcgcgcccgggcactcaacccggaacatccggtgatccgcggtacgtccgccaatcctgacacttatttccagtctcgcgaagccaccaacccatggtacaacgcggtctatgaccatgttgaacaggcgatgaatgatttctatggcgcaagttacgattcgctttgtctgttggtgcaggtggaaagtaaaacggcactggataacctggacgaaatcctcgacgtcgaagggattgatggcgtgtttattggacctgcggatctttctgcgtcgttgggctacccggataacgccgggcacccggaagtgcagcgaattattgaaaccagtattcggcggatccgtgctgcgggtaaagcggctggttttctggctgtggctcctgatatggcgcagcaatgcctggcgtggggagcgaactttgtcgctgttggcgttgacacgatgctctacagcgatgccctggtcacgatcaaagccctgttccagcatgcgcaaagcaattttaatggcttgttcatgcaaaccttctaatttaccttcctgccagccaatttgatgtccttcctgccgcagccgttcagcaatagtcattaatctctccttcctggcaggcaatttgatgcctttctgtcggtaccgttcagcaatatcataatctctcctttgtgtggtgacggtcggcactctgaggcagaggttgagctgtgaatggttgtcactgtcatatctttctatttgattttcttgagatatcagcagcaacactgtgggacctctctccacctgagctcgagaagtacgaaagagacacaggcctggagattgatccgcgtgatgaggtggctcctggtgtgttactgtgccggttaacttttcgtacgttcgtggtttgtttttatcgccttgtttgttgttctcctttgctgggtaacgagctaagcgcagatctctgtgttcgttctttttgagtctctcgtttgtttctccgcgtgtcttctgtgtgtttgtgccttcttggttgtttgcgcctcggtcctctgtgttttttgtgctcctgttaagccctggcaagtgtgctgaggctcttactcggcactcccctgcaactttcaccat

SEQ ID NO: 123349 - DNA, 1210 bp, Homo sapiens
ttacgccaccatggtaatttctgtgcagaaggaacgggcgaacaaagacgtgtacttgccgcacgtcaggcccatgcaaatgcccatggacaaaccgaggttaaattgacctatgttgccgtcgggaataccgggtccgggaaaggggaagcaatgggtgggccagtgtcgggggggctcctgggtcctgtgtttctcatccggatctctccacttctcatccggcgctccataggtggccactcgatgttctcggtctccgtcgcctagcttgtcgccgtctttgtcattgagggtgatgatccccaccaccagcgcgtactcgttcatgatcaccgcgaagtcttcacctgcggttttaaaactttccaacgcctctgaaagggttaacgtatccggcacaatcagcgtgttgcgaatttgtacgccgctgttcagtgccaggctttggttagccagcacgcggttcagcaggtctttagaatcgacataaccgatgatgtggtcaatatcttcattacagacgaggaacttagagtgcggatgttccgccaccttattcttcaggctttgctcatcttcgtggagatcaaaccaaatgacgttttcactgcggtgacattgattacggaacgggacgggattccagctcaaagacgttttcaatcagctcgtgttcctgtttacgtaacacgcccgccagcgcaccggcttccactaccgcgtagatgtcatcagaagtgatgtcatctttacgtaccattggcagtttgaaaatacggaagattatgttcgccaggccgttgaagaaccacaccagcggggtgcaaacgtacaggcagaagcgcatcgggttgatgatacgcaaagccacagcttctggcgcaatcataccgatgcgtttcggggttaaatccgcaaacaggataaacatgccagtcactaacgagaaagagagaataaagctcagttgctcagagagctctgccgacatatagcgggagaacaggctgtgaaaagctggagaaaatgccgcatcaccgacgataccgccgagaatcgccactgcgttcagaccgatttggaccacggtaaagaacatgccgggattttcctgcatattcagaacgcgttgggcatttatattgccttcatcagccagcagtttaagtttgattttgcgtgaggcggcaagcgagatctcggacat

SEQ ID NO: 123350 - DNA, 951 bp, Homo sapiens
atgtccgagatctcgcttgccgcctcacgcaaaatcaaacttaaactgctggctgatgaaggcaatataaatgcccaacgcgttctgaatatgcaggaaaatcccggcatgttctttaccgtggtccaaatcggtctgaacgcagtggcgattctcggcggtatcgtcggtgatgcggcattttctccagcttttcacagcctgttctcccgctatatgtcggcagagctctctgagcaactgagctttattctctctttctcgttagtgaccggcctgtttatcctgtttgcggatttaaccccgaaaagcatcgtttggccccgctgtgtgttgttcacggcggggaacaatttcggtttaacagacagcgaagtaagaaaaaccactgtgaaaaaccgaggaaagacgaccccggaggtgtttatgaaaagcacgataaattggccccgtcgctacacaacccaagccttcgggagcagctttggggctgacaccactctctcaaaggaactaaaggattcgggagccaagaagaaatctttgcaggagacagacaaacactggcagtggctgacttggagaaccctggaaattttcaccatgaaaggttcccggcgcccaagaagccccagtgattcctgcaccgaatccaagagcgaccacgcaggagagagcgggcgagtgactagtggattaatgaatatgcgactggggatagcagacacaaaagtgctgggtcatgcaaccgggtacggtcatcgatgtgtgactaacgacactgacatggaaatgacgcgcaagtggatatgccgcggcatatgtgagctcaggcgcattggcatgccaaacgccagcgccgtgtcttgccggcggccctacgtattgactgtggccaaactacccccatttgccccgattatagcgcatcgttactgcctgactggctaa

SEQ ID NO: 123351 - DNA, 666 bp, Homo sapiens
atgcattcactccaatgcttggcccatccttctcaaacctggggaaggaacagccaatcacatcagttcctgctgacaaatcccctggctccaccccctgctgacagtgtacaagattcccccaagagctcagttgtcagagcctcatccacctgccgctggccacagccccgtcgctacacaacccaagccttcgggagcagctttggggctgacaccactctctcaaaggaactaaaggattcgggagccaagaagaaatctttgcaggagacagacaaacactggcagtggctgacttggagaaccctggaaattttcaccatgaaaggttcccggcgcccaagaagccccagtgattcctgcaccgaatccaagagcgaccacgcaggagagagcggccccgccccggaaatggaggtctccacccctgtaactggtctctgctcagtcatccccgctctagaagccttataccatccgccccgagaactgggccccacccacagccccgaccctggaactggtctctgcccaatcagcctcgccctccaggcctggtacggcctcagccggttccccgccttcagccccgacccggaactgatctccgcccacaaccagccccgaacccacaacaccaacaaccggaataacaaaccatag

SEQ ID NO: 123352 - DNA, 1677 bp, Homo sapiens
tcatatcctttgcccactttttgatggggttgtttttttcatgtaaatttgtttaagttctttaaagattctggatattagccttttgtgagatgggtagattgcaaaatttttctcccattctgtaggttgcctgttcactctgatggtagtttcttttgctgtgcagaagctcttttgtttaattagatcccatttgtcaattttggcttttgttgccattgcttttggtgctttagtcttgaagtccttgcccatgcctatgtcctgaatggtattgcctaggttttcttctagggcttttatggttttaggtctatcatttaagtctttaatccatcttgaattaatttttgtataaggcgtaaggaagggatccagtttcagctttctacatatggctagccagttttcccagcaccatttattaaatagggaatcctttccccatttcttgtttttgtcaggtttgtcaaggatcagatggttgtagatgtgtggtgtcatttctgaggcctctgttctgttcccttggtctatatctctgttttggtaccagtaccatgctgttttggttgctgtagtcttgtagtatagtttgaagtgaggtagcgtgatgcctccagctttgttctttttgcttaggattgtcttggttatgtgggctcttttttggttccatatgaactttaaagtagttttttccaattctgtgaagaaaatcattggcagcttgatgggaatggcattgaatctgtaaattatcttgggcagtatggccattttcacgatattgattcttcccatccatgagcagggaatgttcttccatttgtttgtgacctcctttattttgttgagcagtggtttgtagttctccttgaagaggtccttcacatcccttgtaagttgcattcctaggtattttattctctttgtagcaattgtgaatgggagttcactcgtgatttggctctctgtttttctgttatttgtgtataggaatgcttgtgatttttgcacactgattttgtatcctgagactttgctgaagttgcttatcagcttaaggagattttgggctgagacgttggggttttctaaatatacaatcatgtcatctgcaaacagggataatttgacttcctcttttcctaattgaataccctttatttctttctcttgcctgattgccctggccagaatttccaacactctacacactgctttaaatgtgtcccagagatgctggtacattgtgtctttgttctcattggtttcaaagaacatctttatttctgccttcattttgttatttacccagtagtcattcaggagcaggttgttcagtttccatgtagttgtgtggttttgagggagtttcttaatcctgagttctaatttgattgcactgtggtctgagagacagtttgctgtgatttctgttcttttacatttggtgaggagtgctttacttccaactatgtggtcaatttcggaataagtgcgatgtggtgctgagaagaatgtatattctgttgatttggggtggagggttctgtagatgtctattaggtctgcttggtgcagagctgagttcaagtcctggatatccttgttaaccttctgtcttgttgatctgtctaatattgacagtagggtgttaaagtctcccat

SEQ ID NO: 123353 - DNA, 529 bp, Homo sapiens
ttagctatgcaggttctcttttgtttccatatgaactttaaagtagttttcttccaattctgtgaagaaagtcatcggtagcttgatagggatggcactgaatttataaattaccttgggcagtatggccattttcacgatattgattcttcctatccatgagcatggaatgttcttccatttgtttgtgccttcttttgtttccttgagcagtggtttgtagttctccttgaagaggtctttcacatcccttgtaagttggattcctaggtattttattctctttgtagcaattgcgaatgggagttcacgcatgatttggctctctgtttgtctgttattggtgcataggaatgcttgtgatttttgcacattgattttgtatcctgagactttgctgaagttgcttatcagcttaaggagattttgggctacttcattgagagttttttgcatgaagcactgttgaattttatcgaaggccttttctgcatctattgagataaccatgtggtttttgtcattggtt

SEQ ID NO: 123354 - DNA, 477 bp, Homo sapiens
aaatacaaacaaccatcagagaataaacacctctacgcaaataaactagaaaacctagaagaaatggataaattccttgacacatacaccctcccaagactaaaccaggaagaagttgaatccctgaatagaccaataacacgctctgaaattgaggcaataactaatagcttaccaaccaaaaaagtccaggaccagatggattcacagccgaattctaccagagtgttggaagttctggccagggcaatcaggcaggagaaggaaataaagggtattcagttagtaaaagaggaagtcaaattgtccctgtttgcagatgacatgattgtttatctagaaaaccccatcgtctcagcccaaaatctccttaagctgataggcaacttcagcaaagtctcaggatacaaaatcatgtgcaaaaatcacaagcattcttatacaccaataacagacaaacagagagccaaatcatga

SEQ ID NO: 123355 - DNA, 507 bp, Homo sapiens
tcatgatttgtctctttgtctattattggtgtataggagtgcttgtgatttttgcacattgattttgtatcctgagactttgctgaagttgcttatcagcttaaggagattttgggctgagacaatagggttttctaaatatacaatcatgtcatctgcagacatggacaatttgacttcctcttttccgatttgaatacccttaatttctttctcttgcctgattgcctggccagaacttccaaaactatgtcgaatataagtggtgagagagggcatccttgtcttgtgctgcttttcagaaggaatgcttccagttttttcccattcagtatgatattggctttggtagaattcagctgtgaatccgtctggtcctgggctttttttggttggtagggtattaattattgcctctatttcaaaacttgctattggtctattcagggatttgacttcttcctggtttagtctggaaagggtgtatgcatccaggaatttatccat

SEQ ID NO: 123356 - DNA, 3141 bp, Homo sapiens
atgctcctggggcttcactcacttgccgccttcctgcaacgcgaatcatttagcggcaaacaatcctggggctgccaactggcggcccttttacaaagaaggataactaaaatgacagaagcgatgaagattaccctctctacccaacctgccgacgcgcgctggggagaaaaagcaacttacagcattaataatgacggcattaccctgcatttgaacggggcagacgatctggggctgatccagcgtgcggcgcgcaagattgacggtctgggcatcaagcatgttcagttaagcggtgaaggctgggatgcggatcgctgctgggcattctggcaaggttacaaagccccgaaaggcacgcgtaaagtggtgtggccggatctggacgatgcccagcgccaggaactggataaccgcctgatgatcatcgactgggtgcgtgacaccatcaacgcaccggcagaagaattgggaccatcgcaactggcacagcgtgctgttgatctgatcagcaacgtcgcgggcgatcgtgtgacttatcggatcaccaaaggcgaagatctgcgtgagcaaggttatatggggctgcacacagtcggacgcggttcagaacgttctccggtattgctggcgctggattacaaccccactggcgataaagaagcgccagtgtacgcgtgcctgctgggcgatatcatcacctatcgcaacggtaaaaaagttgaagtgatgaacactgatgccgaagggcgtctggtgcttgccgatggtctgagtgattaccgcgcggagaggggatccactaggggcacgcgcttaacgttggcttgccacgcattacttgactgtaaaactctcactcttaccgaacttggccgtaacctgccaaccaaagcgagaacaaaacataacatcaaacgaatcgaccgattgttaggtaatcgtcacctccacaaagagcgactcgctgtataccgttggcatgctagctttatctgttcgggcaatacgatgcccattgtacttgttgactggtctgatatccgtgagcaaaaacggcttatggtattgcgagcttcagtcgcactacacggtcgttctgttactctttatgagaaagcgttcccgctttcagagcaatgttcaaagaaagctcatgaccaatttctagccgaccttgcgagcattctaccgagtaacaccacaccgctcattgtcagtgatgctggctttaaagtgccatggtataaatccgttgagaagctgggttggtactggttaagtcgaccagttcataataccgtctgccgccttacgaccttcggcaatagcggtcaccaccagatcggaaccacggacgatatcgccgccagcaaagattttcgggttgctggtctggaaggcgttgtcgctgcttccggggcgatgatgcggcttgtgaatccagctcgacgctgtgttttgccagcccattccaatgttttgtggacggaaaccaacgccatgatcaccgcatctgccggaacgatatgttcggaacctgcaacgatgctccgcgcggcgacggcctttggcgtccggttcgcccatttcggtacgcaccatttttacgccgctgactttgccgttaccgttcacttcaatacccagcggctggacgttgaatttgaactctacgccttcttcccgcgcgtttttcacttcgcggcgggaacccggcatgttctcttcatcacgacgataggcacaggtaacgtgcttcgctcctggcgcacggacgtacgcacgcagtccatcgcagtgtcgccaccgccaaggaccaccacgcgtttgccttccatgctgacgaacgcacccgtggccttctctgaactgggcatttctgacgatcacagcggcattatcgaactgcctgcggatgcgccgattggcaccgatatccgtgaatacctgaaacttgatgacaacaccatcgaaatcagcgtgacgccaaaccgtgccgactgcttaggcatcattggtgttgcgcgtgacgttgccgtgctgaaccagctgccgctggttcaaccggaaatcgttccggttggtgcgaccatcgacgacacgctgccgattacagtcgaagcgccggaagcctgcccgcgttatcttggccgtgcctatgcctattggtcaatggaattagaagacatgattagtacagatgacgcctatgtcacggggaatgcagatcccatttctgcacaagtctcagttagtgtcactgtcgttaatcataaaagatacgaactacgttcgacacagtgccgaagtcgcttcagcacgtattcagtatcaccatctttagaagattataaccgtcgagtgccgttagcgaagcacgggggttatttcaaagaaacgctggagcataccaaagatacgttaataagtagccaagcggcattgaatgccgctatccaggcttataaagcgaataaagctttagtaatgaacacaccattaaaccgtcagccacaagtcgttgaagcggcggatgcaactaaagaagcctggttggcgcttaaacgtacggatattaagagtccggttaccggctatattgcccagagaagtgttcaggtcggcgaaacaaaacactactcacggatgtacggattgtcaatcgtcctatatagcaggggggatccactagttctacacgccggcactgacgaagtgatcatgtctccgcagcaagcaaaagcgcgcggattaacctcaactatcaccttcccggtgggcaatattgcgccagaaggttcggtgatcaaatccaccgccattgacccctcgatgattgatgagcaaggtatctattaccataaaggtgtggcgaaggtttatctgtccgagaaaagtgcgatttacgatatcaaacatgacaagatcaaggcgggcgatattctggtcattattggcgttggaccttcaggtacagggatggaagaaacctaccaggttaccagtgccctgaagcatctgtcatacggtaagcatgtttcgttaatcaccgatgcacgtttctcgggcgtttctactggcgcgtgcatcggccatgtggggccagaagcgctggccggaggcccccatcggtaa

SEQ ID NO: 123357 - DNA, 983 bp, Homo sapiens
atggtgcgcgccagcggctatctgcaaacgctcgacgactttaatcacatcgttttaaaagccagtgaaaatggcgtgcccgtttatctgcgcgatgttgcgaaggtccagattggcccggagatgcgccggggcattgccgaactaaacggcgaaggcgaagtggcgggcggggtggtgatcctgcgatccggcaaaaacgcccgagaagtgatcgccgccgtgaaggacaaactggaaacgctgaaaagtagtctgccggaaggcgtggagatagttacaacatacgatcgcagccagctcattgaccgcgccatcgacaacctcagcggcaagttgctggaagagtttatagtggtggcggtagtctgtgcgctgtttctctggcatgtgcgctcggcgctggtggcgattatttcgttgccgctgggcttgtgtattgcttttattgtcatgcacttccagggactgaatgccaatattatgtcgttgggtggcattgcgattgccgtcggggcgatggtcgatgctgctatcgtcatgatcgagaatgcgcataaacggctggaagagtggcagcaccagcatcctgacgccacgctggataataaaacgcgctggcagggcaggaagggcgtctgtttggcccgttggcgttgcaccaaaacgtatgcgatggcgggtgcggcgctgctggcgatcgtagtgatcccgatcctgatgggctactggatccgtggcaaaattccgccggaaagcagtaacccgctcaatcgctttttgattcgtgtttatcatccgctgttgctgaaagtactgcactggccgaaaaccacgctgctggtggcggcgctttcggtgctgacggttctctggccgctcaataaagttcgcccggggaatttttaccgcagatcaatgaaggcgacttgttgtatatgccatgcgacgctgctcaaggaattccgcagcagaggcggcga

SEQ ID NO: 123358 - DNA, 660 bp, Homo sapiens
tcactcatgatttggctctctgttattggtgtataagaatgcttgtgatttttgcacattgattttgtatcctgagactttgctgaagttgcttatcagcttaaggagattttgggctgagatgatggggttttctaaatatacaatcatgtcatctgcaaacagaggcaatttgacttcctctcttcctgtttgaatacgctttatttctttctcttgcgtgattgccctggccagaacttccaatactatgttgaataggagtggtgagagagggtgtccttgtcttgtgctggttttcaaagggaatgcttccagcttttgcccattcagcatgatattggctgtgggtttgtcataaatagctcttataattttgagatatgttttatcaatacctagtttcttaagagtttttagcatgaagggctgttgaattttatcgaaggacttttgtgcatctctgagcttttcagttatacgagccgatgaagtctctttttgcttaagcctctttggattggatttactgcctactgggaaaccatgcttctcccatgggtctttgcaatcagcatatccagagatcccctcataagctgtgtggagtcccagcagagcagccagtcggccacacacagagacccaggagttttgcat

SEQ ID NO: 123359 - DNA, 726 bp, Homo sapiens
atgagatttaaggaaagaagctatctctataacataaaagtgcaaggcgaagcagccaatgttgatgtagaagcatcagcaagttatccaaaaggtctagaaattgctgcagctaccacagccttcagcaaccaccagccttatcagtcagcagccatcaacaatgaggcaaggttctccaccagcaaaaaagatgacagcttgctaaagacacagatgattgttagcatttttagcagtaaagtgtttttcaaattaagtgttggaagttctagccagggcaatcaggcaggagaaagaaataaattgtattcgattaggaaaagaggaaatcaaattgtccctgtttgcagagacatgattgcatatttagaaaaccccatcatctcagcccaaaatctccttaagctgataagcaacttcagcaaagtctcaggatacaaaatcaatgtgcaaaaatcacaagcattcctatacaccaataatagacaaacagagagccaaatcatgagtgaactcccattcacaattgctacaaagagaataaaatacctaggaatccaacttagaagggatgtgaaggacctcttcaaggagaacaacaaaccactgctcaatgaaataaaagaggacacaaacaaatggaagaacattccatgttcatggataggaagaatcaatattgtgaaaatggccatactgcccaagataatttatagattctaa

SEQ ID NO: 123360 - DNA, 882 bp, Homo sapiens
atgctaaaaaccgacgcccgtcagaatttgcgcctgtgggtgctggaagacgaaagccggatgatcggttcgaatcacctgccggaatgcctgcgcgagcgaatgactcaggcggcgattgcggtggtagaagatccgtttgagatccgtcttgagcgcctgaacgaagagtatttcttgcgtatgcatcatgattttacccacgcgtacggcgacgaacagggctggcaggagtattgcgaatacctgcatcacggactttcggcgattaagcgtcggctggggctacagcgctataacgaactggctgcaaggctggatgcagcactgacaacgcaactcaccaccggcagcaccgacggtcatctggcctggctggtgccgttacttgaagaatattacgacccgatgtatcgctatcagcttgagaaaaaagcggaaaaagttgtctttcgcgaggtaactctcatgcttcatactgccaatcccgtcatcaaacacaaagccggtttgctcaatctggctgaagaactcagcaacgtatcaaaagcctgtaaaatcatgggcgtttcgcgtgatacgttttatcgttaccgcgaactggtcgctgaaggcggtgtggatgcgcagattaatcgtagtcgccgcgctcctaaccttaagaaccgtaccgatgaggcaactgaacaggctgttgttgattacgccgtcgctttcccgacacatgaatctcaaaagacgatactgaacaaattttatcaggtgacgttccgtaaaaagttgtatggagttctcgatgcagtcggcgcgactatcagtacccccgctgaacctggactatcggccgccgtactggggcatgggtaccgagctcgattgtaa

SEQ ID NO: 123361 - DNA, 822 bp, Homo sapiens
atggcttatcactttcatgtgcggaaaaacaaaggtctgagcctttccggcattattgctgctattaccggcgttcgcccgcaaggcccatggggaaaactggtcgatttgatgttcctgatcgccactgtcggcgcaacgcggcgagcgacagtgggaaaggatggaggaggagaggatggcgactgcagaatgatgaccatgcgactgccctggatgaaaattgccctgcaacaagtgcctgcacatctgctggaaactggatgtgctgcttcgacttcgcagaacacccttgcttcgatcgtgggactggggcctgaattgctggaagttctggccagggcaattagacaggagaaggaaataaagggtgttcaactaggaaaagagaaagtcaaattgtctctgtttgcagatgacatgattgtatatctagaaaaccccatcgtctcagcccaaaatctccttaagctgataagcaacttcagcaaagtctcaggatacaaaatcaatgtgcaaaaatcacaagcattcttatacaccaataacagacaaacagagagccaaatcatgagtgaactcccattcacaattgcttcaaagagaataaaatacctaggaatccaacttacaagggacgtgaaggacctcttcaaggagaactacaaaccactgctcaatgaaataaaagagggcgtgtttatgagcgtctttgacctaatggaaaatatcaacatagatgagaaagtgggttggctccatgtctatgctatagagtaccttgctgctgacattaatattgatgctctcgtatctctatag

SEQ ID NO: 123362 - DNA, 1653 bp, Homo sapiens
atgcctgactgcacatcaaagtgtcgatccctgaagcatgctttggatgtcctttctgtggtaacaaaggggagcgaaaaccagattaaggcctttctctccagtcattgttacaatgctgcaactatcaaggatgtttttggcaggaatgccctccaccttgtttcctcctgtggaaagaaaggagtgttagattggcttattcagaaaggagtggatctgttggtgaaagacaaagagtctggatggacagcattgcacagaagcattttttatggacatattgattgtgtttggtctctattgaaggaaagaagcagacaccgagggagaattttaaagacttcaaagagcccgagtggactaccacatccctgtagctggcagtcctatagctggcggtcctacttgtccatattggaagttatgtccagggcaatcaggaaagagaaagaaataaagggtattcaattaggaaaagaggaagtcaaattgtccctgtttgcagatgacatgattgtatatttagaaaaccccatcgtctcagcccaaaatctccttaagctgataagcaacttcagcaaagtctcaggatacaaaatcaacgtgcaaaaatcacaagcattcctatacaccaataggaaacaaacagagagccaaatcatgagtgaactcccattcacaattgcttcaaagagaataaaatacctaggaatccaacttacaagggatgtgaaggacctcttcaaggagaactacaaaccattgctccaggaaataaaagaggatacaaacaaatggaagaacattccatgctcatgggtaggaagaatcaatatcgtgaaaatagccatagtgcccaagcagccttgtgacactgttgtgtgtatcccagccatttcaggtccagctgtgactaaaaagggccaaagtacagttcagatgatgaaagctgtgaattttgaaggctttcatgtggtgttaagcctgcaggtgaacaaattgcaagagaggaggcttgggagcctccaaccaggattcagaggaggctctctgcaagaagaaaaatatggctctattgtgcctgaccctgcaggcagtcagaccttatggttgtcttcccttgttcccaaaaattgctgttattctgttcattttcaaggtgcactgatttcatattgttcaaacacccatgttttacaatcaatttgtacaatagtggtcctgagttgtgacatgcacccattactggaactggcatgcactgacacctactttataggcctcactgttgttgtcaatagtggagcaatctgtatggtcattttcaaccttctgttaatctcctatggagtcatcctaagctcccttaaaacttacagtcaggaaaagaggggtaaagccttgtctacctgcagctccggcagtaccgttgttgtcctcttttttgtaccctgtattttcatatatgttagacctgtttcaaactttcctactgataagttcatgactgtgttttataccattatcacacacatgctgagtcctttaatatatacgttgagaaattcagagatgagaaatgctatagaaaaactcttgggtaaaaagttaactatatttattataggaggagtgtccgtcctcatgtag

SEQ ID NO: 123363 - DNA, 1353 bp, Homo sapiens
ctctcattacccttgtcagacttcatcagggcctttgaacacactgttctctctccctggaataagtcactccttggccatttcttctcctggcaaaggggatcctctagctggaaatcaagacgtcctggcgtttttttcaggcgggacgctgtgcgtacgcgctggcgcgcgggcaggccgctggcggtgttaccgcttagttttgccagcaaaggctgtaccagttgatagaaggtcagcgtcgctgaaaccgggttgcccggcaggccgcagaaccagctattgctgagtttaccgaacgcgaacggtttacctggtttaatcgccagcttccagaaggcgatctcccccagctcttcaagaatcgttttggtgtaatccgcctcacccactgaaacaccgccggaactgatcaccacatccgcctggctgtcggcttcaataaatgcggcgcgcagggcatggggatcgtcgcggataatccctaagttaattacctcgcatcccaactgttctaacatcaggtgtacggcgagacggttggtatcgtagatttggccgtcggcccagcggctgaccgggcaactggagttcatcaccggtagaaaaaagcgctacacgcactttacgaatcaccggaacttcggcaatccccagtgaagcaattactggcagctctgcggtagtcaggcgagttcccgccgggaaaacaaccgcaccgacggagataaagtccacgcccgtttcggcaaattcacgcagtgttttgtcagtgacgttgccagacacttccagtagcgccttgccgttggtgcgtttgacggcttcgcgcatctgttctgtttcgaagttatccagcatgatgatatcggctcctgctttcagggcttcatcaagttcttccagattctctacttcgacttctactggcgcatccgggtgcagccaggacgctttttcgaccgcctggcgcactgagccggaggcaataatatggttttctttgatcaggaaggcatcagaaagccccagacggtgattcgctccgccgccgcaaagtaccgcgtatttcagagctgaacgcaggccgggtaaggttttgcgcgtatccaacaactgcgtgttggtgccttccagcaattcgacatagtggcgtaccttactggcaactcctgaaagggtttgcacaaaattaagcgcagtgcgttcgcccgttaacagcacgcgggatgggccttcaagttcgaacaaggattgattggcattgatgacatcgccgtcatccacatgccagattatggtggggtaatccgcattccagacaatgtatggccttatcgcatgccccat

SEQ ID NO: 123364 - DNA, 3447 bp, Homo sapiens
atggtggactgttttatctcgttgcaaattgccggtggcggcgatgatctgcagggcattaaaaaagggctgatggaagtggctgatctgatcgttatcaacaaagacgatggcgataaccataccaatgtcgccattgcccggcatatgtacgagagtgccctgcatattctgcgacgtcaatacgacgaatggcagccacgggttctgacttgtagcgcactggacaaacgtggaatcgatgagatctggcacgccatcatcgacttcaaaaccgcgctaactgccagtggtcgtttacaacaagtgcggcaacaacaatcggtggaatggctgcgtaagcagaccgaagaagaagtactgaatcacctgttcgcgaatgaagatttcgatcgctattaccgccagacgcttttagcgcttactgccgatcttatgacgggtaagcgacctcaaccggcggcaaatccgaggccatctgccgccccgaagtggtccaagtctccccaggggatcttcaccgatcctcagtcatatattacttacgcgaccgcgctggcttatcgtggcgaaaaagcacgcctccagcattatctcattgaaaataagccactatttaccacggacgcacaagagaaaagttggctctatctgttatctaaatacagcgctaaccccgttcaggcgttggcgaattatacggtacagtttgccgacaaccgccagtatgttgttggcgcgacgctaccggtgctgttaaaagaaggtcagtacgacgcagcgcaaaaactgctcgccaccctccccgccaatgaaatgcttgaggagcgttatgctgtcagcgtggcgacccgtaacaaggctgaagctctgcgtctggcacgattgctgtatcagcaagaaccggcaaatcttacccgcctggatcaactaacctggcaactgatgcagaacgagcagtcacgcgaagctgccgatttattgctgcaacgctatcctttccagggcgatgcgcgtgtcagccagactttaatggcgcgactggcgtctctgctggaaagtcatccttacctggcaacgccggcgaaggtggcgattttatcgaaacccttaccgctggcggagcaaccggaatatatggtgcgcgccagcggctatctgcaaacgctcgacgactttaatcacatcgttttaaaagccagtgaaaatggcgtgcccgtttatctgcgcgatgttgcgaaggtccagattggcccggagatgcgccggggcattgccgaactaaacggcgaaggcgaagtggcgggcggggtggtgatcctgcgatccggcaaaaacgcccgagaagtgatcgccgccgtgaaggacaaactggaaacgctgaaaagtagtctgccggaaggcgtggagatagttacaacatacgatcgcagccagctcattgaccgcgccatcgacaacctcagcggcaagttgctggaagagtttattgtggtggcggtagtctgtgcgctgtttctctggcatgtgcgctcggcgctggtggcgattatttcgttgccgctggggttgtgtattgcttttattgtcatgcacttccagggactgaatgccaatattatgtcgttgggtggcattgcgattgccgtcggggcgatggtcgatgctgctatcgtcatgatcgagaatgcgcataaacggctggaagagtggcagcaccagcatcctgacgccacgctggataataaaacgcgctggcaggtgctgaaagccggtttggctgccctgacgttgtcaggaatgtcgcaagccatcgccaaagacgaacttttaaaaaccagcaacggacacagcaagccgaaagccaaaaaatctggcggcaaacgtgtcgttgttctcgatccaggtcacggcggaattgataccggagcgatcggacgcaacggttcgaaagaaaaacatgtggtgctggcgattgctaaaaacgtccgttccattttgcgtaatcatgggattgatgcgcgtttaacgcgttctggcgatacgtttatcccactttacgatcgcgttgaaatcgcccataaacatggcgcagatctgtttatgtcaattcatgccgatggctttaccaacccgaaagctgccggtgcttcggtatttgccctctctaaccgtggggcaagtagcgcaatggcgaaatacctgtctgaacgcgaaaaccgcgccgatgaagttgccggtaaaaaggcgactgacaaggatcacctattgcaacaagtgctgtttgatctggccgccgggcccggaaaacctaatcggagctggtggcgcgtcatctgcgcgaacacaagtacagaagatgattatcgccaccgcactcgcgaacgtgcccaaattctggcagatgaagtcggcgcggaagtgattgccctgagtgatatcgacgaacgtctgcgcgaagccgatatcatcatcagttccaccgccagcccgttaccgattatcgggaaaggcatggtggagcgcgcattaaaaagccgtcgcaaccaaccaatgctgttgtcagacgattacccgcataaccccaacactgaggacttaagccaattctcttatacggtgagaaataacgattattcgcttgtctatacagtagaaaacaatcagttaggtctctacaaactgacggatctacagcaaaaagataaccttgccgccgccaatccgcaggtcgttaaagagatgcaaggcgtggtaagagagtttatcgacagcagccagccaccgcttagcgagggtcgcccgttagctccggaggccaaggaaccagtgaaactggcgcagaccatggccgatatggcgctgcgttatgtggttatcacctccgttgaccgtgatgacctgcgcgatggcggtgcccagcactttgcggattgcattactgccattcgggaaaaaagcccgcaaatcaaaattgaaactctggtgccggatttccgcggtcgtatggatcgtgctctggatattctgactgcaacgccaccagatgtgttcaaccataacctggaaaacgtaccgcgtatttaccgtcaggtacggcctggtgcagattacaactggtcgctgaagctgctggaacgctttaaagaagcgcatccggaaatcccgaccaagtctggtctgatggtgggactgggtgaaaccaatgaagaaattattgaggtaatgcgcgacctgcgccgtcatggtgtgacgatgttaacgctggggcaatatttgcagccaagccgccatcacctgccggttcaacgttacgttagcccggatgagttcgacgaaatgaaagccgaagcgctggcgatgggctttacccatgctgcatgcggtccgtttgtccgctcttcttaccacgccgatttgcaggcgaaagggatggaagttaagtaa

SEQ ID NO: 123365 - DNA, 933 bp, Homo sapiens
cttgtttccaatggcctttttgggtgggaagttgtaggccctcacttgagggtacttgttttgtaacttgtggtgcaaactcctgaactctgtataccggcgataaatattccattcatcgtcttttatccggatgtagaccttgggcagtatggccgttttcatgatactgattcttcctacccatgaggatggaatgttcttccatttgatggaatgttcctcttttatttcattgagcagttgtttgtagttctccttgaagaggtccttcacatcccttgtaagttggattcctaggtattttattctctttgaagcaattgtgaatgggagttcactcatgatttggctctctgtctgtctgttattggtgtataagaatgcttgtgatttttgcacattgattttgtatcctgagactttgctgaagttgcttatcagcttaaggagattttgggctgagacgatggggttttctagatatacaatcatgtcatctgcaaacagggacaatttgacttcctcttttcctaattgaataccctttatttccttctcctgcctgattgccctggccagaacttccaacacataagcttcctgagaacatggactattcttatttgttaaagaatcatatttaagagcatatatatgcttttggggtttatatcttaactctgccactacctgaagtgtgaacttagcgagattattttttgtttgcttcagtttccgctcttctccagttgcccatttgtctactgcctgagaatcaaagaattcagttggcagatcaaccacagactgtagactttgtcttaggactggctcaatttccatgaagtcctctagagctgagatggctgaaacagacgtgtatccccttttattcctgagcttagtggaaaagttttccatttttaccat

SEQ ID NO: 123366 - DNA, 2153 bp, Homo sapiens
tcacctcatcacatggatgcattccggctccttggtgaagctgtaggcatagccactggatgtggtcccaaagtcgacggccaccaccacgagaaatgactgctgttctgagacgttggagtcagtgtcgttgtggaccgcctggatcaggagcctcatcagacccttctccatgcacatccttcccaaacagtcacagattccattgaaaggagcagattctatcagttcttctgtgcagactttaagagctgaacgttctggttctggaagccatgtgactgcgcagaacaacctaagaaaccctttgtgtcctgaggggtcgttgacctctccttccgggtcggagcagtcactccacaggacagggcccaggcagggttttaccgacagtgcttgtattaagaaagctgtctccgccccaacaacccgaatgttttgcacggcttgggtgtacattgcccgggacccgtgcctccagtccacacagatgcagttcaccttctccacttcaaacattttcttgcacatgtccgatggccagctgtcctccgccttgtctaagaagccatggatgatgaagcgtgtcttgcggtccagttggaagtttgaagcctcaatggtgtctggttccgtgccagtgattagtggggcatgtctgcacagttgtgttcttcctggtagcaagcccatggtcacagtatttgccttgagggctggggcccggggtggcgaaagcaccaggatgttgctctcctgggctgtgtcttcctgtctggctctcaattttactggaatgatgccaccacccccatccctttccctgacattggctcggcccagggcagttttaaaaggaagaatgacttcttttggctgctgcgggctgtgtgtgctgcgcgctgccagtagttgttcataacgcaaagacgtggagaaaatctccggcgagacgcgctccatgccacgagcaaacgcaaaattttctgccccttcgccaatcatcatcacatgcgggctttgctccatcaccagccgggcggcaagaaccggattacgcagatgactaacgcccgccaccgcaccggctttcagggtgttaccatccatcacacaggcgtccagttcatgggtttcatcacgcgtaaagacagcgccaattccggcgttaaacagtggacactcttccagcagacgcaccgcttccgtcaccacatccagcgcactttcgcccgcttccagcattttctgcccggtttcaacaatggcagacaacgcctcgatgtagcgtaattcctgttgcagactctctgcgcgcggctaattgcacctgcgccaccatgaattgcaatgactgcttgcccatagtattcgtccattaagggtggttcgccacttttgcaccggattgatgtcgctcgacaccgccttaatgagatgctttctcgcgtcaccccactgaccgcccaggaaacgcgccactggtacagtgttttggtcgtattctggcgagcgatgtcgtttcgcgcttgatgttccggggtttgataactccgcaatggacggctacgcggtcgtttagccgatattgcctccgggcaaccgctgcccgttgccggtaaatctttgccggtcagccataccatggtgaatggcctgcattgtattatgaccggtgcgccggtgccggaaggctgcgaagcggtggtgatcaggagcagactgaacaaatggacaatggcgtgcgttttactgctgaaggcgtagcgggcaaaatattcgccgtcgcggtgaagatatctctggggggcggttgttctccccgcggaactcgcctgataccgcagagctgccagtatgcttatggggatggcgaaatccgtgatcgtaagggtgtaagcttttacggaaggaccaatgccgcagacactttgcgtcttgacagctacaccttgcccctgactattaccactgtctgttgaccacccttgatctgttgcccactgcattggcactataaccttgacacatcgtggacaacactggctgctgtggtaggacgacggtgcctgtgatatttgcagtacatcttgggtgctggcatcctctccctgacatatccaatctgacacaaaattgaacattcctggcat

SEQ ID NO: 123367 - DNA, 2677 bp, Homo sapiens
atgaccaggcttgtagggggcccagccttccagcttctcacgctctttcgcgatgaccgcttccggtgcgcgggcgacaaagccttcgttcgccagtttgttctcgatacggctgatttcaccttcaatcttcgccacttctttcgccagacgcgccagctcatcttctttgttgatgaggccagccatcgggatcagaagctctgcaccgtcgatgatcttcggaccggaaaccggacctttgttatccggcaggcatgcacggtgattcttttcctgacgcccccgcgctttgccggaagccaccgcgttctcattaacaccaccgctctgcataccgcgctggatccacgcagtatcagcttccagcgttttgccccggccgaagttcttcctagacgcgcgttacgtaccgcgctgatcgccacctacggccgtgatcgtgatcctggccggccgttgtggttggggtcggtcaagtcgaacatcggtcatacgcaagcggcggcgggtgtggctggtgtgatcaagatggtgatggcgatgcggcacgggcagctgccacgcacgttgcacgtggaatcgccgtcgccggaggtggattggtcggcggggacggttcaactccttacggagaacacgccctggcccaggagtggtcgtgttcgtcgggtgggggtgtcgtcgttcgggatcagtggtactaacgcgcacgtcatcctcgaacagcccccgggagtgccgagtcagtctgcggggccgggaacggaagattctggtttcggggtgcatccggcactgctggacgcggctctgcacgcaacggctgtccgagacatggatgacgcacgcttgccgttccagtgggaaggtgtgtccctgcacgccaaggccgcgccggctttgcgggtccgcgtggtcccggctggtgacgatgccaagtccctggctggttgtgatgggaccggtcgaccgtgctccggcaaccgcgccgccggagctgacgccacagaatattccttcccgcaccgccagttcgcgcatggtgttttccgcatcgcgctgatgaatatccagcacctcatccaccagagaagcgttgaaaatccccggcagatattccgtaggccagcggcgaatgccgggaatgctgctgccctcttccggttgcaggccgacaatggtacaacggggatgtttgattcgctaccataccgaaatgacgcatcgatggtaatgcgccgccttattcgctctctgcccgacgcgaaagcagttattggtgtggcgagttgcgataaggggcttccggccaccatgatggcactcgccgcgcagcacaacatcgcaaccgtgctggtccccggcggcgcgacgctgcccgcaaaggatggagaagacaacggcaaggtgcaaaccattggcgcacgcttcgccaatggcgaattatctctacaggacgcacgccgtgcgggctgtaaagcctgtgcctcttccggcggcggctgtcaatttttgggcactgccgggacatctcaggtggtggccgaaggattgggactggcaatcccacattcagccctggccccttccggtgagcctgtgtggcgggagatcgccagagcttccgcgcgagctgcgctgaacctgagtcaaaaaggcatcaccacccgggaaattctcaccgataaagcgatagagaatgcgatgacggtccatgccgcgttcggtggttcaacaaacctgctgttacacattccggcaattgctcaccaggcaggttgccatatcccgaccgttgatgactggatccgcatcaacaagcgcgtgcccccgactgttgagcggactgcctaatggcccggtttatcatccaacggtcaatgcctttatggcaggtggtgtgccggaagtcatgttgcatctgcgcagcctcggattgttgcatgaagacgttatgacggttaccggcagcacgctgaaagaaaacctcgactggtgggagcactccgaacggcgtcagcggttcaagcaactcctgctcgatcaggaacaaatcaacgctgacgaagtgatcatgtctccgcagcaagcaaaagcgcgcggattaacctcaactatcaccttcccggtgggcaatattgcgccagaaggttcggtgatcaaatccaccgccattgacccctcgatgattgatgagcaaggtatctattaccataaaggtgtggcgaaggtttatctgtccgagaaaagtgcgatttacgatatcaaacatgacaagatcaaggcgggcgatattctggtcattattggcgttggaccttcaggtacagggatggaagaaacctaccaggttaccagtgccctgaagcatctgtcatacggtaagcatgtttcgttaatcaccgatgcacgtttctcgggcgtttctactggcgcgtgcatcggccatgtggggccagaagcgctggccggaggccccatcggtaaattacgcaccggggatttaattgaaattaaaattgattgtcgcgagcttcacggagaagtcaataggttggcgctgctgccgcgtgtgtcgggaggtgggcgcggctgggcgtggcgcgctgccgtgcgtgtggaggctgggggcgtcgcgcacgtcgtggtgcgttttctcgtgtgctccacgtga

SEQ ID NO: 123368 - DNA, 993 bp, Homo sapiens
tcatgctgttttggttaccgtaggcttgtagtgtagtttgaagtcaggtagcatgatgccttcagctttgttctttttgcttaggattgtcttgacaatgcaggctcttttttggttccatatgaactttaaagtagttttttccaattctgtgaagaaattcattggtagcttgatggggatggcattgaatctataaattaccttcggcagtagggccattttcacaagattgatccttcctatccataagcatggaatgttcttccatttgtttgtgtcctctttcatttcattgagcagtggtttgtagttcttcttgaagaggtccttcacatcccttgtaagttgtattcctaggtatgttattctctttgtagcaattgtgaatgggagttcactcatgatttgtctctctgattgtctgttactggtgtataggaatgcttgtgacttttgcacactgattttgcatcctgagactttgctgaagttgcttatcagcttaaggagattttgggctgagacgatggggttttctaaatatacaatcatgtcatctgcaaacagagacaatttgacttcctctttttctacttgaataccctttatttctttctcttgcccgattgccatggcctgaacttccaatattcttttcattctgagtctattaatcctgtcagtcttcaactgccttccatagccgtcataggaaagcccaaattcatcagcatggcatctagggtcgctccacagtttgacactagtctggactgacatttcccaaagtctcttccttatgtaagtcttcacgcccacccccagaagcgtagccaacaatcttccatagacttcttcatgatactcactttcagtaggcagcagccgcacacgttgttgggggtcggggacgtggtaattcctcaaggccttcatgttctgggggtccggctgcgggctcagaggaggcaatgcatggctgccagccat

SEQ ID NO: 123369 - DNA, 2681 bp, Homo sapiens; identical to SEQ ID NO: 123304

SEQ ID NO: 123370 - DNA, 3253 bp, Homo sapiens
atgaacattgatgcagaaatcctcgataaaatactggcaaaccgaatccagcaggacatcaaaaagcttatccaccatgatcaagtgggcttcatccctgggatgcaaggctggttcaatatatgcaaatcaataaacgtaatccagcatataaacagaaccaacgacgaaaaccacatgactatctcaatagatgcagaaaaggcctttgacaaaattcaacaacgcttcatgctaaaaactctcaataaattagtgttggaagttctggccagggcaatcaggcaggagaaggaaataaagggtattcaattaggcaaagaggaagtcaaattgtccctgtttgcggatgacatgattgtatatctagaaaaccccatcgtctcagcccaaaatctccttaagctgataagcaacttcagcaaagtctcaggatacaaaatcagtgtgcaaaaatcacaagcattcttatacaccaacaacagacaaacagagagccaaatcatgagtaaactcccattcacaattgcttcaaagcaaataaaatacctaggaatccaacttacaagggatgtgaaggacctcttcaaggagaactacaaaccactgctcaatgaaataaaagaggatacaaacaaatggaagaacattccatgctcatgggtaggaagaatcaatatcatgaaaatggccatactgcccaaggaacgcagctcctcaccagcaacggaacaaagctggatggagaatgactttgatgagttgagagaagaaggcttcagacgatcaaacttctccgagctaaaggagaaagttcgaacccatcacaaacaagataaaaaccttgaaaaaaggagctggttttttgaaaagatcaacaaaatcgatagacctctagcaagactaataaagaagaaaagagagaagagtcaaataaacgcaataaaaaacgataaaggggatatcactgccgatcccacagaaatacaaactaccatcacagaatactataaacacctctatgcaaataaactagaaaatctagaagcaatggataaattccttgacacatacaccctcccaagaataaaccaggaagaagttgaatctctgaataggccaataacaggctctgaaactgaggcaataattaatagcttaccaaccaaaaaaagtccaggaccagatggattaacagctgaattctaccagaggtacaaggaggagctggtaccattccttctgaaactattccaatcaatagaaaaagagcgaatcctcccgaactcattttatgagggcatcatcctcctgataccaaagcctggcagagacaacacaaaaaaagataattttaaaccaatatccctgatgaacatggatgcaaaaatcctcaataaaatactggcaaaccgaatccagcagcacatcaaaaagcttatccaccatgatcaagtgggcttcatccctgggatgcaaggctggtttcaacatatgcaaatcaatgaaagtaatccatcacgtaaacagaaccaatgacaaaaaccacatggattttctcaatagatgcagaaaaggcctttgacaaaattcaacaacccttcatgctaaaaaaactctcaataaattaggtattgatgggacgtatctcaaaataataagagatatctatgacaaacccacagccaatatcctactgaatggacaaaaactggaagcattccctttgaaaactggcacaagacagggatgtcctctctcaccactcctattcaacatagtgttggaagttctagccagggcaatcaaggcaagagaaagaaacaatgggtattcgaataagaagagagaaagtcaaattgtctctgtttgcagatgacatggttgtatatttagaaaacccaatcgtctcagcccaaaatctccttaagctgataagcaacttcagcaaagtctcaggatataaaatcagtgtgcaaaaatcacaagcattcctatacaccaataacagacaaacagagagccaaatcatgagtgaactcccattcagaattgctacaaaagacaataaaatacctaggaatccaatttacaagggatgtgaaggacctcttccaggagaactacaaaccactgttcaacgaaataaaagaggacacaaacaaatggaagaacattccatgctcatggataagaagaatcaatatccatgaaaatggccatactgccccaggtaatttatagattcaatgccatccccatcaagctaccaatgactttcttcacagaattggaaaacaaactactttaaagttcatatggaaccaaaaaagagcccgcattgccaagtcaatcctaagccaaaagaacaaagctggaggcatcacgctacctgacttcaaactatactacaaggctacagtaaccaaaacagcatggtactggtaccaaaacagagatatagaccaatggaacagaacagagccctcagaaataataccacacatctacaaccatctcgtctttgacaaacctgacaaaaacaagaaatggggaaaggactccctatttaataaatggtcctgggaaaactggctagccataggtagaaagctgaaactggatcccttccttacaccttatacaaaaattaattcaagatggattaaagacttaaatgttagacctaaaaccataaaaatcctagaagaaaacctaggtaataccattcaggacataggcatgggcaaggacttcacgactaaaacaccaaaagcaatggcaaccaaagccaaaattgacaaatgggatctaattaaactaaagagcttctgcacagcaaaagaaaccaccatcagagtgaacaggcaacctacagaatgggaggaaatttttacaatctacccatctgacaaagggctaatatccagaatctacaaagagctcaaacaaatttacaagaaaaaaaacaaacaatcccatcagaaagtgggcgaaggacatgaacagacacttctcaaaagaagacatttatgcagccaacagacacgtgaaaaaaagctcaccatcactggtcatcagagaaatgcaaatcaaaatcacaatgagataccatctcacaccagttagaatggcaatcattaacaagtcaggaaacaacaagtgctggagaggatgtggagaaataggaacacttttacactgttggtgggactctaaactagttcaaccactgtgggagtcagtgtggtga

SEQ ID NO: 123371 - DNA, 773 bp, Homo sapiens
ggcttttggggccagcctcgcccaagacaaacccaacactggtactgggtagaaaagcccaagtcatcccattgttacgggtcttggatattggaaaaatctgccatctggcaaggaaagtcggggcggtaagcgtggtggataaccccttcataaggccggcattacaaaatccgctggcattacgtgccgatctggtgttgcattcatgcacgaaatatctgaacggtcactcagacgtagtggccggcgtggtgattgctaaagacccggacgttgtcactgaactggcctggtgggcaaacaatattggcgtgacgggcggcgcgtttgacagctatctgctgctacgtgggttgcgaacgctggtgccgcgtatggagctggcgcagcgcaacgcgcaggcgattgtgaaatacctgcaaacccagccgttggtgaaaaaactgtatcacccgtcgttgccggaaaatcaggggcatgaaattgccgcgcgccagcaaaaaggctttggcgcaatgttgagttttgaactggatggcgatgagcagacgctgcgtcgtttcctgggcgggctgtcgttgtttacgctggcggaatcattagggggagtggaaaagttaatctctcacgccgcaaccatgacacatgcaggcatggcaccaaaagcgcgtgctgccgccgggatctccgagacgctgctgcgtatctccaccggtattgaaaatggcgaaaatttaattgccgaccttgaaaatggcttcccggcttga

SEQ ID NO: 123372 - DNA, 2242 bp, Homo sapiens
  misc_feature (1)...(2242): n = a,t,c or g
gaaaatcgaccgtgtgcgcacccgccgtggaccaaagtgaagagcggaaaataatccgcagtcgtagatgccggaggggcgcaccacacccgccggcaattcgcaccattatggtgcgcttgcacacattcaatgccggagagcagccgtgaatgacgctatccctcgcccgcaggcgaaaacccgtaaggcgctgacgccgctattagaaatccgcaacctgaccaaatcctacgatggtcaacatgcggtggatgatgtcagcctgaccatctacaaaggtgaaatcttcgcgctgctgggcgcatccggctgtggcaagtccacgctgctgcgtatgctggcaggtttcgaacaaccttctgccggacagataatgcttgatggcgtcgatttgtcacaggttccgccttacctgcgccccatcaatatgatgtttcagtcttacgcgctgtttccgcatatgaccgtggaacagaacatcgcttttggcctgaaacaggacaaactaccgaaagcggaaattgccagccgggtcaatgagatgctcggcctggtgcatatgcaggagttcgccaaacgcaaaccgcatcagctttccggtggtcagcgacaacgtgtggccctggcccgaagccttgcgaagcgccccgaaactattactggtcgatgagccgatgggcgcgctcggataaaaagctgcaagccaggatgcaggagtcccgcgtaggatccaggccgaggaggtcgacggtccaactgggcgatgctgcgtggcggcacgcgtcgattacgctgattccgatctatatcggttatgagcacgtcatggaagtgggtacgtacgaacaacagaattgcccggcgcgacgaaagagaaagaaagccggccgcagatcgtgcgaggtttaagcaagttgcgtaatgtcggtcagggttacgtcaacttcggtgaaccaatgccgttgatgacctaccttaaccagcatgtacctgactggcgtgaatctatcgatcccatcgaagcggtgcgtccggcatggttaacgccgacggtcaataatattgctgccgatctgatggtacgcattaacaacgcaggcgcggcaaacgccatgaacctgtgctgtactgcgctactggcatcacgtcagcgctcactcacccgcgagcagttaaccgagcaactcaactgctacctggatttgatgcgcaacgtgccctactccacggactctaccgttcaatcagccagcgccagcgagcttatcgatcacgcgctgcaaatgaacaagtttgaagtcgagaaagacacaatcggcgacatcatcattctgccgcgcgagcaagcggtgctgatgacctactatcgcaacaacattgcgcatatgttggtgctgccttcgctgatggcggcaatcgtcacccagcatcgccacatctcccgcgacgtattgatggagcacgtcaatgtgctttacccaatgctgaaagcggagctgttcctgcgctgggatcgcgacgagttgccggacgttattgatgcgctggcaaatgagatgcaacctngctggcgcaggcgcgccgaaacgctgcaacgttatgccatcaccttctggttgttgagtgccaacccgtcgatcaagcgcggtacgcttggagaaagagagccgcaccgtcgcgcaacgtctctccgtgctgcacggcatcaacgcgccggagttcttcgacaaggcggtgttcagttctctggtgctgacactgcgtgatgaagggtatatcagcgatagcggcgatgccgaaccggcagaaacgatgaaggtttatcagttgctggcggagttgattacatcagacgtgcgtttgacgattgagagtgcgacgcagggcgaagggtaatcagagagaattgccggatgcggcgaaaacgccttatccggccttccataatctgcaaattcaataaattgcgatgtgttgtgtaggcctgagaagcgccgcgcatcaggcaacccagaagaaagccggatgatcatccggcttttttacatcatcagaaatgccagtaactcattgccagccctaaaaatagtaccagaccaacatagttattattcataaatgctttaaagcaggcttcacgctcgcggttggcaatcagtttttgttgataaacaaacagcgcgccagccaccagaattgaccagtaatatccccagcctaagccatttaactcaccgat

SEQ ID NO: 123373 - DNA, 639 bp, Homo sapiens
atgactgacgagctgagagaagaaggcttcagacgatcaaattactctgagctacgggaggacattcaaaccaaaggcaaagaagttgaaaactttgaaaaaaatttagaagaatgtataactagaataaccaatacagagaagtgcctaaaggagctgatggagctgaaaaccaaggctcgagaactactaaggcaggccaacgttcagattcaggaaatacagagaacgccacaaagatactcctcgagaagagcaactccaagacacataattgtcagattcaccaaagttgaaatgaaggaaaaaatgttaagggcagccagagagaaaggtcgggttaccctcaaagggaagcccatcagactaacagcggatctctcggcagaaaccctacaagccagaagagagtgggggccaatattcaacattcttaaagaaaagaattttcaacccagaatttcatatccagccaaactaagcttcataagtgaaggagaaataaaatactttacagacaagcaaatgctgacagattttgtcaccaccaggcctgccctaaaagagctcctgaaggaagcgctaaacatggaaaggaacaaccggtaccagccgctgcaaaatcatgccaaaatgtaa

SEQ ID NO: 123374 - DNA, 945 bp, Homo sapiens
atggggaaaaaacagagcagaaaaactggaaactctaaaaatcagagcgcctctcctcctccaaaggaatgcagctcctcaccagcaacggaacaaagctggacggagaatgactctgacaagttgagagaagaaggcttcagacgatcaaactactccgagctaaaggaggaagttcgaaaccatggcaaagaagttaaaaaccttgaaaaaaaattagatgaatggctaactagaataatcaacgcagagaattccttaaaggacctgatggagctgaaaaccaaggcacgagaactacgtgacaaatgcacaagcctcagtagccaatttgatcaactggaagaaagggtatcagtgatggaaaatcaaatgaatgaaatgaagcgagaggagaagtgtagagaaaaaagaataaaaagaaacgaacaaagcctccaagaaatgtgggactatgtgaaaagaccaaatctacgtctgattggtgtacctgaaacaaagcaggccaacattcaaattcaggaaatacagagaacgccaaaaagatactcctcgagaagactaactccaagacatgtaattgtcagattcaccaaagttgaaatgaaggaaaaaatgttaagggcagccagagagaaaggacgggttacccataaagggaagcccatcagactaacagctgatctctcagcagaaactctacaagccagaagagagtgggggccaatattccacattcttaaagaaaagaattttcaacccagaatttcatatccagccaaactaagcttcataagtgaaggagaaataaaatcccttacagacgagcaaatgctgagagattttgtcaccaccagacctgccctaaaagagctcctgaaggaagcactcaacatggaaaggaacaaccggtaccagccactgcaaaaacatgccaaattgtaa

SEQ ID NO: 123375 - DNA, 972 bp, Homo sapiens
tcagcggcccggcaggccgcacaactgtaaccgctgccccggccgccgcccgctccttctcgggccggcgggcacagagcgcagcgcggcggggccggcggcatgcctgtgtcctggaggagctggctcgccaacgaaggggttaaacacctctgcctgttcatctggctctccatgaatgtcctgcttttctggaaaaccttcttgctgtataaccaagggccagagtatcactacctccaccagatgttggggctaggattgtgtctaagcagagcctcagcatctgttcttaacctcaactgcagccttatccttttacccatgtgccgaacactcttggcttacctccgaggatcacagaaggttccaagcaggagaaccaggagattgttggataaaagcagaacattccatattacctgtggtgttactatctgtattttctcaggcgtgcatgtggctgcccatctggtgaatgccctcaacttctcagtgaattacagtgaagactttgttgaactgaatgcagcaagataccgagatgaggaaatacagagaacgccacaaagatactcctcgagaagaccaactcaaagacacataattgtcagattcaccaaagttgaaataaaggaaaaaatgttaagggcagccagagagaaaggtggggttgcccacaaacggaagcccatcagactaacagctgatctctcagcagaaactctacaagccagaagagagtgggggccaacattcaacattcttaaagaaaagaattttcaacccagaatttcatatccaaccaaactaagcttcataagtgaaggagaaacaaaatcctttacagacaagcaaatgctgagagattttggcaccaccaggcctcccctaaaagagctcctgaaggaagcactaaacatggaaaggaacaaccggtaccagccacagcagaaacacaccaaattgtaa

SEQ ID NO: 123376 - DNA, 1378 bp, Homo sapiens
atggggaaaaaacagagcagaaaaactggaaactctaaaaatcagagtgcctctcctcctccaaaggaacgcagctcctcaagagcaatggaacaaagctggacggagaatgactttgacgagttgagagaagaaggcttcagacgatcaaactactctgagctaaaggaggaagttcaaacccatggcaaagaagataaaaaccttgaaaaaaaattagatgaatggctagctagaataatcaatgcagagaagtccttaaaggacctgatggagctgaaaaccaaggcacgagaactatgtgatgaatgcacgagcctcagtagccgattcgatcaactggaagatggggtatcagtaatggaagatgaaatgaatgaaatgaagtcagaagggaagtttagagaaaaaagaataaaaagaaatgagcaaagcctccaagaaatatgggactacgtgaaaaaaccaaatctatgtctgattggtgtacctgaaagtgataggaagaacggaaccaagttggaaaacactctgcaagatattattcaggagaacttccccaatctatcagggcaggccaacattcacattcaggaaataccagagaacgccacaaagatactccttgagaagagcaactccaagcacacctaattgtcagattcaccaaagttgaaatgaaggaaaaaaatgttaagggcagccagagagaaaggtcggggttacccacaaagggaagcccatcagactaacaacagctgatctctcagcagaaactctacaagccagaagacagagtgggggccaatattcaacattcttaaagaaaagaatttttcaacccagaatttcatatccagccaaactaagcttcataagtgaaggagaaataaaatactttatagacaagcaaatgctgagagatttttgtcaccaccagggcctgcccttaaaagagctcctggaaaggaaggcacttaaacatgggaaagggaacaaccagtaaccagccacttgcaaaaacattgccaaatttgtaaagaccattgaggctagggaagaaacttgcatcaacttaacgagcaaaataaccagctaacatcataatgacaggatccaaattcacacataacaatattaactttaaatgtaaatggggctaaatgctcccatttaaaagacacagactgggcaaattggataaagaatcaagacccatcagtgtgctgtattcaggatacccatctcacatgcagagacacacataggctcaaaataaagggatggaggaagatctgccaagcaaatggaaaacaaaaaaaggcagggtttgcaatcctagtctctgataaagcagactttaaaccaacaaagatca

SEQ ID NO: 123377 - DNA, 514 bp, Homo sapiens
tttttttttttttttttactttctgtagaaagggtacactcgtcagcagttttgccacgagagtgcaccgaacaaaggagacagggtcatttataacctgacgtgtccaccttactgctgtgtccagtttccattggctggaaccgggcttcacattctgtatttgtcctgattgttttgtgcaatgttgagaaaggtaaaaacaccttcaaatgaggaagaggaacatgctatgacctaatgcttgcttggaccagtataagcatgccagggcaaatatttaggctaaattgtgggagccaagaacataaagtacattgatttctttattacggctagcagatatttaagaatgttagcacaggtctttgaataaattttgcttctgagagaagttactaggtattcttaattcgatggggaggaaagcctttgaagaggaaactctactttttgcattgctctatcacccaggctttagtgcagtgggacaatctcagcccaatgcaacctg

SEQ ID NO: 123378 - DNA, 1253 bp, Homo sapiens
tttcgttgcagccatacagcagactttagagagaggggtgtcagagaggggctccctacaccggtcctcctgaggggggtagggaactgtgagctggccggatgcaaaacggtatagtacagtggtctcttgtaactcaggctgtagactgagagcaaaatgaacttggttaaaagcaagaaagcctcctccaccacagcagcaccctagacaagctggtggtttctaaaagtggccagtttgccatcgtgaagaagtgccgggagaagagcacggggcttgagtatgcagccaagttcatcaagaagcggcagagccgggcgagccggcgcggtgtgagccgggaggagatcgagcgggaggtgagcatcctgcggcaggtgctgcaccacaatgtcatcacgctgcacgacgtctatgagaaccgcaccgacgtggtgctcatccttgagctagtgtctggaggagagctcttcgatttcctggcccagaaggagtcactgagtgaggaggaggccaccagcttcattaagcagatcctggatggggtgaactaccttcacacaaagaaaattgctcactttgatctcaagccagaaaacattatgttgttagacaagaatattcccattccacacatcaagctgattgactttggtctggctcacgaaatagaagatggagttgaatttaagaatatttttgggacgccggaatttgttgctccagaaattgtgaactacgagcccctgggtctggaggctgacatgtggagcataggcgtcatcacctacatcctcttaagtggagcatcccctttcctgggagacacgaagcaggaaacactggcaaatatcacagcagtgagttacgactttgatgaggaattcttcagccagacgagcgagctggccaaggactttattcggaagcttctggttaaagagacccggaaacggctcacaatccaagaggctctcagacacccctggatcacgccggtggacaaccagcaagccatggtgcgcagggagtctgtggtcaatctggagaacttcaggaagcagtatgtccgcaggcggtggaagctttccttcagcatcgtgtccctgtgcaaccacctcacccgctcgctgatgaagaaggtgcacctgaggccggatgaggacctgaggaactgtgagagtgacactgaggaggacatcgccaggaggaaagccctccacccacggaggaggagcagcacctcctaa

SEQ ID NO: 123379 - DNA, 1505 bp, Homo sapiens
cccgttgctacgacgatttcgcagcccctgagtctggaggctgacatgtggagcataggcgtcatcacctacatcctcttaagtggagcatcccctttcctgggagacacgaagcaggaaacactggcaaatatcacagcagtgagttacgactttgatgaggaattcttcagcgcagacgagcgagctggcccaggactttattcggaagcttctgggttaagagacccggaaacgggtcacaatccaagaggctctcagacacccctggatcacgtcaaaaggagaaggcagagcccctgaacagcggaagacagagcccacccagctgaagaccaagcacctgagagagtacactctcaaatgccactcaagcatgcctcccaacaactgctatgtcaacttcgagcgttttgcctgtgtggtggaagacgtggctcgggtcgacctgggatgccgtgccctggtggaggcccacgataccatccaggacgatgtggaggccctggtctccatcttcaatgagaaggaagcttggtaccgagacgagaatgagagcgcccggcatgacctgtcccagctcaggtatgagttccgcaaggtggagtcattgaagaagctgctgcgagaagacatccaggccacgggatgtagcctcggaagcatggccaggaaactggaccatctgcaagcccagtttgagattctgaggcaggagctctccgcagacctgcagtggattcaggagctggtgggcagcttccagctggagagtgggagctctgagggcctgggctccacattctaccaggacaccagtgaatccctgtcagagctgctcagcagatcatgcactgaggaatttctggcaggctggaagctctaatcgccagaatccagtcagtgatgcatcccaagagaaagggtatactcgccagcagttctgccacgagagtacaccgaacaaaagagacagggtcatttataatctcacgcgtccaccctactgctgtgtccagtttccactggctggaacgggacctgacattctgtatttgtcccgactggctagcaactcagaactttttaaaagaggcaaaggcagaggagaatcaaggaagcaggaagttaacttgtggaatgctgagaaaggtaaaaaaaacttttaaataaggaagaggaacaggctatgacctaatgcttgcttggaccagtataagcatgccagggcaaatatttaggctaaattgtgggagctaagaacataaagcacattgatttctttattacggctggcagatatttaaaaatgttagcacgggtctttgaatcaattttgcttctaagagaagctactatttattcttaattagatggggaggaaagtctttgaaaaggaacctctactttactttttagttactatgaggatcactatatcaatgtttcttaattcatatgctaaaggaattccaccgcactggctaggatctcgatgtgccgcg

SEQ ID NO: 123380 - DNA, 1290 bp, Homo sapiens
atgcacagatctgacatgtcttgccctgacaaagtggacattttggatacaacggcattcagaattgccattaatgaagtgaagcattctaaactcacaagtgttacagtgacaaaagtcctagacatgttcatcagtcgttcttccctctttccaatagatgatggcttgcttgatgatggtcacagtgatcaagttggagttttaaattcacccacctgttattcagctcaccaaaatggagagcgaatagaacgcttctctcgaaaagtttttgttggtggtcttcctccagatattgatgaagatgaaataactgctagcttcagaagatttgggcctttggtagtagattggcctcataaagcagaaagcaagtcctattttccaccaaaaggctatgcatttcttctctttcaagaagagagctcagttcaggcactcattgatgcttgtattgaagaagatggaaaaactctacctgtgtgtttcctagcccctactatccaaggacaaacccagttccaaatacgtcccttggaatttaagtgatagtgattttgtaatggatggttctcagcctttggatccccgaaaaacaatttttgttggaggtgttcctaggccattaagggctgtggaacttgctatgatcatggaccggctgtatggtggagtttgttatgcaggaattgatacagatcctgagctaaaatacccaacaagctcctgggcgagttgctttctccaatcagcagagctatattgctgccattagtgctcggtttgttcagcttcagcatggtgatattgataaacgtgtggaggtaaagccatatgtgctagatgaccagatgtgtgatgaatgccagggcgcacgctgtggtggaaaatttgctccctttttttgtgccaatgtcacttgcctgcagtattactgtgagttttgttgggcaaatatccactctcgtgctggacgtgaggtccatattcccttggttacagaaagcgccgtcgccgcccctcggatccacattccgtggacctaacaataagccgacgggcctctgtttaacaaggaaagaaagggtgcatgtggcttactgtgtctgaagatactgacatgcagaagaaataagtgcattcttctgcttttcaccccagctatcaatacatgcatctttatcagcagccaaaacactacaagcctcttgtttttcaccaaaaccctacatctcaggcttactaatttttgtgatattttcatgttcaaataaaatgtttttttgt

SEQ ID NO: 123381 - DNA, 176 bp, Homo sapiens
caggattttcaacagtgtcctgcagaacaagttcagcccaccttcccctctgccccaggccgtcttctccacttcctcgcgggtacatgggtcccaggaggtgggctggtgtgggggtgtgctgtaaaggatgagctttagtggggttcatggatgctgaggggcccctgggcctt

SEQ ID NO: 123382 - DNA, 1942 bp, Homo sapiens
  misc_feature (1)...(1942): n = a,t,c or g
atagcgtccaacagctggaacgccagcagcagccccggggaggcccgggaggatgggcccgagggcctggacaaggggctggacaacgatgcggagggcgtgtggagcccggacatcgagcagagcttccaggaggccctggccatctacccgccctgcggccggcggaagatcatcctgtcagacgagggcaagatgtacggccgaaatgagttgattgcacgctatattaaactgaggacggggaagactcggacgagaaaacaggtgtccagccacatacaggttctagctcggaagaaggtgcgggagtaccaggttggcatcaaggccatgaacctggaccaggtctccaaggacaaagcccttcagagcatggcgtccatgtcctctgcccagatcgtctctgccagtgtcctgcagaacaagttcagcccaccttcccctctgccccaggccgtcttctccacttcctcgcggttctggagcagcccccctctcctgggacagcagcctggaccctctcaggacatcaagccctttgcacagccagcctaccccatccagccgcccctgccgccgacgctcagcagttatgagcccctggccccgctcccctcagctgctgcctctgtgcctgtgtggcaggaccgtaccattgcctcctcccggctgcggctcctggagtattcagccttcatggaggtgcagcgagacccctgaacacgtaccagcaaacacctgtttgtgcacattcggcacacagaccgaaacccccgccgtttcttcagaaccccacccctggggcccagtagatgtgcgcccagatctatgaccnaaatttccccgagaaaaagggaggattgaaggagctctatgagaaggggccccctaatgcctttcttccttgtcaagttctgggccgacctcaacagcaccatccaggagggcccgggagccttctatggggtcagctctcagtacagctctgctgatagcatgaccatcagcgtctccaccaaggtgtgctcctttggcaaacaggtggtagagaaggtggagactgagtatgccaggctggagaacgggcgctttgtgtaccgtatccaccgctcgcccatgtgcgagtacatgatcaacttcatccacaagctgaagcacctgcccgagaagtacatgatgaacagcgtgctggagaacttcaccatcctgcaggtggtcacgagccgggactcccaggagaccctgcttgtcattgcttttgtcttcgaagtctccaccagtgagcacggggcccagcaccatgtctacaagctcgtcaaagactagggtgccctctgcgcctccttaaggatgcagggtgagcatctcctctccacacctgcctggcacccctgggggggtccaggattgaggattcatctacctgccaggcctcaggcccaggacccaggaggcctccccacctaccccagcacacacactccctgccactgttctgcgctttaattgtgggagaagagaggagaggagggctcaacggtggggcagcctgtccggggcgctgacccaccatcaccctgctctgtccagactcgcgtgacctcagagaggtggggataggggacaccttcagcctccagcatgtgtggccactgtacccccacccacccttgggggagcatgatgggcaggtgagggcaggatggagaccaagggagtcagtgagcagaggccctgggagtgtccggttggggttggactgaggacagaggggcccacacttccttgcccctttgtgtcccaggcctggtgcccagactccttacatgatcaacttcatccacaagctgaagcacctgcccgagaagtacatgatgaacagcgtgctggagaacttcaccatcctgcaggtggtcacgagccgggactcccaggagac

SEQ ID NO: 123383 - DNA, 339 bp, Homo sapiens
actgcgagaagttctgcagcccgaacggtcagtcgtgattatcggtgccggaactattggtctggaactggctgccagcgccacgcagcgcagatgtaaggtgacagtgattgaactggcggcaaccgtcatgggccgtaatgcaccaccgcccgtgcaacgctatcttttacagcgccaccagcaggctggtgtgcgcattctgctcaataatgccattgaacatgtggtcgatggtgaaaaagtagaactgacgctgcaaagtggggaaacgcttcaggctgatgtggtgatttacggtattggtatcagcgccaacgagcaactggctcgcgaggc

SEQ ID NO: 123384 - DNA, 2913 bp, Homo sapiens
ttacggctggatctcatgctgatggctttcccagtatgacttcacgtagtccgggtgaccaaacgccatgtagatcttgcccattgcggaacagtagagcggcatatgctggccaatataggcacgggttcgcagcatcccggttgtgggttccagcttataaatcaaaatagcgtgatcgtcttcgcggctggagaagttaatggtttcaccagtggcgatgttcagtgcctcaagatgcggagcggcgatatgaatgatattcagcgaagacagcgccttctgcccgacggcaataaatttggtggtcaggcgataactccccgaaatttgaaacacgtttggcattgacgctttggccagaaaggtcataaggaggaacctggtatcaggcctatgccaaaaacacgtaaggggaataataacgcggtaataaagggtgcgtgtaaaatagtcgcaccaccacgggtttctcggacattctctataacagagcggttctcgcacgtataccgctaggccgctgtaaaatatcaggcggtgtaacacgggggtatgctcgaaatctttttcgtggcggaggagcagactaagacacgcactcatcacatagcgcgctagaacagaaacgacattatgcctggtatgattcgcatcgtgaaacagcacggtcacgaagagtttatctatctgtctggcggcattcttgaagtgcagcctggcaacgtgaccgttctggccgacaccgcaattcgcggccaggatctcgacgaagcgcgagccatggaagcgaaacgtaaggctgaagagcacattagcagctctcacggcgacgtagattacgctcaggcgtctgcggaactggccaaagcgatcgcgcagctgcgcgttatcgagttgaccaaaaaagcgatgtaacaccggcttgaaaagcacaaaagccagtctggaaacaggctggcttttttttgcgcgtgtgacccgtcctgaatagcgttcacatagatcctgctgatataaaacccccctgttttcctgtttattcattgatcgaaataagagcaaaaacatccacctgacgcttaaattaaggtactgccttaattttctggcttttatcgtagcggagtgtcgctggaaggcattaactacctggatggcgggatcagtgatgcgattccggttaaagaggcggcaaggcagggcgctaaaacgttggtcgtcattcgcacacccttcatagatggcctgcaacaggtgcgcgcgggtgtgaatggcctgcatcccgtagaaaccactggtcatctcgagtccggcgttgctgccgtacaggaacggcaggaaaaagagatcgcccccagccttcggcaagctggcaacggcctgattgatctcatcaaacgagatttctccccactgtgcggtaaaccattcgaggttgccggaagaggtagggctggcttcgtgaacgataaattcaccatcgttaacgtagcgaccatagacatacggatgcgcttcaccgtcacgtaaaccgcgggttatgccgctggtcaccgcccaggtccccatcaccgcattgagggtaaattcgtcttcgatcccggcgcagagtgcggtggaaaccacatcaaacaggccgccaacaacgggcgtacccgctttcagaccggtcagggcggctgtctgagcggtgatctccccgcagatttcggcagatccgacaacaggcggcagggcgtgattgatttcagcgatccccagccagtcggtgaggcacgggtcatattccccaagactcatgttgtagaggttggactcggaaatattgctctcttcacagcctttgacgccagttaaacaccagcgcaggtagtcgtgcgtcatcatcacgcagccaatttgcgcgtagcgttctggttcggggtctttcagccagcgtaacagcgacacggatgcccggtcaccaggttggtcggtcaggggtacagtttccgggtgcctcttctgcagcgagaccgattcatcgcggggtcgggcaattgctccggggttggctccccgcaagcagctttcggggggatcctcggattgtccgtcaccggtttcgcgggcgttcgctcttgggtctttggcggcatggatttcacggggggcttccggaggcgtggggccctgtttccggcgactgaacttttccaagcctggtctcttcctcctattgcggcggcggtatttctcaatgcggatattaaaccgggcattgaaattgtgttgaatgcggtcaatcttgcgcaggcagtgcagggcgcagcactggtgattaccggggaagggcgcatcgactcgcaaacggcaggcggtaaagcgccgctgggtgtggcgtcggtggcgaagcagtttaatgtaccggtgattgggattgctggcgtattgggtgatggcgtggaagtggtgcaccagtacggcattgacgcggtattcagcattttgcctcgtagcgatcgcttcgatctcaatcttcacgtctttcggcagacgggcaacttcaacgcaagaacgtgccgggaaggtggcgttgtgttcggtgaagaaggcttcgtaagtggcgtttacggttgcgaagtcgttcagatcttttacaaacacggtagttttaacgatgtcgcccactttcaggccagcggcttcgacgatcgcttttacgttatccagcgactgacgtgcctgtgcagcgacgtctgccggtacttcgcccgttttcggatttaccgggatctgaccggaggtgatgatcatattgcccagatcaacgccctgtacgtaaggaccgatagctgccggtgcattttccgtcgcgatagttttgctcatgatttctcctttattacagcggtaaaaagtctggctcat

SEQ ID NO: 123385 - DNA, 1713 bp, Homo sapiens
atgggcgttctgcaggaacgtatcacctccaccaaaactggttctatcacctccgtacaggcagtatacgtacctgcggatgacttgactgacccgtctccggcaaccacctttgcgcaccttgacgcaaccgtggtactgagccgtcagatcgcgtctctgggtatctacccggccgttgacccgctggactccaccagccgtcagctggacccgctggtggttggtcaggaacactacgacaccgcgcgtggcgttcagtccatcctgcaacgttatcaggaactgaaagacatcatcgccatcctgggtatggatgaactgtctgaagaagacaaactggtggtagcgcgtgctcgtaagatccagcgcttcctgtcccagccgttcttcgtggcagaagtattcaccggttctccgggtaaatacgtctccctgaaagacaccatccgtggctttaaaggcatcatggaaggcgaatacgatcacctgccggagcaggcgttctacatgggtgatatggcaatgacttaccacctggacgtcgtcagcgcagagcaacaaatgttctctggtctggtcgagaaaatccaggtaacgggtagcgaaggtgaactggggatctacctggccacgcaccgctgctcaccgccaattaagcctgcctggctgttgctgaaagcgtctttagaaacggcgctaacagcaggtttgtggaatgccggatcgctcaacggcctgacgtgggcaaaaacctcgccttccgcacccatcattatattgatgctcattgccgccgccttactggtacgccggatgcgcttgctggaaatgggcgatgataccgcgtgtgcgctgggcgtcagcgtcgaacgttcgcgtctgttaatgatgctggttgcactgcacgccggtcatgggcgcgtattggtttgccccctgtgcaacgtggtgcgccagccgcctgtaagggaacggccgacaagaaacttcagccgctgcgtcaccgggatcatcgatgcggcaaccagccacgcatcttcgcagcagacagacaacctgggtttaaattctggttctgccacttaccggcctgctgctccggtgacgaaagaggttcgcgttgcgtcacctgctatcgtcgaagcgaagccggtcaaaacgattaaagacaaggttcgcgcaatgcgtgaacttctgctttcggatgaatacgcagagcaaaagcgagcggtcaatcgctttatgctgctgttgtctacactatattctcttgacgcccaggcgtttgccgaagcaacggaatcgttgcacggtcgtacacgcgtttactttgcggcagatgaacaaacgctgctgaaaaatgccctgtggcacaatggtcaacataataccctaacccgacaacgcgaaaaaaagaactttgccatgaaattgaatatccgcgcgcaaactgcacaaaaccagcacaataattctcccatcgttcttgtccacggtctgtttggcagcctcgacaaccttggcgtactggctcgcgatctggtaaacgatcacaatatcatccaggttgatatgcgtaaccacggtctttcaccgagagatccggtaatgaattacccggcgatggcgcaggatcttgttgatactctggatgcacagcagatcgacaaagcacattatcgtcactcatggcggtccaggctagagtga

SEQ ID NO: 123386 - DNA, 1194 bp, Homo sapiens
atgataacttgctacgttcaggagacagtaaagcatcagggcaatcaggaacactacgacaccgcgcgtggcgttcagtccatcctgcaacgttatcaggaactgaaagacatcatcgccatcctgggtatggatgaactgtctgaagaagacaaactggtggtagcgcgtgctcgtaagatccagcgcttcctgtcccagccgttcttcgtggcagaagtattcaccggttctccgggtaaatacgtctccctgaaagacaccatccgtggctttaaaggcatcatggaaggcgaatacgatcacctgccggagcaggcgttctacatgggtgatatggcaatgacttaccacctggacgtcgtcagcgcagagcaacaaatgttctctggtctggtcgagaaaatccaggtaacgggtagcgaaggtgaactggggatctacactggccacgcaccgctgctcaccgccattaagcctggtatgattcgcatcgtgaaacagcacggtcacgaagagtttatctatctgtctggcggcattcttgaagtgcagcctggcaacgtgaccgttctggccgacaccgcaattcgcggccaggatctcgacgaagcgcgagccatggaagcgaaacgtaaggctgaagagcacattacagctctcacgcgacgtagattacgctcaggcgtctgcggacagccaggcttaaaggatattcagaacgcagcaaatcctggccacgccagtccctcccacatgctgggcttgcacggctttgtggctgcagaggtgttatgcgcgcacctgtctgccaggtgtgacaacggcgttgggaatgggtctactctgtgcctagatataaagggcagctgtgtgaatcaaggaattgatataaggacggggatacttgtacctgttgatagcgtcatcgtctacttcacgacattgctgaccgatgagctgaccattgggcctatccgggctgtcccgatggatattacgccgaagtatgtgggaattgccagcggattgatgaacgccggttccgctgtcgccgacattatttcacctatcgcctttggcattattatcgacaaaacaggcaactggagtttaccattctacggttccgtcgcattgcttgttattggtatattcctgacgttcttcatgcgtccagataagtcattgtaa

SEQ ID NO: 123387 - DNA, 2334 bp, Homo sapiens
tcatatccttcgcccactttttgatggggttgattttttcttgtaaatttgtttaagttctttgtagattctggatattagccctttgtcagatgggtagattgtaaaaattttctcccattctgtaggtttccttttcactctgatggtggtttcttttgctgtgcagaagctctttagtttaattagatcccatttgtcaattttggcttttgttgccattttgttctccctgcctctcttctcctcttcttcttctcttttctctcctccttcccttctcttcttcttcttctctcctcttcgctttttctttcttcttcccttctctttctttctctcccttttccttctttcttttcttttcttttctggagtctccgggctggctatgagtgttcgggaaactctctggctctggtcctggcagccacagttgaccagtccagaagtcagcatctgcctgagcccaccgatatgggttccttctgggggatgtgaagactggagtgagaagggcagatggtctccctggcaatgctgagctgcagtctgcaccaggggaagctggcggcccctgattccactatcatttgtacttttctggtggttgaaaagtttgtagccaccaaatcccagaactttctctctctccttcagatcttcgtaggtgtcagctgagagcttggtgctgttcatgtttaaactgcagagactcttcatggagctcagggccagcaggccagcgtctgtgaccggggtctcgcacaggttcagcacctggagcatggtgaggtgttccgacaggagccgaaggccagcgtctccaaactgtagagcacagaaactctcagccctctcccggccactcctggggaagtgactctgaggcacctggacgtcgtcagcgcagagcaacaaatgttctctggtctggtcgagaaaatccaggtaacgggtagcgaaggtgaactggggatctaccctggccacgcaccgctgctcaccgccattaagcctggtatgattcgcatcgtgaaacagcacggtcacgaagagtttatctatctgtctggcggcattcttgaagtgcagcctggcaacgtgaccgttctggccgacaccgcaattcgcggccaggatctcgacgaagcgcgagccatggaagcgaaacgtaaggctgaagagcacattagcagctctcacggcgacgtagattacgctcaggcgtctgcggaactggccaaagcgatcgcgcagctgcgcgttatcgagttgaccaaaaaagcgatgtaacaccggcttgaaaagcacaaaagccagtctggaaacaggctggcttttttttgcgcgtgtgacccgtcctgaatagcgttcacatagatcctgctgatataaaacccccctgttttcctgtttattcattgatcgaaataagagcaaaaacatccacctgacgcttaaattaaggtactgccttaattttctcgtggggtgaatactggtgtaataaggtgccccttgggttccagggtagtgtttctggcccagacccttgttcttgtaaccttgtggtaagccgatgtcggaagtgttggtggtcgttggaagtggtctgtatttgaccgcaatgctcttggtttgcggcatgacaccagcaggtcgattacccggccctgccgcactaaataacgatgcgccgatatcaccaaaatcaaattcaacaatctgcccggcatttaattcgcagttttgcggtacttcaacccggccaccaaaactaatggtataaacaggtgtaaccaacggatcgtaaggcgttgatgtcacatacacggtaaacatcacctgtctggggatctccaccatgttaataaagggacgaataaccggttgaatgccccggtggagggccatttcaatggggcaaccatcgcccgccaccagccatttttcggaataaaaatgggtgctgaacagcggctgcacgcgggaggcgagatcggcgggcaattcgccgttcggccagacttccgtcggtaactgcgccaggtcgagcgtcggttcgctcaacgccacgttatattccgggcgctgatgaaacccgcctgtcactcttcctgcaactttcatggtcatctcatagcgaccgttttcgccacgaatacgtaagcccatatcgtgcccacgcagccagttatccggcgtttcgtagtaaatattcagcaactgcacggggtcatggtgctcgccgcccagcgtattgagatggtcacgcaacgcctcaacggcactgtgattaacaataaactttaattcgatttcctgagccat

SEQ ID NO: 123388 - DNA, 722 bp, Homo sapiens
  misc_feature (1)...(722): n = a,t,c or g
gtatgctttcagcggtaggttatcagccgacctggcggaagagatgggcgttctgcaggaacgtatcncctccaccaaaactggttctatcacctccgtacaggcagtatacgtacctgcggatgacttgactgacccgtctccggcaaccacctttgcgcaccttgacgcaaccgtggtactgagccgtcagatcgcgtctctgggtatctacccggccgttgacccgctggactccaccagccgtcagctggacccgctggtggttggtcaggaacactacgacaccgcgcgtggcggtcagttcattctggcacggtatcaggaacttgaaagccttcttcgccatcctgggtatgaatgacctgtctgaagaagacaaactggtggtagcgcgtgctcgtaagatccagcgcttcctgtcccagccgttcttcgtggcagaagtattcaccggttctccgggtaaatacgtctccctgaaagacaccatccgtggctttaaaggcatcatggaaggcgaatacgatcacctgccggagcaggcgttttacatggtcggttccatcgaagaagctgtggaaaaagccaaaaaactttaacgccttaatcggagggtgatatggcaatgacttacctcctggacgtcgtcagcgcagagcaacaaatgttctctggtctggtcgagaaaatccaggtaacgggtagcgaaggtgaactgg

SEQ ID NO: 123389 - DNA, 1251 bp, Homo sapiens
tccgccataatcgccgcgcgttttaataagttaggaatggatgcgctcggctgccaggatgccgtttcgctcatagttaaagctgcagtttttgacaagggcacgaagtctactcgcaacgcgacggcgagacaaattttacgcaggaatcaaacagcggtgggcagtgactaaaaaaagcacgatctgatggtttagtaattaaattaatcatcttcagtgataatttagccctcttgcgcactaaaaaaatcgatctcgtcaaatttcagacttatccatcagactatactgttgtacctataaaggagcagtggaatagcgttcgcagaccgtaactttcaggtacttaccctgaagtacgtggctgtgggataaaaacaatctggaggaatgtcgtgcaagacctttcaagccgatcttgccattgtaggcgccggtggcgcgggattacgtgctgcaattgctgccgcgcaggcaaatccgaaaatcaaaaatcgcactaatctcaaaagtatacccgatggagtagccataccgttgctgcagaagggggctccgccgctgtcgcgcaggatcatgacagcttcgaatatccctttcacgatacagtagcgggtggcgactggttgtgtgagcaggatgtcgtggattatttcgtcccccactgcccaaccgaaatgacccaactggaactgtggggatgcccatggagccgtcgcccggatggtagcgtcaacgtacgtcgcttcggcggcatgaaaatcgagcgcacctggttcgccgccgataagaccggcttccatatgctgcacacgctgttccagacctctctgcaattcccgcagatccagcgttttgacgaacatttcgtgctggatattctggttgatgatggtcatgttcgcggcctggtagcaatgaacatgatggaaggcacgctggtgcagatccgtgctaacgcggtcgttatggctactggcggtgcgggtcgcgtttatcgttacaacaccaacggcggcatcgttaccggtgacgggatggggatggcggtaatccacaggggttccggtgtgtgagatggaaatttgttatatataccccaaccgggttggaagggttcgggattcttataaaccaaggttgccggcgtggaaggcggttttttgttaacaaacatggctctctgtttttgcgaaaataccgagtggcccggaaactcctttggggaacccataaacaaaatatggt

SEQ ID NO: 123390 - DNA, 2191 bp, Homo sapiens
cgccaatgtggcggaacgtcgggagcacgccggacgcagcgggcggacaaggaatgggagtcttgccaagtcgtgagggccccgacggcggagccccaggcctcagcggcagggggcgcacacgacccgggccagaatgcgggaccaaaaaacctagcgagcacaggccagcggtgacggggcaccctcctgccgcgggtaggttgcgagctcggcacgccgcgggttgccagttcacgggcccgcccctcttcaagggcctgggaactcacaggatcggctgggagcggtaccaatcgttgcggcctgaggggacccctcgtaaagggcggaaaaggaggtaggttccctagcgcgcggttaattcaaaccgtaaaaaagggggggacgcccagtcgggaccacgcgatgcgagccctccggttacctctgtgagtgcgggcgtaggtgaaacgtactcgtaagggaagcgtctttgcccacgaaatgcccgactgcaacgttatcgacaaagtatccctggtgtatggccagatgaccgagccgccgggaaactgtatgcgcgttgctctgtccggtctgaccatggctgagaaattccgtgacgaaggtcgtgacgttctgctgtttgttgacaacatctatcgttacgccctggccggttaggaaagattcgccactgtggggcggtaagcttccaaccggtaggtattcagccgaccctggcggaaaagatgggcgttctgcaggaacgtatcacctccaccaaaactggttctatcacctccgtacaggcagtatacgtacctgcgaatgacttgactgacccgtctccggcaaccacctttgcgcaccttgacgcaaccgtggtactgagccgtcagatcgcgtctctgggtatctaccccggccgttgacccgctggactccaccagccgtcagctggacccgctggtggttggtcaggaacactacgacaccgcgcgtggcggttagtccattcctgcagcggttttcaggaactgaaggacttcatggcccttcctggctttcggatgaactgtctgaagaagacaaactggtggtagcgcgtgctcgtaagatccagcgcttcctgtcccagccgttcttcgtggcagaagtattcaccggttctccgggtaaatacgtctccctgaaagacaccatccgtggctttaaaggcatcatggaaggcgaatacgatcacctgccggagcaggcgttctacatgggtgatatggcaatgacttaccacctggacgtcgtcagcgcagagcaacaaatgttctctggtctggtcgagaaaatccaggtaacgggtagcgaaggtgaactggggatctactctggccacgcaccgctgctcaccgccattaagcctggtatgattcgcatcgtgaaacagcacggtcacgaagagtttatctatctgtctggcggcattcttgaagtgcagcctggcaacgtgaccgttctggccgacaccgcaattcgcggccaggatctcgacgaagcgcgagccatggaagcgaaacgcgcctcgggcaaagtgaaaccctcgataatgcagtctctgacgccggagaaaattgccgccattttaccgctgcaatttttcccgcaaccggcggattttacgggcccgtatgtgatgttgacatcgcggcgcaataatcgcgcattaagccggtgtgatgatcaaacgctgatgccgggtttagcgattcgcggcattcgccaccgccaccagcaggctggtgtgcgcattctgctcaataatgccattgaacatgtggtcgatggtgagaaagtagaactgacgctgcaaagtggggacacgcttcaggctgatgtggtgatttacggtattggtatcagcgccgacgagccactggctcgcgaggccaaccttgatactgccaatggcattgtcattgatgaggcttgccgcacctgcgatcccgcgatctttgccggtggcgatgtgcccatcacgtcgtcgttgattaatgtggtggacgaaataatccacgacatcctgctcacacaaccagtcgccacccgctactgtatcgtgaaagtgatattcgaagctgtcatgatcctgcgcgacagcggcggagcccccttctgcagcaacggtatggctacgcatcgggtatacttttga

SEQ ID NO: 123391 - DNA, 2322 bp, Homo sapiens
atggaaacacgtcgcgaagagcgtatcgggcagctgctgcaagaattaaaacgcagcgataagttacatcttaaagacgccgccgccctgcttggggtttcggagatgacgattcgtcgcgatctgaacaaccacagtgcgcccgtcgttttgctcggcggctatattgttctggaaccgcgcagtgccagccattacctgttaagcgatcaaaaatcccgcctggtggaagaaaaacgccgggcggcaaaactggctgcgacgctggtagaacccgatcagaccctcttttttgactgtggcaccaccacgccgtggattattgaagcgattgataatgaaatcccttttaccgccgtttgttattcgctaaatacctttctggcgctgaaagagaaaccccattgccgcgcgtttccttgcggtgcaacgccattttcaaacccatcgattttcagcaaacgcgtgaataatttttgccgggatatcgctttttattattcggcgggcgtgcatgtcagtaaaggcgttacctgttttaatcttaagaggtggccggtaaaacaatgggccatgtcgatggcgcaaaagcatgtgttggttgtcgaccacagtaaatttggagaggtgggtccggtgtgcatgggtgacctaaaacgttttgatattgtggtgagagagtgttgcccggaagatgagtatgtgaagtacgcgcagacgcagcgcattaagccggataaagtttcgcgccatccggtgatcataagattaagagaaccagggcttgaaccagtgatggaatttcatcatcccgtcctcccacaacggaccacagaatccgccgtggtccacattgcccatacacgaaaatcgtggcgccctgaacattctgcccctgtgctgatccagacaagcccagtggaaaggggtccccagtacattcagtgttatcaattatcactcacttcagaagagaacaaccaacctgacacacagacaactactaaacctgctcagtacagttctatattgttcttgtccaagtatccaaaagttattgttgatgctccagacaggtcaacccagcggggttggtctagtggacttgccactcaaagcaatgagcaggcctgcactaccaaatgcaacagctgcactgccaactggcaccagaacacaaccaccttcaactccactgctaacccgtctaccttcaagccaccgacttctgctgcactcagggttttgagcctttggactgggaatcactgcgattggtgttttatccgctactggcgcctaacgcctaactggcagcgcttcagaagggttgggcgtacggagcgggccacaacgcataatcgcctgcaggcgtttgggggtcacacacaagggctgtcaccaggcccccgccgatggctccacgagcagcgcttcccaacaacaagtgacaccggcggccatacggctgacgactttcggaaattagatccgtgcattcagggaccgtacggatctcatcggcattcggttaagagtgaagtgaatttcaaggagaaacgttacgctttcgcgccggcggcctcttttcggtatactgtcctgatacgcttttgtgcgcccccgaatacgggccgatttttacttaccggaacacctttacccatgctcagttatcgccacagctttcacgctggcaaccacgccgacgtccttaaacataccgttcagagcctgatcatcgagtcgctgaaagagaaagataaaccgtttctctatctcgacacccacgcaggggccgggcgttatcagttaggcagcgaacatgccgagcgtaccggcgaatatctcgaaggcatcgcccgtatctggcagcaggacgatttgcccgcagaactggaggcgtacatcaatgtggtaaaacacttcaaccgtagcggtcagttgcgttactaccccggttcgccgttgattgctcgcctgctactgcgtgaacaggacagcctgcaactgaccgaactgcacccgagcgattacccgttgttgcgttctgaatttcagaaagatagccgtgcgcgtgtcgaaaaagccgacggtttccagcagcttaaggccaaactgccgccggtttcccgccgtggtttaatccttatcgacccgccgtatgaaatgaaaactgactatcaagcggtggtcagcgggatagcagaaggttacaaacgtttcgccactggctggtattgcgtattgatgcagctcttcatggtaggtcttaattggcatgtttgcagcggctggtactggtgtttctttccggtttag

SEQ ID NO: 123392 - DNA, 603 bp, Homo sapiens
  misc_feature (1)...(603): n = a,t,c or g
gtcaggcgctcctgctggccaaacacaacgcggtggcacgtgaatatcacgaacgcacgctcgataaagacaacgtgttacgtcaatttataaatgatattcggggataattatggcgcagtcgaaactctatccagttgtgatggcaggtggctccggtagccgattatggccgctttcacgggtgctttatcccaagcagtttttatgcctgaaaggcgatctcaccatgctgcaaaccaccatctgccgcttgaacggcgtggagtgcgaaagcccggtggtgatttgcaatgagcagccccgctttattgtcgcgcaccagatgcgtcaattgaacgaactttccgagaacattattctcgaaccggcagggcgaaccacggctcctaccattgcgccggcggcgctggcggcaaatcgtcatagtccggagagcgcgccgttaatgctggtattggcgacggatcatgtgattgccaatgaagacgcggtccgcgcccccgtgaagtaatgccatcccctatcccaaaaaaggcaagttggtgactttcggcattgggctggatgggcgggtacctagatataatatgggnncgtaca

SEQ ID NO: 123393 - DNA, 677 bp, Homo sapiens
gctcgaatgcccagggcgcagtacagcaaattgttcgccccgtgcccgcgccacgtcactgttgctgttgacacatgtgcacggcgaatcccgcgaccgcgcccaggagatggtggacctgctggcgcagtacgagcagcacggcttgcagttaaacagccgcgaattgccggaccatctgccgctgtatctggagtacctggcgcagctgccgcaaagcgaagccgtggaaggtttgaaagatatcgcgccgattctggcattgctgagcgcgcgtctgcaacagcgtgaaagccgttatgccgtgctgtttgatctgctgctgaaactggcgaataccgctatcgacagcgacaaagtggcggaaaaaattgccgacgaagcgcgcgatgatacgccgcaggcgctggatgctgtctgggaagaagagcaggttaaattctttgctgacaaaggctgcggtgattcagcaatcactgcgcatcagcgtcgctttgccggtgccgtcgcgccgcaatatctgaatatcaccaccggaggacagcactaatgcaattcctgaatatgttcttctttgatatctacccgtacatagccggggcggtcttcctgattggtagctggctgcgttatgactacgggcagtacacctggcgcgcggcgtccagccagatgct

SEQ ID NO: 123394 - DNA, 1188 bp, Homo sapiens
atgaacaaagtggccgtggtgccagggatggaggtgccagggatggggtcagagaaggaggatgcatggactcagcagcatggacttccactcaccaaggttgagctggctacagttgctgagtacccagtctgcctgtggcagagattaacacttaagtccccaatatggcagcattcccagggtgatcagtcggatgggtggaaagttgattataatggaccattttcattatggaagggacagcattttgttatcaatggaatagacacttgctctggatgcaaatttgcaattcctgtatgtagtgcttctgccaaactactacctatgagctcacagaatgtctaccatcgtgatattctgcacaggattgattctgaacaaggaactcacttcagagtgaaagaagtgcagcaatgggcccttggtcgtggattttactggtcttactatattagccatcatcctgaagccgctggcttggtagaacaatgcaatggcattttgaagactccatcacagttccagatgggtaggaataccttgcagggctggggcaaggtattgccttctctggaaggctgtgcattctcttcatcaaagtccaacttatgttctgttgtcctaaaagtctttgttccaaaggaaggaatggttccaccaggagacacaacaatgattatactgaactgcaagttaagactgccacctgatgcctctgaatctactggcaagcaaggaagttactgtgctggactacaaggggaaattggacagctgctccacaatagaggtaaggaagaatgtgtctggaatacaggagactgcttaacatatctcttaatattaccaagctctgttattaaagttaaagaaaagccgcaaccccatccgggcaggactattaatggcccagatccttcaggaatgaagacctgggttaccccaccagccggggcggtcttcctgattggtagctggctgcgttatgactacgggcagtacacctggcgcgcggcgtccagccagatgctggatcgcaaagggatgaacctggcgtcgaacctgttccatatcgggattctggggatttttgtcggtcacttcttcggtatgctgacgccgcactggatgtatgaagccatgacttatggttcatgtgacacagataacgcaaatgtttga

SEQ ID NO: 123395 - DNA, 1401 bp, Homo sapiens
atgagcgcggtcgtcgctgcggagctagcacgcgtacaagatacacatcgcgaaaggtccttggtaacgacccgtgaacggatcttaatttccggaaacggtgcttaccaggcacagcacgcattcggcactgaaagtacgggacttgacgccggccacccttacacccgtcagtatgatcttgatctgctggctgaacttcgccgtgacaaccaggcaatgcgtgtaatcgccatcgccgcggaaagcagcgacatcgtcgctgccggtccacatatcatcctgccaccgtcacgtcactttatcgacgttgagcaggcattttgcttcctgatgtacgcccagacgtttgcactgatgcagtcgctgcacatgggcaatacgccggataccccatcagccagtggcaccgttaaccgcgtgcgtagtgggagagggcgtcatgcggtgcagtcacgcgccgtcagatgctggccttgcccggtgctcgtagggtctcacaggagcctgcgaccagacgtacgcgtaggcgtgctgactggttggagtgtggagtgggtggaggtgggtgaggcgatgtggggcggtggtggggtggatgtgtctgtggtttgtggtcgtggctgtggtggtgtgggtagtgtgttttgtgttggttgtcggtgtggactggtcgtttgtcgtagacccgaatctgaaaccgctcaggcctatgtggcaagcggcgaatattactggaacagcggtatgttcctgttccgcgccggacgctatctcgaagaactgaaaaaatatcgcccggatatcctcgatgcctgtgaaaaagcgatgagcgccgtcgatccggatctcaattttattcgcgtggatgaagaagcgtttctcgcctgcccggaagagtcggtggattacgcggtcatggaacgtacggcagatgctgttgtggtgccgatggatgcgggctggagcgatgttggctcctggtcttcattatgggagatcagcgcccacaccgccgagggcaacgtttgccacggcgatgtgattaatcacaaaactgaaaacagctatgtgtatgctgaatctggcctggtcaccaccgtcggggtgaaagatctggtagtggtgcagaccaaagatgcggtgctgattgccgaccgtaacgcggtacaggatgtgaaaaaagtggtcgagcagatcaaagccgatggtcgccatgagcatcgggtgcatcgcgaagtgtatcgtccgtggggcaaatatgactctatcgacgcgggcgaccgctaccaggtgaaacgcatcaccgtgaaaccgggcgagggcttgtcggtacagatgcaccatcaccgcgcggaacactgggtggttgtcgacgggaacggcaaaagtcaccattga

SEQ ID NO: 123396 - DNA, 2065 bp, Homo sapiens
tgctgcccaaacacaacacggtggcacgtgaatatgccgaacgcacgctcgataaagagaacgtgttacgtcaatttataaatgatattcggggataattatggcgcagtcgaaactctatccagttgtgatggcaggtggctccggtagccgcttatggccgctttcccgcgtactttatcccaagcagtttttatgcctgaaaggcgatctcaccatgctgcaaaccaccatctgccgcctgaacggcgtggagtgcgaaagcccggtggtgatttgcaatgagcagcaccgctttattgtcgcggaacagctgcgtcaactgaacaaacttaccgagaacattattctcgaaccggcagggcgaaacacggcacctgccattgcgctggcggcgctggcggcaaaacgtcatagcccggagagcgacccgttaatgctggtattggcggcggatcatgtgattgccgatgaagacgcgttccgtgccgccgtgcgtaatgccatgccatatgccgaagcgggcaagctggtgaccttcggcattgtgccggatctaccagaaaccggttatggctatattcgtcgcggtgaagtgtctgcgggtgagcaggatatggtggcctttgaagtgggcaaaaggagtcgaccaacgccagcgtacaagccaaactccgggtccgccccgacccaccacggccccggcccgccctcgcccgccggccccaaacaacacgacatccacaaacttacgcccgccaccccaccagacacctacggaatccacgcggctaaccaccgggtgtcgacgaacgtgcgtgaaattgacgagtgcctgaacgaccaccatgctctgttcacgattcgacaaattgcctttgacatcttcggcggtgacttcaatcggccaggtgttatcggtttctggcgtactggtgaaccgaacgatattgttgttgcgatccaccagatcataacggctgcctgcaaggctacgccgtgcagcgacttcattcgggtcaagctgtttctgcattgcgctgccaggttgccaggtaaaatcgacggcaaaacgggtgtcattttcgccctgtttaccctggcgttgctccgcgctgaaggtcatcagcgggaagggggtataggccaattcatcgccataaatactggtcatagaccagtttaccgccaaggtgcggccagcggggtagccagctttctgcgcgtacatcccagccaattggcgggcgtgcttcataatcgttgtccagttcagaacaagaagcagaagcagaagcagaagcaagaagaagaagaagaagaagaagaagaagaagaagaagaagaagaagaggaagaggaagaggaagaggaagaggaagaagaggaagaaggagaaggggaacgggaagggggagaaggggaacgggaaggggaagaaggggaacatgaccggtttagtacacataagccccaggcaaaagatgaaacgatgaagtacatacgatctaagcctgacaaccgaatcccggagagacactatatcgcaggtagaccacgagaactcgtatcaactcaccgctatgtgtcagcccgatattacgaagcaacaacgtacaaggacaatgatgctccaaggacaaagacgaagagaatgaagaagaagaagaagaagaagaagaagaagagcaagaagaacaagaagacccaaaccaggagatacattacggtcgacattgaggccgccagcacggcgtgtaccgcaaacagcaacggtgaaatgaacaggaaggtaaattccagcggttcggtaattcccaccagcatggcggttaaggttgcgggaatcagcaagcccgccacttttacccgattttccggtgcggcagtgaagtacatcgctaaagaaatgcccacggcaccaaagatttttgagttaccgtgcagggcaaaaccgccttccgggaacaacgatttcagcggctcggcgctcaaactgaactcttgcagatgtgcgcccagtacatctgaatgccgccttcaacagctgccggaccaaagataa

SEQ ID NO: 123397 - DNA, 885 bp, Homo sapiens
atggatccgctcgatgcccaggcgcagtacagcgaactgttcgaccgtggccgcgccacgtcactgttgctgtttgaacatgtgcacggcgaatcccgcgaccgcggccaggcgatggtggacctgctggcgcagtacgagcagcacggcttgcagttaaacagccgcgaattgccggaccatctgccgctgtatctggagtacctggcgcagctgccgcaaagcgaagccgtggaaggtttgaaagatatcgcgccgattctggcattgctgagcgcgcgtctgcaacagcgtgaaagccgttatgccgtgctgtttgatctgctgctgaaactggcgaataccgctatcgacagcgacaaagtggcggaaaaaattgccgacgaagcgcgcgatgatacgccgcaggcgctggatgctgtctgggaagaagagcaggttaaattctttgctgacaaaggctgcggtgattcagcaatcactgcgcatcagcgtcgctttgccgccggggcggtcttcctgattggtagctggctgcgttatgactacgggcagtacacctggcgcgcggcgtccagccagatgctggatcgcaaagggatgaacctggcgtcgaacctgttccatatcgggattctggggatttttgtcggtcacttcttcggtatgctgacgccgcactggatgtatgaagcctggctgccgattgaagtgaaacagaaaatggcaatgtttgctggtggtgccagcggcgtgctgtgtctgattggcggcgtgctgttgctgaaacgtcgtctgttcagcccacgcgtgcgtgcaaccactaccggagcggatatcctgatcctgtcgctgctcgttatccatgcgcgctgggcctgttga

SEQ ID NO: 123398 - DNA, 2013 bp, Homo sapiens
atggatgacaatataacgtataccacatttatctgcaacccgctgaatctgtcgccgcagcgccgcatgttgatcatcaccggtccgaacatgggcggtaaaagtacctatatgcgccagaccgcactgattgcgctgatggcctacatcggcagctatgtaccggcacaaaaagtcgagattggacctatcgatcgcatctttacccgcgtaggcgcggcagatgacctggcgtccgggcgctcaacctttatggtggagatgactgaaaccgccaatattttacataacgccaccgaatacagtctggtgttaatggatgagatcgggcgtggaacgtccacctacgatggtctgtcgctggcgtgggcgtgcgcggaaaatctggcgaataagattaaggcattgacgttatttgctacccactatttcgagctgacccagttaccggagaaaatggaaggcgtcgctaacgtgcatctcgatgcactggagcacggcgacaccatggcctttatgcacagcgtgcaggatggcgcggcgagcaaaagctacggcctggcggttgcagctctggcaggcgtgccaaaagaggtcattaagcgcgcacggcaaaagctgcgtgagctggaaagcatttcgccgaacgccgccgctacgcaagtggatggtacgcaaatgtctttgctgtcagtaccagaagaaacttcgcctgcggtcgaagctctggaaaatcttgatccggattcactcaccccgcgtcaggcgctggagtggatttatcgcttgaagagcctgggtaaaaccatgccatctacacgctatcaaaaaatcaatgcccatcactatcgccatatatgggtcgttggtgatattcatggtgaatatcagttattacaatcccgcttacatcaactctcttttttccccaaaatcgacttacttatttctgtcggcgataatattgatcgtggaccggagagtcttgacgtcctgcgcctgctaaaccaaccctggtttacgtcggttaaaggcaaccacgaagcgatggcgcttgaggcattcgaaactggcgatggcaatatgtggcttgccagcggtggtgactggtttttcgatttaaatgattcagagcaccaagaggctatagatctgttgctgaaattccatcaccttccacatattattgaaatcactaacgacaacataatatatgccatcacaacatgcgtaggtaatgctcgccgcgcacacgccgtgcacttctgcggtgacgtagctcgactcctgacttgccagataaacatatacaggggccagttccgccggttgccccgcacgtttcatcggcgtttgctgaccaaactgcgggatcttatcctgcgtttgtccgccggaaatttgcagtgctgtccagatcgggcctggcgcgacaatattcacccgaatacctttctccgcgacctgttttgccaagccacggctgtagttcagaatcgccgccttcgtagccgcataggggatcgcttcctgggagcggtggaacgccgcttcggcaacgatcttccgtcgtctccagtggagtggctgacggataatggttcatgctaccgggctaatgaaacacgccagttcgcccggatgttgggacttgaaccgaagaacacggcggtgcggagtccggagagtaacggaatagcagagagcttcgtgaaaacgataaagcgtgactacatcagtatcatgcccaaaccagacgggttaacggcagcaaagaaccttgcagaggcgttcgagcattataacgaatggcatccgcatagggcaaatccaattacctatcaggcagtttgcgccaatcactaccggaccctgaataacggcaccatgacaaatacgggtattcgcgccgataacaacttcacctgcagtttcatcaataattacctggtctgcaatctgaatatttttctctttaacattaagcttcagatagtttttcagttcctgtga

SEQ ID NO: 123399 - DNA, 3097 bp, Homo sapiens
atgcggggcgcttcttgccgcactggcattcatcgcttttcaggcacaggcggtgaacgtcaccgtggcgtatcaaacctcagccgaaccgggaaagtggctcaggccgacaacacctttgctaaagaaagcggacaaccgtggactggccggaccagcatcgtgcgggcgctggcttcaggcgacgtgcaaatcggcaacctcggttccagcccgttagcggttgcagccagccaacaggtgccgattgaagtcttcttgctggcgtcaaaactgggtaactccgaagcgctggtggtaaagaaaactatcagcaaaccggaagatctgattggcaaacgcatcgccgtaccgtttatctccaccacccactacagcctgctggcggcactgaaacactggggcattaaacccgggcaagtggagattgtgaacctgcagccgcccgcgattatcgctgcctggcagcggggagatattgatggtgcttatgtctgggcaccggcggttaacgccctggaaaaagacggcaaggtgttgaccgattctgaacaggtcgggcagtggggcgcgccaacgctggacgtctgggtggtgcgcaagattttgccgagaaacatcctgagcgccatcgatgctcagcaaccgtacattgctaacccagacgtgtggctgaaacagccggaaaacatcagcaaactggcgcgtttaagcggcgtgcctgaagctgcccgtaagcaccacggttttaccagcaaacgggctgtcaatctcttccgcgttgataacgatcggcgcaggccagtgaacaccttccgccaacagctcgctgatgacattgcggttgctttcttcggcaaagaagttgtgaacgtgggatgcaacgacaatgccaacatcaggcaccttttgcagctcttcaatcgaagcggcttccagcgcttccagcgtgccgaaatatgccgccagacctgctgcggtggcctcgccgacttcacggatgccaagtgcatagaggaagcgagcaaaggtggtttctttcgctttttccagcgcgttaaccacgttttgtgccgattttggccccatacgctccagtccggtcagtttgcctgcggtgagtttgaacagatctgccggagtatggacatattctttttcaaccagctgatcgatgattttgtcgcccattccgtcaacatccatcgcacggcgggaaacaaagtgtttcagcgactctttacgctgcgcaccgcaaatcagggcaccggtacagcgggcaaccgcttcaccttccacacgctcaacgtcagaaccacataccggacaatgcgtcgggaatacaacctcacggaagagattttatgcgcggcggacgggttactcgacgtgatggagcgaccactggatgcgcgtattctcggcaaacagatcatccgcgaaattctgtactacgtgctgaccggaccttgcggcggcgcgttactggcgctggtcagtcgccagactcacttcagtctgattagccgcgtgctgaaacggattgagaataaatacaccgaaaacctgagcgtcgagcaactggcggcagaagccaacatgagcgtatcggcgttccaccataattttaagtctgtcaccagtacctcgccgttgcagtatttgaagaattaccgtctgcataaggcgcggatgatgatcatccatgacggcatgaaggccagcgcacgagcgatgcgcgtcggctatgaaagcgcatcgcaatttagccggatgaacctggcgtcgaacctgttccatatcgggattctggggatttttgtcggtcacttcttcggtatgctgacgccgcactggatgtatgaagcctggctgccgattgaagtgaaacagaaaatggcaatgtttgctggtggtgccagcggcgtgctgtgtctgattggcggcgtgctgttgctgaaacgtcgtctgttcagcccacgcgtgcgtgcaaccactaccggagcggatatcctgatcctgtcgctgctcgttatccagtgcgcgctgggcctgttgaccattccgttctccgctcagcatatggacggtagcgagatgatgaaactggttggctgggcgcagtcggtggtgaccttccacggtggcgcttctcaacacctcgatggtgtggcgtttatcttccgtctgcacctggtgctggggatgacgttattcctgctgttcccgttctcgcgtctgatacacatctggagcgtaccggtggagtatctgacacctggttctcttaatcttctgataaccggatggcgcgaaacgtcatccggttatacgtcattaatacatcaacttaatgcgctgcgtctgcgcgtacttcacatactcatcttccgggcaacaatcgctcaccacaatatcaaagcgtttcaggtcacccatgcgcgccggacgcaccttgccaaatttactgtggtcgacaaccagcacatgcttttgcgccatcgacatggcccagtgttttaccggcaactcttcaagattaaaacaggtaacgcctttactgacatgcacgcccgccgaataataaaaagcgatatcccggcaaaaattattcacgcgtttgctgaaaatcgatgggtttgaaaatggcgttgctggcgtgaaattcaccaccgcaaagaaacgcgcggcaatggggtttctctttcagcgccagaaaggtatttagcgaataacaaacggcggtaaaagggatttcattatcaatcgcttcaataatccacggcgtggtggtgccacagtcaaaaaagagggtctgatcgggttctaccagcgtcgcagccagttttgccgcccggcgtttttcttccaccaggcgggatttttgatcgcttaacaggtaatggctggcactgcgcggttccagaacaatatagccgccgagcaaaacgacgggcgcactgtggttgttcagatcgcgacgaatcgtcatctccgaaaccccaagcagggcggcggcgtctttaagatgtaacttatcgctgcgttttaattcttgcagcagctgcccgatacgctcttcgcgacgtgtttccat

SEQ ID NO: 123400 - DNA, 2458 bp, Homo sapiens
atggaaacacgtcgcgaagagcgtatcgggcagctgctgcaagaattaaaacgcagcgataagttacatcttaaagacgccgccgccctgcttggggtttcggagatgacgattcgtcgcgatctgaacaaccacagtgcgcccgtcgttttgctcggcggctatattgttctggaaccgcgcagtgccagccattacctgttaagcgatcaaaaatcccgcctggtggaagaaaaacgccgggcggcaaaactggctgcgacgctgcccggggaaagcgatggcccctcgatccggatctcaatgtattcgcgtgagaagaagcgtttctcgcctgcccggaagagtcggtggattacgcggtcatggaacgtacggcagatgctgttgtggtgccgatggatgcgggcttggagcgatgttggctcctggtcttcattatgggagatcagcgcccacaccgccgagggcaacgtttgccacggcgatgtgattaatcacaaaactgaaaacagctatgtgtatgctgaatctggcctggtcaccaccgtcggggtgaaagatctggtagtggtgcagaccaaagatgcggtgctgattgccgaccgtaacgcggtacaggatgtgaaaaaagtggtcgagcagatcaaagccgatggtcgccatgagcatcgggtgcatcgcgaagtgtatcgtccgtggggcaaatatgactctatcgacgcgggcgaccgctaccaggtgaaacgcatcaccgtgaaaccgggcgagggcttgtcggtacagatgcaccatcaccgcgcggaacactgggtggttgtcgcgggaacggcaaaagtcaccattgatggtgatatcaaactgcttggtgaaaacgacgtccatttatattccgctgggggcgacgcattgcctggaaaacccggggaaaattccgctcgatttaattgacgtgcgctccggctcttatctcgaagaaaatgatgtggtgcgtttcgcggatgacctggacggaggagagggacgccgccagcgcaatggcaggtgccgtgtttcgccctgccggttcgagaataatgttctcggtaagtttgttcagttgacgcagctgttccgcgacaataaagcggtgctgctcattgcaaatcaccaccgggctttcgcactccacgccgttcaggcggcagatggtggtttgcagcatgaaaacccctcagatggaaaagatcttgaagatgcgacccagaccgttctgctgccaggcgatttaagcgatgagaaatttgcccgttcgctggttcacgaagcgcacaaggcgttaggcgggctggatattatggcgctggtcgccgggaaacaggttgccattccggatattgcagacctcaccagcgaacagtttcaaaagacctttgccattaacgttttcgcgctgttctggctaacccaggaagcgatccccctgctaccgaaaggtgcaagtatcatcaccacttcgtcaatccaggcataccagccaagtccgcatttactggactatgcggctacgaaggcggcgattctgaactacagccgtggcttggcaaaacaggtcgcggagaaaggtattcgggtgaatattgtcgcgccaggcccgatctggacagcactgcaaatttccggcggacaaacgcaggataagatcccgcagtttggtcagcaaacgccgatgaaaccgtcgctttgccggtgccgtcgcgccgcaatatctgaatatcaccaccggaggacagcactaatgcaattcctgaatatgttcttctttgatatctacccgtacatagccggggcggtcttcctgattggtagctggctgcgttatgactacgggcagtacacctggcgcgcggcgtccagccagatgctggatcgcaaagggatgaacctggcgtcgaacctgttccatatcgggattctggggatttttgtcggtcacttcttcggtatgctgacgccgcactggatgtatgaagcctggctgccgattgaagtgaaacagaaaatggcaatgtttgctggtggtgccagcggcgtgctgtgtctgattggcggcgtgctgttgctgaaacgtcgtctgttcagcccacgcgtgcgtgcaaccactaccggagcgaatatccggatcctgtcgctgctcgttatccagtgcgcgctggccctgttgaccattccgttctccgctcagcatatggacggtagcgagtatgatgaaactggttggctgggcgcagtcggtggtgaccttccacgtggcgcttcacaacacatggatgtttatcacaccatggatgtcatgtgggatgaacacagtgattacacagccatgttgaagtggagctgtgatacacagctgcgcacagcaagcacagaacagtacacagagcagcaagcagagttcaagtgtagcagagtgaagcag

SEQ ID NO: 123401 - DNA, 720 bp, Homo sapiens
ttagtctgtgtattcggctccatttactgccttttcagcccgcgtaacccgaaacatgtggccacctttgggcatatgtttggccgtcttgcgccgctgtttggcctttatttcaaggtgcatgtcctcggctaacgttcggtcaccccagtcactgatattgtgaagctcctggagttcactcgcttgcgccttcctggctacacgaaatccatagagtaaacaaacatcacctttcagtgcgctattgcagcagcctgaaagaatagtgtatcgaccccccgcggcggcggcaccggcactaacggtcaggcgctcaaccaggggattattgttgatatgtcccgccatatgaaccgcatcatcgaaattaaccctgaagagggctgggtgcgcgttgaggccggggtgataaaagatcaactcaatcagtacctgaaaccgttcggctacttttttgcgccggaactttcgaccagcaaccgggcaacgctcggtgggatgatcaataccgatgcatccggtcagggatcgttggcgtacgcgcggtgttgttggggggcgatattctcgatacgcaacctttacccgtcgaattggcggaaacgctgggtaaatctgctgaatgatatgcacacgatctggagcgtcttggtggatgttgccacagaaaggaattgtcgttgttactacgataatgaacggatgctgacacaacat

SEQ ID NO: 123402 - DNA, 4653 bp, Homo sapiens
atggtgaccggcattcttccgctgttgattagcctgctggttatcatgaacgcactgattaattttatcggtcagcatcgtattgaacgttttgctcaacgttgcgccggtaaccctgtttcccgttacctactgttaccgtgcattggcacgtttgtcttttgcaatccgatgaccctaagcctgggtcgctttatgccggaaaagtacaaacccagctactacgcggcggcctcttatagctgccactcaatgaatggcctcttcccccatatcaaccctggcgaactgtttgtttatcttggcattgccagcggtctgacaacgctgaacctgccacttggcccactggcgtgcagcagctgctggagatcccactacggaatagtcgcgcgcatcttccagcgaaacgccacggttgaggaacgctggcaccaccacttcatcgttaaagatttgcggaataccggtaccgaagcgaatggtttcggcggttttcatcaggaacggcgtgtcgatcaaggcgttagtgcgcacgccgaggttcggttgcggcgtcaaggcaaaggaacgaaagcacgttcaccgcgctacgtccgttctcggttaacccgccgagcagtgcggtatagtgatcatcccaccgagcgttgcccggttgctggtcgaaagttccggcgcaaaaaagtagccgaacggtttcaggtactgattgagttgatcttttatcaccccggcctcaacgcgcacccagccctcttcagggttaatttcgatgatgcggttcatatggcgggacatatcaacaataatcccctggttgagcgcctgaccgttagtgccggtgccgccgccgcggggggtcgatacactattctttcaggctgctgcaatagcgcactgaaaggtgatgtttgtttactctatggatttcgtgttgcaggaaggcggcaagcgagtgaactccaggagcttacaatagccgagcgcgtacgggcggagctggcgcgttttctcgaaaacccggcagatccgcgttatctggcggcgagctggcaggcaggccataccggcagtggcctgcattatcgccgttatcctttctttgccgccttgcgtgaacgcgcaggtccggtaacctgggtgatgatgatcgcctgcgtggtggtgtttattgccatgcaaattctcggcgatcaggaagtgatgttatggctggcctggccattcgatccaacactgaaatttgagttctggcgttacttcacccacgcgttaatgcacttctcgctgatgcatatcctctttaacctgctctggtggtggtatctcggcggtgcggtggaaaaacgcctcggtagcggtaagctaattgtcattacgcttatcagcgccctgttaagcggctatgtgcagcaaaaattcagcgggccgtggtttggcgggctttctggcgtggtgtatgcgctgatgggctacgtctggctacgtggcgaacgcgatccgcaaagtggcatttacctgcgacgtggggttattatctttgcgccgatctggattgttcgccgatggtttgaaatgacgccgacccagtggagcaactatttcttcgagaacctgttcaagtatgagtgggtacagacccgcagcccggctggcgcaatccagttcgaagcggtagacgcaccggaaattatcccggatccgtttgatccgtcgaagaaacgtaaaccgacaatgctggtgaccgacctgacgctgcgttttgatcctgagttcgagaagatctctcgtcgtttcctcaacgatccgcaggcgttcaacgaagcctttgcccgtgcctggttcaaactgacgcacagggatatggggccgaaatctcgctacatcgggccggaagtgccgaaagaagatctgatctggcaagatccgctgccgcagccgatctacaacccgaccgagcaggacattatcgatctgaaattcgcgattgcggattctggtctgtctgttagtgagctggtatcggtggcctgggcatctgcttctaccttccgtggtggcgacaaacgcggtggtgccaacggtgcgcgtctggcattaatgccgcagcgcgactgggatgtgaacgccgcagccgttcgtgctctgcctgttctggagaaaatccagaaagagtctggtaaagcctcgctggcggatatcatagtgctggctgatctgtgccaagaaactgcctggctgcctccaagtggtgggggagctgctggctccacctggatctgggggccttctatcgccttctgggaacaggaagcaggttcccatctgatagatataaaggtctgtcagctgcataaatttggtggcagtagtctggctgatgtgaagtgttatttgcgtgtcgcgggcattatggcggagtactctcagcctgacgatatgatggtggtttccgccgccggtagcaccactaaccagttgattaactggttgaaactaagccagaccgatcgtctctctgcgcatcaggttcaacaaacgctgcgtcgctatcagtgcgatctgattagcggtctgctacccgctgaagaagccgatagcctcattagcgcttttgtcagcgaccttgagcgcctggcggcgctgctcgacagcggtattaacgacgcagtgtatgcggaagtggtgggccacggggaagtatggtcggcacgtctgatgtctgcggtacttaatcaacaagggctgccagcggcctggcttgatgcccgcgagtttttacgcgctgaacgcgccgcacaaccgcaggttgatgaagggctttcttacccgttgctgcaacagctgctggtgcaacatccgggcaaacgtctggtggtgaccggatttatcagccgcaacaacgccggtgaaacggtgctgctggggcgtaacggttccgactattccgcgacacaaatcggtgcgctggcgggtgtttctcgcgtaaccatctggagcgacgtcgccggggtatacagtgcccgaccgcgtaaagtgctgaatcgcgaaaaagtagatttagtcatcagcgacctgcggatggatgaaatggacggtatgcagctgtttgctgaaatccagaaagtgcagccgggaatgccggtaattattcttaccgcgcatggttctattcccgatgccgttgctgcaacacagcagggcgtttttagtttcctcaccaagcctaatgcagcttgctgctgtcgatctagaggatcccctaagtccgggattcaactggctgaactggacgagctggcagctgcggtcgctgaactaccgcgtttacgtctgcgcgggttgatggcaatccctgcgcctgagtcagaatatgtaaggcagtttgaagttgcacgccaaatggctgtagcatttgccggactgaaaacgcgctacccgcatatcgacacgctctctctgggaatgtcggacgatatggaagccgccattgcggcaggtagcacgatggttcgtatcggcactgcaatttttgatgtaattgtcatcaaaggcgggaatactgttaagattcatagattacctctcagtgtgaaacggaaggttgtgatgaaaccggcaagagtccctcaaactgtcgtggctcctgattgctggggcgatttgccctggggaaagctttatcgcaaggcgctggagcgccagctcaacccgtggttcactaaaatgtatggttttcatctgcttaagattggcaatttaagcgcagaaatcaattgcgaagcgtgcgcggtttctcatcaagtgaatgtttctgcgcaaggaatgcccgtccaggtacaggcggacccacttcatcttccttttgccgataaatccgttgatgtttgtctactggcacatacattgccgtggtgcaccgatccgcatcgtttattgcgtgaagccgatcgggtattgattgatgatggctggctggtcattagtggcttcaatcccatcagttttatgggattacgcaaacttgtgccggtattgcgcaaaacctcgccctataacagccggatgtttactctgatgcggcagctggactggctctctttgttgaattttgaagtgctacacgccagccgtttccacgttctcccgtggaacaaacacggaggaaaactattgaatgcgcatattcctgcgcttggttgcttacaacttattgttgcccggaaacggactattcctttaacgctaaatccgatgaaacagagtaaaaacaagccacgaattcgccaggcgctttcctattccctgagacacaacaatattgaaattaggccaattaataaccctataatggcctctaagtgttcaaatggaaagaagtgtcacacatctctcactttaaatcataagctggaaatgattaagcttagtgatgaaggcatattgaaagctgagataacagtttcaggcaaccagtcaccctcagacttttccagcctagagatgggcaataggctaaagggtgcaggactgatttttgcccacctcttgttccacgtttccaatgggctactggacacgcgccaccggctgatggttactacatctcctctggtcattattatccagaccactgaaaatatctcctaa

SEQ ID NO: 123403 - DNA, 819 bp, Homo sapiens
ctgctgctcgactctagaggatcttttgcaaacgtaacaataccggccaggtggcgataaccaccgtaccggcccatgcaaagccgagaataaagggtttgaacaaatccacagacatgccacaatcatgatggctaaaaacagcaccgaaagcagaatttgtgcgacatccctgggctgacgaacatttaccataactacttttcaccttttttgtgcgtcaaatcgtcgacgcgacgtgaacacgcgaaactcacctgcataatgatgagcaatttcagcggtttttaacaggccgattctgcccttaattctgatgggcgtgttagaaaaaaatgtggtacaacaactcaggcaacacgcaaacgatttactcgtcgtatttcaagttgcatgtgctgcggctacgttcgttcaccccagtcacttactattgtaagctcctggagttcactcgcttgccgccttcctgcaacacgaaatccatagagtaaacaaacatcacctttcagtgcgctattgcagcagcctgaaagaatagtgtatcgacctacatcacagaccgcaggaaagggtcaatataatgattccacagatttcccaggcacccggcgtcgttcaactggtgcttaattttttgcaagagctggagcaacaaggttttaccggcgatacggcgacaagttatgccgatcgtctgacaatgtcgaccgacaacagtatttaccaacttctccccgatgcggtggtatttccgcgttcaaccgcagatgtggcgctgatcgcccgtcttgccgcgcaggaacgctattcatcgct

SEQ ID NO: 123404 - DNA, 768 bp, Homo sapiens
  misc_feature (1)...(768): n = a,t,c or g
atgcaggaatggggtcgatacactattctttcaggctgctgcaatagcgcactgaaaggtgatgtttgtttactctatggatttcgtgttgcaggaaggcggcaagcgagtgaactccaggagcttacaatagggtaccgagctcaaaaaaatagggtttccagctggtgttactgccattttcggcaaatggcaaaagcccagcatattaaaggttttctaaatcgtttgcggaagacggcgaaaaagacgngggatttcctcacccgtatgccgaagctgggtatgacaatggtgggcgtcgatccggcgctggtactttgttatcgcgatgaatataaactggcgctgggcgaggagcgtggcgagtttaacgtcttactggcgaatgaatggctggcaagcgcacttgagtcacagccagtggctacagtcagcggtgaatcatggtatttctttggtcactgtaccgaagttaccgccttgccgggtgcgccagcacaatgggccgcgatatttgcccgttttggcgcgaaactggaaaatgtcagcgtgggttgctgcggcatggcagggacttacggacatgaagcgaaaaaccatgaaaattcgctcgggatctatgagttatcctggcatcaggctatgcagcgactgccgcgtaaccgctgtctggcgaccggatattcctgccgtagccaggtaaaacgggttgaaggcacgggggtacgccatcctgtgcaggctttactggagattattaaatga

SEQ ID NO: 123405 - DNA, 1713 bp, Homo sapiens; identical to SEQ ID NO: 123385

SEQ ID NO: 123406 - DNA, 2562 bp, Homo sapiens
atggccacctcctccccacgaccgattctggttatcaccagcggcaggcagcttccctcggcgagggtcctcttgatggctctgcagacaggacgggggctctctgaagaggggagtccatgccccagctccttccaccccctgactgactccggtgcttccccatatggtcctgttgtgctgtcgaatcgtcagttgtacaataaggaccaatcaccggatgcatcatccagaccatggacggtgcagtcaatcaccctcagtcccctgcaaggtctgaggcttgctgggagccttcccaagcctgatggccttcacacttctaaggccacagcattgagtgcccagggcctgagctccggtccctgctgcacaggcccattcaggcaatcggctcaacaaggtggcccagtcacaaacaagagagactggcttcaacaaaaaggagaaggtgctggctcccaaaatgtaaaagtgttggactgggctagcttcagccatggctggatccagcagctaatgagaaaactacagcccagagagggaagtaactttgctgaaataagtaagtctatgactgacgccaagaagtcctgccttcctcgctacgtgtacctcgccagtatttttacagactccccacttctcttcctcgtctccttccacatgcccttcaaatgtccagccctggtcaaactgacccgctcacaagtctctaagacactgctgggtcaagcctcagtgcgtttgcccaggcccagttcaacagtcacttccttgacgcctcataatggtcaccactgcctgcctatctctgctgctgcccttaccacagacaccgtggacagcagctcgtggctgtgccccccacgcctccgcttgctgctgccagccggcctccacgaacacttctactgtctcctgacctctccacagccagaggacacgagggacgccccttgcagatacttccaatgtgctgactgctggcaccagaggacagtgctgcccccatcccgccctggctccatgagggcaaggggactgtgcgggcggcgttctggtccggcaatgctaccggcagaggtgcttaaacaggctcaacaggaactgcgcgactggaacggtcttggtacgtcggtgatggaagtgagtcaccgtggcaaagagttcattcaggttgcagaggaagccgagaaggattttcgcgatcttcttaatgtcccctccaactacaagattgaaaagcgcttcctgcgtgaatcccggtgcttaacttctgggtctgtacatattcgcgacaaagagtgcgcactgtgttttaccaacggtaaaggcgcaaccaagaaagcggcgctggcttctgcactcggtgaatatttcgagcgtctctcaaccaactacttttttgcggacttctggctgggcgaaaccatcgccaacggtccgttcgtgcattatcccaacgaaaaatggttcccactgaccgaaaatgacgatgtgccagaagggctgctcgatgaccgtctgcgcgcgttttatgatccggagaatgaactgaccggcagcatgctgattgacctacaatccggtaacgaagatcgtggtatttgcggcctgccgtttacgcgtcagtccgacaatcagaccgtttatattccgatgaatatcattggtaacctgtacgtctccaacggtatgtccgcaggtaatacccgcaacgaagcacgcgttcagggattgtctgaagttttcgaacgctacgtgaaaaaccgcattattgctgaaagcatcagcctgccagagatcccggcagacgtgctggcgcgttacccagcagtagttgaagccatcgacacgctggaagcggaggagtacatctatccggcaatgcgtccgctggcggcagctctttgtctgggtagcaatgatattgtgctgaccggtaggccgcgtatgaaagaacgcccgattggtcatctggtggatgcgctgcgcctgggcggggcgaagatcacttacctggaacaagaaaattatccgccgttgcgtttacagggcggctttactggcggcaacgttgacgttgatggctccgtttccagccaattcctcaccgcactgttaatgactgcgcctcttgcgccggaagatacggtgattcgtattaaaggcgatctggtttctaaaccttatatcgacatcacactcaatctgatgaagacgtttggtgttgaaattgaaaatcagcactatcaacaatttgtcgtaaaaggcgggcagtcttatcagtctccgggtacttatttggtcgaaggcgatgcatcttcggcttcttactttctggcagcagcagcaatcaaaggcggcactgtaaaagtgaccggtattggacgtaacagtatgcagggtgatattcgctttgctgatgtgctggaaaaaatgggcgcgaccatttgctggggcgatgattatatttcctgcacgcgtggtgaactgaacgctattgatatggatatgaaccatattcctgatgcggcgatgacctttagggcgctgtga

SEQ ID NO: 123407 - DNA, 1416 bp, Homo sapiens
cgccaatgtggcggaacgtcgggagcacgccggacgcagcgggcggacaaggaatgggagtcttgccaagtcgtgagggccccgacggcggagccccaggcctcagcggcagggggcgcacacgacccgggccagaatgcgggaccaaaaaacctagcgagcacaggccagcggtgacggggcaccctcctgccgcgggtaggttgcgagctcggcacgccgcgggttgccagttcacgggcccgcccctcttcaagggcctgggaactcacaggatcggctgggagcggtaccaatcgttgcggcctgaggggacccctcgtaaagggcggaaaaggaggtaggttccctagcgcgcggttaattcaaaccgtaaaaaagggggggacgcccagtcgggaccacgcgatgcgagccctccggttacctctgtgagtgcgggcgtaggtgaaacgtactcgtgagggtaacgacttctaccacgaaatgaccgactccaacgttatcgacaaagtatccctggtgtatggccagatgaacgagccgccgggaaaccgtctgcgcgttgctctgaccggtctgaccatggctgagaaattccgtgacgaaggtcgtgacgttctgctgttcgttgacaacatctatcgttacaccctggccggttaggaaagattcgccactgtggggcggtaagcttccaaccggtaggttatcagccgaccctggcggaagagatgggcgttctgcaggaacgtatcacctccaccaaaactggttctatcacctccgtacaggcagtatacgtacctgcggatgacttgactgacccgtctccggcaaccacctttgcgcaccttgacgcaaccgtggtactgagccgtcagatcgcgtctctgggtatctacccggccgttgacccgctggactccaccacccgtcaactggacccgctggtggttggtcaggaacactaccacaccgcgcgtggcggttagtccattcctgcagcggttttcaggaactgaaggacttcatggcccttcctggctttcggatgaactgtctgaagaagacaaactggtggtagcgcgtgctcgtaagatccagcgcttcctgtcccagccgttcttcgtggcagaagtattcaccggttctccgggtaaatacgtctccctgaaagacaccatccgtggctttaaaggcatcatggaaggcgaatacgatcacctgccggagcaggcgttttacatggtcggttccatcgaagaagctgtggaaaaagccaaaaaactttaacgccttaatcggagggtgatatggcaatgacttacctcctggacgtcgtcagcgcagagcaacaaatgttctctggtctggtcgagaaaatccaggtaacgggtagcgaaggtgaactgg

SEQ ID NO: 123408 - DNA, 530 bp, Homo sapiens
  misc_feature (1)...(530): n = a,t,c or g
atgccggtagaagccagtcagctctcagccagctggcagaattttggcccgacgcttgaagcacacgacatccgtgcagaactaaaagatggcggcgaattttcggttaaacgcgttactctggcgctggatgtctggcagagcctgttacatatgcgctggcagtttcgcgacctcactttctggcagctgcgctttcgcaccaacactcctatcaccagcggtggtagtgatgacagtctggaagccagtcacatcagcgatctgtttcttcgtcaatttgaccatttcgatcttcgcgacagtgaacacggcgtgatgcaggtgcgcatggatttgcgcgatgatgaggggttgttaagcaatggtcgcgtctggctccaggcggatgacatcgacctgaagccgtggctcggtaaatggatgcaggacaatattgcgctggaaacggcacagttctcccttgaaggctggatgacgatcgacaaaggcgatgtaaccggcggtgacgtctggctgaaacagggcng

SEQ ID NO: 123409 - DNA, 837 bp, Homo sapiens
atcagttaataccgcaagggagggccatcaaatggctgatgaaattgatgcaatggctttatatcgagcctggcaacaactggataatggatcatgtgcgcaaattagacgtgtttcagaatatggcgaacataacaacagccatgctgacgattaatgctatgcattttcttaaacgccagcgccactgctttcaacatggcttgccgtacttcgtcagaataaggcgatactgcatgctgggcataccagtcagcaatgctgatgaaccccgccatatcttcagtcaccagcaacgctcgccattcaccctcaattttcaccgcttcaccaaaaacgatcttcggcacgatgacaccggcccgttccagttctttaattaccgcaacctcacggacaatcgttggtcggccgaacggataactgaagtcagtttcctgacgccatccggtcagcgcgccgagctggcgatcccacaactcacctggctgaacgatccacgtcgacaccgtgcggaaggcctggtaagcctctccagccttaccggacagcacggcgtgatgcaggtgcgcatggatttgcgcgatgatgaggggttgttaaacaatggtcgcgtctggctccaggcggatgacatcgacctgaagccgtggctcggtaaatggatgcaggacaatattgcgctggaaacggcacagttctcccttgaagatcaaaaggaaacaaaaatcattgtaaaccatgccatctttttagagattaccagcagaaaattccttgttcgaaatttagcagtgcaagctatggaaaaacttacaacggaactacactccttaa

SEQ ID NO: 123410 - DNA, 2241 bp, Homo sapiens
tcggtggcggtcctgagagaataggccccgaaaatccgaatccagctggctacgatgccggaactggcggacgcgagctcggatcagcaggataacggcgcggagatgaatctggtttacgaccgcgacaccatggcgcggctgggaatcgacgtactagccgccaacagtctgttaaataacgccttcggtcagcggcaaatctcgaccatttaccagccgatgaaccagtataaagtggtgatggaagtggatccgcgctatacccaggacatcagtgcgctggaaaaaatgttcgttatcaataacgaaggcaaagcgatcccgctgtcatatttcgctaaatggcaaccggcgaatgccccactatcggtgaatcatcagggattatggcgggccttggaccatttggtttaccctgccgaccggaaaatcgctctgcgaaccccagtgcggcgatcgatcgcgcaatgacccagcttggtgtgccttcgacggtgcgcggcagttttgccggcacggcgctaggtgttccaggagacgatgaactcgcaggtgatcctgattatcgccgccatcgccacggtgtatatcgtgctgggtatcctttacgagagttacgtacatccgctgacgattctctccaccctgccctcggcgggcgttggagcgctgttggcgctggagctgttcaatgccccgttcagcctaatcgccctgatagggatcatgctattaatcggcatcgtgaagaaaaacgccattatgatggtcgattttgcgcttgaagcccaacgggcacggtaacctgacgccgcaggaagctattttccaggcctgtctgctgcgttttcgcccgattatgatgactaccctggcggcgctgtttggtgcgctgccgctggtattgtcgggcggcgacggctcggagctgcggcaaccccctggggatcaccattgtcggcggactggtaatgagccagctccttacgctgtataccacgccggtggtgtatctctttttcgaccgtctgcggctgcgtttttcgcgtaaacctaaacaaacggtaaccgacacccgttggcaattgtggattgtggctttcggcttctttatgcagtcgctggacaccaccatcgtaaacaccgcccttccctcaatggcgcaaagcctcggggaaagtccgttgcatatgcacatggtcattgtctcttatgtgctgaccgtggcggtgatgctgcccgccagcggctggctggcggacaaagtcggcgtgcgcaatattttctttaccgccatcgtgctgtttactctcggttcactgttttgcgcgctttccagcactataaggataatactacgtttcgtcagcctgttacatatgcgctggcagtttcgcgacctcactttctggcagatgcgctttcgcaccaacactcctatcaccagcggtggtagtgatgacagtctgatgaaccagtcacatcagcgatctgtttcttcgtcaatttgaccatttcgatcttcgcgacagtgaagtcagtttcctgacgccatccggtcagcgcgccgagctggcgatcccacaactcacctggctgaacgatccacgtcgacaccgtgcggaaggcctggtaagcctctccagccttaccggacagcacggcgtgatgcaggtgcgcatggatttgcgcgatgatgaggggttgttaagcaatggtcgcgtctggctccaggcggatgacatcgacctgaagccgtggctcggtaaatggatgcaggacaatattgcgctggaaacggcacagttctcccttgaaggctggatgacgatcgacaaaggcgatgtaaccggcggtgacgtctggctgaaacagggcggtgccagctggttgggcgagaagcaaacgcatacgctgtcggtggataatctgaccgcgcatattacgcgtgaaaatccgggctggcagttctctattcccgatacacggatcacgatggacggcaaaccctggccgagcggagcattgacgctggcctggataccggaacaggacatcgcgattaaacagacgaaacagagcaatattcgccatccaggtcatcccgcggtgtttgttttgatgaccctgcggaataggtctgatggggtgaccgctctcttttgcccgccttatgccgtaaccgtagacaaatgtgacgccagcccctgttgcagcgcacgctggtggggaacttaa

SEQ ID NO: 123411 - DNA, 3396 bp, Homo sapiens
tcaaaactctgacgaaaaacaggctgtcgtcagttttgacgtgacgaaacgaaataccgcgtgacagccatcacgcggcagacattttattttttctcgacgacgggacctgcctgatacccgccgcccagcgatttcatcaactgaatgctttggatcacccggcggctgtccagcatcagtaatgacatctcttcggcaagcactgatcgtggcagctttccttgcaggctttgagagcggaacatatcgggcgctgcaaatccatagtgactcgatcaccgtgaaaataccgttcagacgacttctaagcgggattacggttaaccttttaacggtgcctgtcgtacttctttgggctgcttctgactgggaccgtcgcctgcctgtggcctcatcgcgcagccctattattcccacgctcggtgtgatcaacatgccagtaacgaagatatctatctggcttctctctttgcgttgggtttcctggtctttggcccgcaattgttgattgttgtgtctgctgttggctttgtacctgattggtgacagctttgccaagttaggtctgggaatgattgccgatgggacgccggtattcggccttaccggctgggcaggcaccttcgccgcgctggatatcgccgcgattggttgtatctggccgttacgtaccacgcacagcccgacggcatcctgaatcacctgattgaccgccagcgccatctcttcggcaaggactttcaatctatggaaatcttgttgctcgtggatctttctacagacacgaacttgctcgtccaccatactagttacggttgcacggccacgctcggtacttccactacgaccctcgctcaaaacggcacagatggatcgctggattagccagcaagttccgtttttattgatggttgtgcgtacggcatccccgcgaacaaactgcccggtatcaccgttttctgcatccggtcccccttccgccccggtattaacaacggtatccgttgccactgtaccgggcttgacgacctgccagcccttatcattaatgacggttcctgtggctatcgccccctcatgcatccactgttcgccaataacccagcgcactatgcggatgccattcgttataatgctcgaacgcctctgcaaggttcttgccgtctggttgggcatgatactgatgtagtcacgctttatcgttttcacgaagctctctgctattccgttactctccggactccgcaccgccgtgttcttcggttcaagtcccaacatccgggcgaactggcgtgtttcattagcccggtagcatgaaccattatccgtcagccactccactggagacgacggaagatcgttgccgaagcggcgttccaccgctcccagcatgacgtcctgtactgtttcactgttgaagccgccggtagtgaccgcccagtgcagtgcctcacgatcacagcagtccagcgcgaacgtgacacgcagtctctctccgttatcacagcagaactcgaacccgtcagagcaccatcgctgattgctttctttcacggccactctgcctgtatgtgcccgtttcgatggcggtacagcaggttttcgctcaagcaacagcgcattctggcgcatgatccggtaaacacgtttggcattgatcgcaggcataccatcaagttctgcctgtctgcgaagcagcgcccatacccgacgataaccatacgttggcagctctccgataacatggtgtatacggagaagcacatccgtatcatcagtgtgacgactgcggcggccatccatccagtcatcggttcgttccccatccccgggcaataagggcgcgtgcgctatccacttttttgcccgtccatattcaacggcttctttgaggagttcattttccatcgttttcttgccgagcaggcgctggagttctttaatctgcttcatggcggcagcaagttcagaggcaggaacaacctgttctccggcggcgacagcagtaagacttccttcctggtattgcttacgccagagaaataactggctggctgctacaccatgttgccgggcaacgagggagaccgtcatccccggttcaaagctctgctgaacaattgcgatcttttcctgttgtggtacgccgtctgcgtttctccggcccacacaccacgacgtcaggtccgcctttagatgtcggctacaactcgtctccagttcacaaggtaatcccgttactccaatgcttctccgcccaagatcccttgcagattcaccgcagctccactcaagtggacacggcaatattcggcagttgtcaacactccagtcaattccagtagacgccactccatctcgcatcccaataggcggccgaattgctcccatagcggcacaccacagttctcgacatgcaacaagacacaaccaggggtggcaccacgcggtgcccactaaatcgtccagcagaatcactttgccgatatacggcagatgacggtaacgctgtgcgtaatcaatgccgtaacccaccacaaactcatccgggatcgagaaaccgataaattctaccgggacgttcacttcacgacgggacggtttatccagcagcgtacaaatcgccagcgacttcggttcgcgcaggcttaagatctcacgcactttcgacagtgtattccccgagtcgatgatatcttcaacaatcagcacgtccttgccacggatatcttcatccagatctttgaggattttcacatcacgggtggtggacatgccgctaccgtagctggaggcggtcataaagtcgacttcatgagatacctgaacttcacggcacaggtccgccataaacataaatgagccacgcagcagacccaccagcaccatatcgctgccgctgtctttgtaacgctcagtaatctgacgacccagttcggcgatacgcgctttaatctccgcttcggggatcattacttctacagtatgtttcatatctctaaccatatgatttttaaacaaatcacttcgcacgggcaggttttgggggcgcaaaaaaaagggagaaaagcaggatacccgtgaaaaaattcttcgccgggagaaggggataaaggcgcggttagcgaaacggtgatgtggaccaataacatcacttatatgagcattgttggcctgagcgcgacctgggatgtgacgaagaatgtcagtctgaccggcggcgtggacaatctgttcgacaaacgtttgtggcgtgcgggtaatgcccagaccacgggcgatttggcaggggccaactatatcgccggtgccggggcgtatacgtggtatatgagcgtaaacacccacttctgatgctaacgtcagattgttgacaaagtgcgcgtcgttcat

SEQ ID NO: 123412 - DNA, 1116 bp, Homo sapiens
ttacggctcaaacgggcgtctctggaactggtcatgaccacatttcgggcatagcgtcagcacttccggtgtgtagatcgggagatggaagtgacatttctcgcagaccagatttcccagcccgaccacttctccgctgtgataaaccccatgatgattgaggtcctggaaaacttcgcgccattcaagctgcgttttatcggtgatgtctgccagctcctgccacaagctttctttaatcacccgcataaagacgctgtcagattcttctttcaggctctcttcatagctcatggcgaactcttccaggtcacgtctgacagctcgcgtcagctcatcgacctcggttcgcgttaactccccggtcttgagccgggcgaactctttgttcaccgtaatgttgctaacctggtcattcacactgacctgaactgcctttccgtggttcagtatgcagtggatgtactcgaagttgaacacattattatctgtggccactacggttgcggcggcgtacaagccgcagttgaaaacccggaactggggcttatcaacaactggctgctgcatatccgcgatatcattcacggctgggcctacggcattcacgacggcttgctgcgtgatctggatgttaccgccaccaaccgcgaaacccttgagcaacgttaccgtcacgggatttccaacctcaagcgggacgttcacttcacgacgggacggtttatccagcagcgtacaaatcgccagcgacttcggttcgcgcaggcttaagatctcacgcactttcgacagtgtattccccgagtcgatgatatcttcaacaatcagcacgtccttgccacggatatcttcatccagatctttgaggattttcacatcacgggtggtggacatgccgctaccgtagctggaggcggtcataaagtcgacttcatgagatacctgaacttcacggcacaggtccgccataaacataaatgagccacgcagcagacccaccagcaccatatcgctgccgctgtctttgtaacgctcagtaatctgacgacccagttcggcgatacgcgctttaatctccgcttcggggatcattacttctacagtatgtttcat

SEQ ID NO: 123413 - DNA, 831 bp, Homo sapiens
gggttttttgagaaactggcacaagccgcaaaaaccgcgctttctatggattggatgttccgacagtcgcgttcctgcagaacgtttaaccggtcttgagccgggcgaactctttgttcaccgtaatgtggctaacttgttcattcacactgacctgaactgcctgtccggtggttcagtatgcagtggatgtactcgaagttgaacacattattatctgtggccactgcggttgcgggggcgtacaacccgcagttgaaaacccgaaagtggggcttatcaacaattggttgctgcatatccgcgatatctggttcaaacatagctcattgctcggctaaatcccgcaagagccccgtctggataccttgtgtgaactgaacgtcatggaacaggtgtataacctgggccactccaccattatgcaatcagcgtggaaacgcgggcagaaagttaccattcacggctgggcctacggcattcacgacggcttgctgcgtgatctggatgttaccgccaccaaccgcgaaacccttgagcaacgttaccgtcacgggatttccaacctcaagctgaaacacgccaaccacaaataaaaatgccatgccggatgcaacacatccggcaacttcacacttactcgtccagcagaatcactttgccgatatacggcagatgacggtaacgctgtgcgtaatcaatgccgtaacccaccacaaactcatccgggatcgagaaaccgataaattctaccgggacgttcacttcacgacgggacggtttatccagcagcgtacaaatcgccagcgacttcggttcgcgcaggcttaa

SEQ ID NO: 123414 - DNA, 1104 bp, Homo sapiens
atgcctgcaggtctacctcaggaagaaaagatggaaaaagaagattcatttccccaacgcgtctggcaaatcgtcgccgctattcccgaagctgatgtcaccacttacggtgatgtggcgaaactggcgggatccccgcgccgcgccatggtgggctgtgtgttaaagcgtctccctgaaggcagcaccttaccctggcaccgggtggttaatcgccacggcacaatttcgctaaccggaccggatttacagcgtcagttcaggcattactggcagaagacgtatttgcatccgttgctgcttcgaattatcgcgcttttacctgccaaccgccaacgcaatccaaccgctaaaccctgccatgtgaccagtttcatcaattctcctattaccatccccacggctaatttcctcccgaaagtggttacaaatttactcaccagttaccgggataccatcgagatcaatgtggatccacttgtgggtaagccgggcacttgggtaaacaacaggtcgagtatgaatgcgggcagtggcagcaccatcatcgacaagatcaacaggatcaaaatcggtccggcaaggatctgccattgtgtcgatttcaggtttgcgggcaggcggcagcatcgcggccagattactcatgggtcggctttgtcgttaataaaatgcagggcttccggcaccggaagatgagtaggttgtacagggcgctgtccaccagccagacgccagcgtttcagttgccagacccaggtcagcacttccgccaccgcggcgtacagttgacccgggatttgttgaccaatctccgcatgtcgatacagcgctcgcgccagcggcggcgcttcaagcgtcggggacgttattttcagcgccaattttccgaatgcccagcgcgaccagccctgcacctttagcgaccactttcggggcgctcattttgttttccggctactggaacgctaccgaatagtggcgtcgggtttattgacaattgacctccgcttttggcacatcggcccttatcctacgccgtgcagcagctcgctgcatctgacggatccgccctttaacatgagggtcacttcgccttgttga

SEQ ID NO: 123415 - DNA, 714 bp, Homo sapiens
acaaggaggctgatccccgccagcgttgaggtttatcacgacagcctgtgcccgaaaaatctggcacggctgggagcaacatattaccgcccgctatctggtcggtgcgatggcgcaaactcgatggtgcggcgacatctctacccggatcatcaaatccgtaaatatgtcgctatccagcagtggttcgcggagaaacatccggtgccgttctactcctgcatctttgataattcgataactaactgttattcatggagtatcagcaaagacggttattttatcttctgcggtgcctatccaatgaaagacggtcagacgcgtttcacgacgctgaaagagaaaatgagcgcctttcagttccagtttggtaagacggtgaaaagcgaaaaatgcacggtgctgtttccctcgcgctggcaggattttgtctgcggtaaggacaacgcctttctgattggtgaagcggcgggatttatcagcgccagctcgctggaggggattagctatgcgctggatagcacagacattctgcgttcggcattgcgaaaaccgattcgaacggagcagggcgctaacggggcgatacgggagctggaaaaattccgccagcagggtttttcacctgagcaggtgattcgacacagcatcgccaatgaataccagggcttgttcgcgccgaaaggtgttcgacctgagacgttactccgacag

SEQ ID NO: 123416 - DNA, 3414 bp, Homo sapiens
atggtgcaagttggaagagcattacgccaaaggctttggaaggaaatacagttcttgctcggtcccgaatgtctgcatatattgtggcgtattcgctttgccctgcatctggtcgtcagccgttacgataatcgcctgttattcgatcgccagcttagcgtcgcccagcgtctgaattacagtggtgaaggtaacgaaccggtcgagcggatgatgaaggattacttccgcgttacacgccgcgtcagtgaactcaaccagatgctgctgcaactgttcgatgaagccatcctcgcccttcccgccgacgaaaaaccacgtccaatcgacgatgagtttcagctacgcggtacgctaatcgacctgcgtgatgaaacactatttatgcgccagccggaagccatcttgcgtatgttctacaccatggtgcacaacagtgcgatcaccggcatttactccaccacgctgcgccagttacgccatgcccgtcgccatctgcaacaaccgctgtgtaatattccggaagcacgaaaactgtttttgagcattctgcgtcaccccggagcggtgcggcgcgggctattgccaatgcatcgccatagcgtgctcggcgcgtatatgccgcaatggtcgcatatcgtcgggcagatgcagtttgatctgttccacgcctacacggtggatgaacatactatccgcgtgatgctgaaactggagagttttgccagtgaagaaacgcgccagcgccatccgttgtgtgtggacgtctggccgcgcctgccgtcaactgagctgattttcatcgccgcgctgtttcacgatatcgccaaaggacgcggcggcgaccactccattctcgccgttcgccagtgcggtcagcacatgttcctggccgacgacgtcagcaaaggtttgtgggtgcccgtcagcaaacagataatcgagggcgtgctgcatatcacgccaaccaatcaactaccaaccacgatcgccccgagcgggatgaacaacgcgccgcccatcaccaccagtgagcctataagcgtaggcgagatcgccagtccggagtggttattcagcacttcccagccaggaagggataaagacatagaaatcgcggacaattggagccaggccctggaagtcgatgttgtcgtagttctgcaacagcaacgccagattctcccacggcgagaaggtgtcgcgagtgagatagagaaacgtatagaacgcttcatcggcggcagaaaatggcaaaaatcccaggaggccggcgggggaggattcacaggaaatcacaaatacgttgcccagtaccatgataatccgcaacagctgcgccgcgtggtcggcacttcatcagcgatggtacttggtttctctacgctgatggcgctggtttttgtgctggcagctgcgccaatcagccagggattgtttggtaataccgactatcaggggctggtgcgtttagtggcgctggtgcaaatggggatcgcctggggcaacctgttactggcgctgatgaaaggctttcgcgatgccgcaggtaatgcgttatcgctgattgtcggcagcttgattggcgttctcgcgtactacgtcagttaccgtttgggcggttatgaaggggcgttgctgggtctggcgctgattcccgcgctggtgttgagcaaatttacgctcatggcgttgattacgtcggtgaccttgcctgttgcttacatcatgatgcgtaaactgctggcggcgcagtatatattgaaagagctggaaagcggtaaatacagcgacggcgataagcatgccttcgaccagatgctgcacagtatcggcaaacagggcggcgatccgtatctggtgatggcggatttcgcagcctatgtagaggcacaaaagcaggtggatgtgctgtaccgcgaccaggaggcctggactcgcgcggcgatcctcaataccgcccgctgcggaagctcgatggaaagcaaacgtctggataatgccgcgctggcggcggggattagccccaattacatcaatgcccacggtaaaccgcagtcgattagcgccgaaaccaaacggcgtttgcttgacgcgatgcatcaacgtaccgccacgaaagtggcggtaacgccagtcccgaatgtcatggtttataccagcggcaaaaaaatgccgatggtggtggagggcagcggcgaatatagctggctgctgaccaccgaagaaggaacgcagtacaaaggccatgtaacggggggcaaagcgttcaatctaccgacgaagctgccggaaggttatcacacgctgacactcacccaggacgaccagcgcgcgcattgccgggtgattgtcgccccgaaacgctgttacgaaccgcaggcgttgctgaataaacaaaagctctttatacgctgcgatcggaaaaaacgcgcgaacgtccgatggacaaacagcaggcatcggacgaaaaacatcgtcgcttccacgacaaagagtctgactttctcgcgttgtgaatctgtggaattatctggcgagcagcaaaaggcgctttcttccaacgccttccgtcgcctgtgtcgtaccgattatctcaactatctgcgcgtgcgcgaatggcaggatatctacacccagttgcgtcaggtggtgaaagaacttggcattccggttaacagcgaaccggcggagtatcgcgaaattcacattgcgttgctgaccggtttactttcccatatcggcatgaaagatgccgataaacaagaatataccggcgcacgtaacgcgcgtttctccatcttccccggttctggtttattcaaaaaaccgcctaaatgggtaatggtggcggaactggtagaaaccagccgcctgtgggggcgcattgctgcgcgtatcgacccggaatgggtggagccagttgctcagcatttgattaaacgcacctacagcgaaccgcactgggaacgggcgcagggcgcggtgatggcaacggaaaaagtcactgtttatggtttgccgattgttgccgcgcgcaaggtcaactacagccagatcgatccggcgttattacatgatacaatcgagctcggtaccagccccgctttcctaatcacacgttggggcttcggcaggaacctcagcaggacctcggggggacctcggcaggaacctcggcgtaaggagatagcaatggaattagtattgaaagacgcgcagagcgcgctgactgtttccgaaactaccttcggtcgtgatttcaacgaagcgctggttcaccaggttgttgtagcttatgcagctggtgctcgtcagggtactcgtgctccgaagactcgtgctgcagtaactggtggcatgccaactctgtatgctgtcggtcgactctcaaggatccccatggacacgtag

SEQ ID NO: 123417 - DNA, 1113 bp, Homo sapiens
atgtgtaagcctaaatggcgaactgaatcctacgaattaggtttttcgaaaggattaattgatccgggtgaaagcgtctacgaagccgctaaccgcgagctaaaagaagaggttggatttggagcgaacgatctgacttttttgaagaagctcagcatggcaccgtcttacttttccagcaaaatgaatatcgtggtagcgcaagatctctacccggaatcactggaaggcgatgagcagcagccgctaccacaggtgcgctggccgctggcgcatatgatggatttgctggaagaccctgacttcaatgaagcgcgcaatgtcatgggaactgaatcctacgaattaggtttttcgaaaggattaattgatccgggtgaaagcgtctacgaagccgctaaccgcgagctaaaagaagaggttggatttggagcgaacgatctgacttttttgaagaagctcagcatggcaccgtcttacttttccagcaaaatgaatatcgtggtagcgcaagatctctacccggaatcactggaaggcgatgagccagagccgctaccacaggtgcgctggccgctggcgcatatgatggatttgctggaagaccctgacttcaatgaagcgcgcaatgtcagtgcgctgttcctcgtgcgcgaatggttgaaagggcaggggcgagtgtaaatgcgtgaagtttgcctgatgcacaatgtttatcaggcttatggggtttctgcaatttattgagttttcacgattttgttagccggataacgcgttcacgccgtatccggcataaacaagtgcactttgtcagcaaactgaaaaggcgccgaagcgcctttttaatcagaacaattcctgtgcctcgccattatcgataatggtcgttcccacctcgtgcactgcctgttgtgtcggctgcgtaccttcgatgaaatactcttcgcggctgttgccaccattagctaactgcccggtgctgcgatcgatattcaccgtcacaatacccggtggcggcgtcagcggctgctccggcacaccttcaagaacggctttcatataagcgtcccatgcaggctgggcactcttggcaccgccttcgtaacctga

SEQ ID NO: 123418 - DNA, 1870 bp, Homo sapiens
acgcactgggaacgcggagggcgcggtgatggcaacggaaaaagtcactgtttatggtttccgaattgttgccgcgcgcaaggtcaactacagccagatcgatccggcgttatgtcgtgaactctttattcgccacgcgctggtggaaggtgactggcagacgcgtcacgcattcttccgtgaaaacctgaaactacgggcggaagtagaagagctggaacacaaatcacgtcgccgcgatattctggttgatgacgaaacgttgtttgagttctacgaccagcgcatcagccacgatgtaatctccgctcgccacttcgacagctggtggaaaaaagtcagccgcgaaacgcctgatttgctcaactttgaaaaaagcatgttgatcaaagagggcgcagaaaaaatcagcaagctggattacccgaacttctggcatcagggcaatctcaagctgcgtttgagctatcagtttgagcccggcgcggatgctgacggtgtgaccgtacatattccgctgccgttacttaaccaggttgaggaaagcgggtttgaatggcagatccccggtctggccgcgaactggtgatgcctgattaatcgtgccaaacggtaaccgaatttgtaccggcaaatagccattcatatgtcttctagaatccaggctacaatttacaagtggtacaactttacaggctgctattgtgcaacatctggaagctttctgttgacagcagcctggtccacttaggcagaggaagtccctctcccccatagtatctggtagaatttgcatgtcgtgcaggacccactctagatgatgccctttatgagccacaggactgagcataatccattttcttaaatccggtgcggccatgcatatggtgtttactatctggccgaagagtgttatacacactaggcgggtggcacgccaataagcgggattgagcttgtctggctgcttcagtaacaccgaacgcggaatgtctgtgctatacaacgcatagataatcccctccagcgagctggcgctgataaatcccgccgcttcaccaatcagaaaggcgttgtccttaccgcatacaaaatcctgcccgcgcgagggaaacagcaccgtgcatttttcgcttttcaccgtcttaccaaactggaactgaaaggcgctcattttatctttcatcgtcaagaaacgcgtctgaccgtctttcattggatatgcaccgccaaaaataaaatacccgtctttgctgatgctccatgaataacagttagttatcgaatcatcaaagatgcaagagtagaacggcaccggatgtttgtccgagaccactgatggatagcgacatatcgaccagatagcgggcggtccagcctgcatgggacgcttatatgaaagccgttcttgaaggtgtgccggagcagccgctgacgccgccaccgggtatagtgacggtgaatatcgatcgcagcaccgggcagttagctgtggtagcggctctggctcatcgccttccagtgattccgggtagagatcttgcgctaccacgatattcattttgctggaaaagtaagacggtgccatgctgagcttcttcaaaaaagtcagatcgttcgctccaaatccaacctcttcttttagctcgcggttagcggcttcgtagacgctttcacccggatcaattaatcctttcgaaaaaacaatcggcacaatcatcactgcttcccggttggttggacgcattcgttcataaacacgccgcacgccattgctgaactccagatccacgctctcgacggtaaacagtcgggaacgggctacagtttcaacattcagaatggtgggtttttgtaatgatttgctcat

SEQ ID NO: 123419 - DNA, 2578 bp, Homo sapiens
  misc_feature (1)...(2578): n = a,t,c or g
atggacatccaggagtttccagatctcaaaggcaccaccagcctggagatcctgaccctgacccgcgcaggcatccggctgctcccatcggggatgtgccaacagctgcccaggctccgagtcctggaactgtctcacaatcaaattgaggagctgcccagcctgcacaggtgtcagaaattggaggaaatcgggctccaacacaaccgcatctgggaaattggagctgacaccttcagccagctgagctccctgcaagccctggatcttagctggaacgccatccggtccatccaccccgaggccttctccaccctgcactccctggtcaagctggacctgacagacttctcagctgaccacactgcccctggctggacttgggggcttgatgcatctgaagctcaaagggaaccttgctctctcccaggccttctccaaggacagtttcccaaaactgaggatcctggaggtgccttatgcctaccagtgctgtccctatgggatgtgtgccagcttcttcaaggcctctgggcagtgggaggctgaagaccttcaccttgatgatgaggagtcttcaaaaaggcccctgggcctccttgccagacaagcagagaaccactatgaccaggacctggatgagctccagctggagatggaggactcaaagccacacccccagtgtccagtggtagccctactccatgccccttcaagccctgtgagtacctctttgaaagctggggcatccgcctggccgtgtgggccatcgtgttgctctccgtgctctgcaatggactggtgctgctgaccgtgttcgctggcgggcctgcccccctgcccccggtcaagtttgtggtaggtgcgattgcaggcgccaacaccttgactggcatttcctgtggccttctagcctcagtcgatgccctgacctttggtcagttctctgagtacggttagcccgctgggagacggggctaggctgccgggccactggcttcctggcagtacttgggtcggaggcatcggtgctgctgctcactctggccgcagtgcagtgcagcgtctccgtctcctgtgtccgggcctatgggaagtccccctccctgggcagcgttcgagcaggggtcctaggctgcctggcactggcagggctggccgccgcactgcccctggcctcagtgggagaatacggggcctccccactctgcctgccctacgcgccacctgagggtcagccagcagccctgggcttcaccgtggcccctggtgatgatgaaactccttctgttttcctggttcgtgggcccgttgccttaccatcaaaactggtactgtgacctgccgcggggcgactttgaggccgtgtggggactgcgcccatggtgaggccacgtgggcctggcctcatcttcgcaaaacggggctcctctactgtcccgtggccttcctcagcttcgcctccatgctgggcctcttccctgtcacgcccgaggccgtcaagtctgtcctgctggtggtgctgcccctgcctgcctgcctcaacccactgctgtacctgctcttcaacccccacttccgggatgaccttcggcggcttcggaccccgcgcaggaggactcagggccccccctagcccctatgctgcggccgggagaangctggagaaagagcctcctgttgattcctacccccaggccctggtagccccttctctgatgtggatctcattctgcgaagcttcctgaagctgggccggccccctggagctggagacctatggcttcccctcagtgaccctcatctcctgtcagcagccaggggcccccaggctggagggcacccattgtgtagagccagaggggaaccactttgggaacccccaaccctccctggatggagaactgctgctgagggcagagggatctacgccagccagtggaggcttgtcaggggggtggcggctttcagccctctggcttggcctttggcttcacacgtgtaaatatccctccccattcttctcttcccctctcttccctttcctctctccaccctcggtgaatgatggctgcttctaaaacaaatacaaccaaaaactcagcagtgtgatcctattagccaggatggcccaagtacctggcttccaactgatcacctctctccttgtgaccaatcaccaaccgggtgccttctttggcctggcttttcccttggccttttcctcagcttcaccttgattactgggcctcttccctngtcaatgtctgaagctgtggaccagagacctggacttttgtctgcttaagggaaatgagggaagtaaagacagtgaaggggtggagggttgatcagggcacagtggacagggagacctcacagagaaaggcctggaaggtgtatttcccgtgtgactcatggataggatacaaaatgtgttccatgtaccattaatcttgacatatgccatgcataaagacttcctattaaaataagctttggaagagattacacatgatgtctttttcttagagattcacagtgcatgttagtgtaataaagagataagtcctacagt

SEQ ID NO: 123420 - DNA, 510 bp, Homo sapiens
atgagtatgctcaggcttcagaagaggctcgcctctagtgtccttcgctgtggcaagaagaaggtgtggttggaccccaataagaccaatgaaatcgccaatgccaattcccatcagcagatctggaagctgatcaaagatgggctgatcatccgcaagcctgtgacggtccattcccgggctcgatgccagaaaaacaccttggcccactggaagggcaggcacataggcatagataaaagatactgtgaatctaagaagattgatcgccacatgtatcacagcctgtacctgaaggtgcaggggaatgtgttcacaaacaagccgattctcatggaacacagccacaagctgaaggcagacaaggctcacaagaagctcctggctgaccaggctgaggcccgcaggcctaagaccaaggaagcacggaagcgcagtgaagagcgcctccaggccaagaaggaggagatcatcaagactttgttcaaggaggaagacaccaagaaataa

SEQ ID NO: 123421 - DNA, 447 bp, Homo sapiens
ggcacgaggcagccatgagtatgctcaggcttcagaagaggctcgcctctagtgtcctccgctgtggcaagaagaaggtctggttagaccccaatgagaccaatgaaatcgccaatgccaactcccgtcagcagatccggaagctcatcaaagatgggctgatcatccgcaagcctgtgacggtccattcccgggctcgatgccggaaaaacaccttggcccgccggaaggtcaggcacatgggcataggtaagcggaagggtacagccaatgcccgaatgccagagaaggtcacatggatgaggagaatggagattttgcgccatttgctcacaagataccgtgaatgtgagactatcaatcgggccatgcatcacctgctgaacctgaaggtgatgaggtaatggttttaaatatagttttccagttgctccaccctgacaaccg

SEQ ID NO: 123422 - DNA, 1044 bp, Homo sapiens
atggcttcggcgccccggcccacaggggcggccatcttgggctggagaggcagcctgaaggaggccaccgctggccctgctgtcagattcgaaggtcataataagggagtgacccggcgacgactcgccccaacgatggcgaggcggcgagagctgaagcgctgcctgcagctgctggcgtcctcggcggagccagcgcggcgggctcgggttaggaagaacccgagcgcctgccgcggtcgcccctcccgctacggcggcgctttgcgcggggactctgtggccggaagccgcggaactgaggcggcgcgcgctcccggccaccccaagcgcgagctagagctcgatatggtagatactcttccatgggttccgggatcacatgcattcattatacgtcagttaaacctggaaaatattaagggagctttcctgctacaagaattatgtttaaaaagctccacaggggagctctttcctttcgctgctgtggctgcagccttgagtatgctcaggcttcagaagaggcttgcctctagtgtcctctgctgtggcaagaagaatatctggttagaccccaatgagaccaatgaaatcaccaatgccaactcccgtcagcagatccggaagctgatcaaagatgggctgatcatccgcaagcctgtgatgggcaggcatatgggcataggtaagcggaagggtacagccaatgcccgaatgccagagaaggtcacgtggatgaggagaatgaggattctgcaccggctgctcagaagataccgtgaatctaagaagattgatcgccgcatgtatcacagcctgtacctgaaggtgaagaggaatgtgttaaaaaacaagcagattctcatggaacacatccacaagctgaaggcagacaaggcccgcaagaagctcctggctgatcaggctgaggcccgcagatctaagaccaaggaagcacacaagagctatgaagagcacctccaggccaagaaggaggagatcatcaagactttgtccaaggaggaagagaccaagaaataa

SEQ ID NO: 123423 - DNA, 1914 bp, Homo sapiens
atgtcccggggcccttacccaccctcccaggagatccccatggaggtcttcgaccccagcccgcagggcaaatacagcaagaggaaagggcgattcaaacggtcagatgggagcacgtcctcggataccacatccaacagctttgtccgccagggctcagcggagtcctacaccagccgtccatcagactctgatgtatctctggaggaggaccgggaagccttaaggaaggaagcagagcgccaggcattagcgcagctcgagaaggccaagaccaagccagtggcatttgctgtgcggacaaatgttggctacaatccgtctccaggggatgaggtgcctgtgcagggagtggccatcaccttcgagcccaaagacttcctgcacatcaaggagaaatacaataatgactggtggatcgggcggctggtgaaggagggctgtgaggttggcttcattcccagccccgtcaaactggacagccttcgcctgctgcaggaacagaagctgcgccagaaccgcctcggctccagcaaatcaggcgataactccagttccagtctgggagatgtggtgactggcacccgccgccccacaccccctgccagtggtaatgaaatgactaacttagcctttgaactagaccccctagagttagaggaggaagaggctgagcttggtgagcagagtggctctgccaagactagtgttagcagtgtcaccaccccgccaccccatggcaaacgcatccccttctttaagaagacagagcatgtgcccccctatgacgtggtgccttccatgaggcccatcatcctggtgggaccgtcgctcaagggctacgaggttacagacatgatgcagaaagctttatttgacttcttgaagcatcggtttgatggcaggatctccatcactcgtgtgacggcagatatttccctggctaagcgctcagttctcaacaaccccagcaaacacatcatcattgagcgctccaacacacgctccagcctggctgaggtgcagagtgaaatcgagcgaatcttcgagctggcccggacccttcagttggtcgctctggatgctgacaccatcaatcacccagcccagctgtccaagacctcgctggcccccatcattgtttacatcaagatcacctctcccaaggtacttcaaaggctcatcaagtcccgaggaaagtctcagtccaaacacctcaatgtccaaatagcggcctcggaaaagctggcacagtgcccccctgaaatgtttgacatcatcctggatgagaaccaattggaggatgcctgcgagcatctggcggagtacttggaagcctattggaaggccacacacccgcccagcagcacgccacccaatccgctgctgaaccgcaccatggctaccgcagccctggctgccagccctgcccctgtctccaacctccagggaccctaccttgcttccggggaccagccactggaacgggccaccggggagcacgccagcatgcacgagtacccaggggagctgggccagcccccaggcctttaccccagcagccacccaccaggccgggcaggcacgctacgggcactgtcccgccaagacacttttgatgccgacacccccggcagccgaaactctgcctacacggagctgggagactcatgtgtggacatggagactgacccctcagaggggccagggcttggagaccctgcagggggcggcacgcccccagcccgacagggatcctgggaggacgaggaagaagactatgaggaagagctgaccgacaaccggaaccggggccggaataaggcccgctactgcgctgagggtgggggtccagttttggggcgcaacaagaatgagctggagggctggggacgaggcgtctacattcgctga

SEQ ID NO: 123424 - DNA, 924 bp, Homo sapiens
atgtggcgatcgatcttcttagattcacggtatcttctgagcagccggcgcaaaatcctcattctcctcatccatgtgaccttctctggcattcgggcattggctgtacccttccgcttacctgtggagaagatgagcttcatcttcatgggggacgtgatccatcggatgctcacagctactcagtatgtggcgcccctgatggccaacttcaaccctggctactccgacaactccacagttgtttactttgacaatggtcagcagatccggaagctcatcaaagatgggctgatcatccgcaagcctgtgacggtccattcccgggctcgatgccggaaaaacaccttggcccgccggaagggcaggcacatgggcatagagtttgcctgcttttgttgtgtttttctcacccctgccctgatctgcatggtgtgtgctgtccgtctgctaaccagggacccctaccttgcttccggagaccagccactggaacgggccaccggagagcacgccagcatgcacgagtacgccaggggagcttggtccagcccccaggcctttaccccagcagccacccaccaggccgggcaggcacgctacgggcactgtcccgccaagacacttttgatgccgacacccccggcagccgaaactctgcctacacggagctgtgagactcatgtgtggacatggagactgacccctcagaggggccagggcttggagacccatgcgaggcgcacgcccccagcccgacagggatcctgggaggacgaggaagaagactatgaggaagagctgaccgacaaccggaaccggggccggaataaggcccgctactgcgctgagggttggggtccagttttggggcgcaacaagaatgagctggagggctggggacgaggcgtctacattcgctga

SEQ ID NO: 123425 - DNA, 783 bp, Homo sapiens
cggagctctttcctttcgctgctgcggccgcagccatgagtatgctcaggcttcagaagaggctcgcctctagtgtcctccgcatgtggcagagaacgaatggtctgggttagaccccaatgagaccaatgtaatcgccaatgccaactccccgtcagcagatcccggaagctcatcaaagatgggctgatcatccgcaagcctggtgacgggtccattcccgggctcgatgccggaaaaaacacctttggcccgccggggaaggggcagggcaacatggggcattaggtaaggcgggaaggggtacaagccaaatgcccggaatgccaggagaaggtcaacatggattgaggagaattgaggattttggcgccggcttgcttcagaaagataccggtgaaatctaaagaagatcggatcgcccacatgtattcacagcctgttaccttgaaggtgaagggggaatgttgtttcaaaaacaaggcgggtttttcatgggaacacttccacaaggttgaaggcaggacaagggcccgcaaagaagcttcctggctgaccaggcctgaaggccgcagggtctaaggaccaaggaaagcacggaaagcgccagtgaagagcggcttccagggcaaaggaaggaggagatcaatcaaagactttattccaaggagggaaggagacccagaaataagaacctcccacttggatctgtacatacttggcctcttgtgattacatagatcagccattaaaataaaacaagccttaatctgaaaaaaaaaa

SEQ ID NO: 123426 - DNA, 2232 bp, Homo sapiens
atgcagatcccccgtagcccacggcagattgtgatgctccagcgcaaagccagcaaaccaggacaggggttaggcaaaaccaccggctggatccatcgcaccaccctgctctcgcggggtgtgaaaatgatcccaggcgtaagttatcagaagattgacgatgacgggctgcatgtggtgatcaacggcgaaacgcaggtattagcagtggacaatgtggtgatctgcgcagggcaagagccaaaccgcgcgctggcgcaaccgctgattgatagcgggaaaacggtgcatttaattggcggctgcgatgtggctatggagctggacgcacgacgggcaattgcccagggaacacggctggcggacctgcaggcagcaagtcaaggcacttgcattgatgaccaggatatcactatcgatacttatgaattcactactgactatctggagaatcccacctgtggtgaaaaagtagtggaagagacgcttgtcagccacctgctgaaatcaaactgcctgatcacccatcaaccagattggggttcgctccaaattcagtatcgtggacgccaaattgacagagaaaaactgctgcgttacctggtctcattccgtcatcacaacgagttccacgaacagtgcgtggaacgcatctttaatgacctgttacgcttctgccagccagaaaaattgagcgtttacgcacgttatacccgtcgtggcggtctggacattaacccgtggcgcagtaatagcgattttgtcccatcgaccacaagactgctggaagtggatatgcttaaacgcaccgccagcagcgacctctatcaactgtttcgcaactgttcacttgccgtactgaactccggtagtttgaccgataacagcaaagaattgctgtctcgttttgaaaatttcgatattaacgtcttgcgccgtggggggggcagtatgctaaacatcgtactttacgacccagaaattccgccaaatactggcaacatcatccgtctttgcgctaataccggctttcgtctgcatatcatcgaaccgatgggatttgcctgggacgataagcgcttgcgccgcgcggggctggactatcacgagtttaccgccgttacgcgtcatcatgactatcgcgcgttcctcgaagcagaaaatccccagcgcctgttcgccctcaccacgaaaggtacacctgctcacagcgccgtaagctatcaggatggcgattatctgatgttcggcccggaaacacgcggcctgccagcgagcattcttgatgccctgcccgctgaacaaaaaattcgcattccgatggtgccggacagccgcagcatgaatctgtccaatgcggtgtcggtagtggtgtatgaagcctggcggcagttggggtatccgggagcggataccggggcgtatcacatcattccgtggtcttcgataaccacctttgctaactttgtccgcggcattgtttcggtggtggcaaattatgatgttgatcgccatgaagatgctgataaagccaatcaggcactgaaagatgcggtagcggaattaatggaaaacgaagaaattcgcgggctgattattggtgaaccgaattttgccgggattgtcggcttaagcaataccgcgtttacactgcgtgtttcgttcaccacgctgccactcaaacagtggacgagcgacctgcaggcacattgccttggccgcaaatccaaaagaatatcccactcgaagacgaccagggcagtcacttccgtctggtggttcgtgatactgaaggccggatggtctggcgggcatggaactttgagccggatgccggtgaaggtcttaaccgctatatccgcacctcaggcatccgtacagacacggccacccgctgatcgcgaagcatttacccgcattcacctccccgaacacactttatatccccatacgccagccatcgccgctggcgtttttattgacggagacatacccatgacaacacagacgcagcacgacctcgcacccgctaaccaacccgaatttgaactgaccgtcacgccggtccccgatgaacagcgtatcgatttctggccacagtactttggcgctatcccgcagtggctactcctggagccgcatatcttcgcctggatggaccgcttctgtgagggctacagcggtgtatctggtcgttctacggggtcctcaagaggcgacctgcaggcatga

SEQ ID NO: 123427 - DNA, 1563 bp, Homo sapiens
gatccgggccaaacagcttgaaattttatgattggggtgaaacggtgccgcaaccctggccgatttttggtttatccccagcgtttggtttcccgttatgttttccccgtgggctgggggaaaccatcttttcttctcgcccacatataagggtaactatccggagctgcaaaaacggttgaatggctggctgtcggcggcgctgaaaacggcccgtattctgacagtctgcgtggcggtaatgttgctgttgagcgcatggggattgttcgatttctggaactggctgcaaaacggcgcggggcaaaaaaacccgtaaaatatccctgatcccgtatccgcaactcaatccttttccttcctcggcggttggctggacggtgctcgcccagtttgatcgaaaaccggctggcttcggatattccatggccgcccgctaccccagcgcccgcacgcgtaccctgcttacgctgtttcgtaacgcgctggcggtgattatcagtaccatcaccatcatgattgtgttgtcggaaatcggcgtcaatatcgcgccattgctggcaggtgccggggcattaggtctggctatctcgtttggttcgcaaacgctggtgaaagatattatcaccggggtatttattcagtttgaaaacggcatgaacactggagatttggtgactatcgggccgttgaccggcacagtggaacggatgtcgattcgctccgtgggcgtacgacaggataccggggcgtatcacatcattccgtggtcttcgataaccacctttgctaactattgtccgcggcattggttcggtgggagcaaattatgatgttgatcgccatgaagatgctgataaagccaatcaggcactgagagatgcggtagaagatgatgagactcgctttaccagcgagtccagtccgatcttgcggtgctgtcagagggaaggtctagggctgaaggctgttgttcagattcttttgtcccacggcaggaacggcctgccaggggagcccgcgagctcccagggcctttctgctgcttcctctaccccagtatttcacttggctctccaaattgactcagctccagataacattgactgggtagaaatgctatttaataaaaatatggtgactgaacgcttacagaatgtcatggttcttgagcagtgtttcagtgattcttcttctctttatagattcctcacctattcctacctcttggccttcaatgtgtggcttctgcttgcacccgtgaccctgtgctatgactggcaggtcggcagtattcctctggtagagaccatatgggacatgcggaacttagccaccatctttctggcggttgtgatggccttattgagcctgcactgcttagcagcctttaagagcagagttaccgcctctataccagggtgcataaaagcacatgcagttgaaaatgtcttaacgacaaaaagcaaaacaaggatatatccagaggtggtagtgcaaagtggccttcagaaacaaaaaggcaaaggtagtgtaatgttcatagaagcagcaggcctatga

SEQ ID NO: 123428 - DNA, 276 bp, Homo sapiens
gggtacgccagtatcggctgggaatatcaccagcagagaatggcagaaatgatcgatgcccggcaacagcaggcgtttggtgaagagggagcgtgctggggaggctgcccgaaacaccgcgtcatgctcgatgccagcggcaaaccgggactgaatgatttgtgtgccgggtatcagcgtgatgtccgccatctaccgcgatatctgaaagcaatggctgatttgctggcgcacggtcgcccggccagcgacattatgcatgcgcatttgctggtg

SEQ ID NO: 123429 - DNA, 916 bp, Homo sapiens
atgtcccgtcgtgccagccacttggctgtatggaaccaacgtccccgcgacgaccttaagtgtacatggcgcctgtttatattccgagagcagtgcggtagagatccctgttggcgatattcaaccactggtagcaaacgcgacctccggcaagtttctcgtgtggaatatcaaatgggctttgcgaagttttgccgctccgccggccaaacctctggccgctcggtgattgttgagcacaacggcgagatttacgcctgtgatcactatgtttatccgcaatatcggctggggaatatgcaccggcagagaatggcagagatgatcgattcccggcaacagcaggcgtttggtgaagataaatttaagcagttaccggcgcagtgtcgcagttgtaacgtgttaaaagcatgctggggaggctgcccgaaacaccgcttcatgctcgatgccagcggcaaaccgggactgaattatttgtgtgccgggtatcagcgttatttccgccatctaccgccatatcttaaagcaatggctgatttgctggcgcacggtcgcccggccagcgacattatgcatgcgcataaaaaagtgtttaagcgcggcaccgcgtgctccggtttccaaaaaggaggccccctgtttaggagccgaacgggatactgtcccacgctacggaaaaaggccccttgtcccaagacagggcttttgggcaaaaagtggaccccccaaaggagaaattcttccgggaaatcatgcgccaaaaggaggggtgaccccccattgttggaaaaccgttttaacgggtcccgtgttcaaaggaaaccacagtggaactcttgtacgggacaccccgagaacaattttttccccaattatgggggcaccccttacccccagcgaatgtggcccttag

SEQ ID NO: 123430 - DNA, 1641 bp, Homo sapiens
  misc_feature (1)...(1641): n = a,t,c or g
tggtgggtcggaccgacgccgaatgctatggtcgccacggctggcgtagattaatactatacgagtcgagcggccgtccgggcaagtggacaagaaaggagaaaggaagggagtcttacttggactgctttattcattgacttaaataactttgataccttctggcccatttaggtgtttgccattgtacccccactcagaatgactgatgctgtgccatgcacataataaatgttcctgatgctggggtctgcattggcgtgggactacctgagaattggtctgactccatcagcgccattgctggtggaatgtttcattgggtcatggcctctgaagtatctttatttctataggcaatcttgctgccaatgatctctccccgtcccgaatagccagactacagaagatccttcacagctatgtgcctgaagagatcagggatggaaatcaagttcgagttacctcatgggatggcaggaaatggggagaactggagggggacacctatgaccgggtgctggtggatgtgccctgtaccacagaccgccactcccttcatgaggaggagaacaacatctttaagcggtcaaggaagaaggagcgacagatattgcctgtgctgcaagtgcagcttcttgcggctggactccttgccaccaaaccaggaggccatgttgtctattctacctgctcactctcacacttacagaacgagtatgtggtgcaaggtgccattgagctcctggccaatcaatacagcatccaggtacaggtggaagatctgactcacttccgaagggttttcatggacacattttgtttcttctcaatcctgtccaggttggggagctggtaataccaaaacctcattggccaattttggccctatgtacttctgcaaaatgcgtaggctggacatagtatcnaccccaatccctgaagcaagaataccaaagggtatactctgttggatgcaccagaaactggaaactgggaccagtggcagagatgcactctcggtcctgtctccatcctgttcgtgtctttctgcagttttcggcaataagaagtagaagatttgctgtcctgctgtccaattgtggagcatcagcatggtttccaacgtcactcattaacccctaccccatctccnagggccttgtacttaaagtttgctggcccgcttaggggcttagaaggaggaagcccagtgagcaggcttcacactaagttgtaaacataggagaagcatttggccaataaagaatgttgaaactctatagacctagggctgcagttggggacttcatgtcagtgcaaatgccattagttccatttgtaccagccagttactgagcccctgtcacccttgaagtgagttccacctgaccagtcttgagcagccaacaggctcaattaagcccgcctggtttttccatatggctcatgatctaatttaaggaacaagtaactaaaaatgttaagccagtgcaaaataatctgcttacctactcacattggaaaagccctctgagctgaataattctggccattcctgctgtcaacaatactgctgcccaaatgtggcttatgaggctgcttctgccacaaaaccgtcatactcttgtgcgtgccttg

SEQ ID NO: 123431 - DNA, 831 bp, Homo sapiens
  misc_feature (1)...(831): n = a,t,c or g
acatgatccacgncngtntggatgaactgtgggaagacatcactcacagccttcatgaccagggccactgttcatctgggggacccctgaggatctacgcggcccaggcccattcccagctccttgtctggggagccttggctctgagcctctagcatggttcagtccttgaaagtggcctgttgggtggagggtggaaggtcctgtgcaggacagggaggccaccaaaggggctgctgtctcctgcatatccagcctcctgcgactccccaatctggatgcattacattcaccaggctttgcacnnnnnnnnnnnnnnnnnnnnnnnnnnnnnnnnnnnnggggggccccctttttaaaaacccctgggggggcccaatttttccgggggagaagannnnnnnnnnnnnnnnnnnnnnnngggggtttttaaacccccgggggggattttgagaaaacacctttttttgggggggggcacttttgggcannnnnnnnnnaaaaaattttagcctccgggggagcaaaaaaatttttttggggggaggggggaaaaaaaccccccaattttctcggcgtaaaaaaagttccnncacgaggaccgccacgcaccagcgccatagtaggcgttttgtggtttccttgggcacctattatctcgctattgctcttgcggggacggctacctcggtcgaactagcctcctatttttgtccctctccttcggccttcctcctgacttacatcgagattttccttcccctcatttggcacatttgctccaccctgtcttgcgccgttacacctctccctttcgtcaggcaaactacg

SEQ ID NO: 123432 - DNA, 2049 bp, Homo sapiens
atgatcgaccatcacatcaaagacacaatagatgaggaagaggcacttcagaatggtgagtggctggatgtggacatggtggtaggcactgtgcaaaacatactagtggatatagagatgaataagaaaaagcccctgcactcaaagagctctcggattcatcaacaaattattgtgcagttagatagcctccctccacctgtcttctcagagcaggtaatggcaagcatggctgccgtgctcacctgggctctggctcttctttcagcgttttcggccacccaggcacggaaaggcttctgggactacttcagccagaccagcggggacaaaggcagggtggagcagatccatcagcagaagatggctcgcgagcccgcaggatcagtgcgcgatgacttggggacaaaggagatgatgggggctagcagtctgacggcctggatatctgtccccttctccaggaccctgaaagacagccttgagcaagacctcaacaatatgaacaagttcctggaaaagctgaggcctctgagtgggagcgaggctcctcggctcccacaggacccggtgggcatgcggcggcagctgcaggaggagttggaggaggtgaaggctcgcctccagccctacatggcagaggcgcacgagctggtgggctggaatttgtatgggcttgcggcagcaactgaatcgctaggcgatggatctgactggagcaggtggccctgcgcgtgcaggagctgcaggagcagttgcgcgtggtgggggaagacaccaaggcccaggtgctggggggcgtggacgaggcttgggctttgctgcagggactgcagagccgcgtggtgcaccacaccggccgcttcaaagagctcttccacccatacgccgagagcctggtgagcggcatcgggcgccacgtgcaggagctgcaccgcagtgtggttccgcacgcccccgccagccccgcgcgcctcagtcgctgcgtgcaggtgctctcccggaagctcacgctcaagggcaagggcctgcacgcacgcatccagcagaacctggaccagctgcgcgaagagctcagcagagcctttgcaggcactgggactgaggaaggggccggcccggacccccagatgctctccgaggaggtgcagccagcgatttcaggctttccgccaggacacctatctgcagatagctgctttcactcgcgccatcaaccaggagacttgggaggttcaacaccagctgggggcccccttccccaagccacaggggcctttgcccccagagtttcaacaaacagacagtggcaaggttctgagcaggctgcaggcccgtctggatgacctgtgggaagacatcactcacagccttcatgaccagggccacagccatctgagggacccctgaggatctacctgcccaggcccattcccagcttcttgtctggggagccttggctctgagcctctagcatggttcagtccttgaaagtggccttggtgggtggagggtggaaggtcctgtgcaggacagggaggccaccaaaggggctgctgtctcctgcatatccagcctcctgcgactccccaatctggatgcattacattcaccaggctttgcaaacccagcctcccagtgctcatttgggaatgctcatgagttactccattcaagggtgagggagtagggagggagaggcaccatgcatgtgggtgattatctgcaagcctgtttgccgtgatgctggaagcctgtgccactacatcctggagtctgacactgagcccctgcgagtgaccgtgagcacacagttccgtagcggggcccatacgagactcgacgcgcgcgcaccacgaggtcccgagggaggacactcgacggacacgagtgacgggaaatgtgcatctacactagcgcgcgacagctagagcgatgacggcgaggacgtctcgcagcctaccagcaacgcgaagacgtgcctcccggcgtcgtatggattaacaagctccaagtagggtgtacaacgccgcagcatgaactcccagg

SEQ ID NO: 123433 - DNA, 1278 bp, Homo sapiens
cctgagtgagtctctggcgtcccaaattgcctgtttttctcgcaggctctattccgttcgctggttcgccacctcaggggaacgatggccatggagtccacagccactgccgccgtcgccgcggagctggtttctgccgacaaaattgaagatgttcctgctccttctacatctgcagataaagtggagagtctggatgtggatagtgaagctaagaaactattgggtttaggacagaaacatctggtgatgggggatattccagcagctgtcaatgcattccaggaagcagctagtcttttaggtaagaagtatggagagacagctaatgagtgtggagaagccttctttttctatgggaaatcacttctggagttggcaagaatggagaatggtgtgttgggaaacgccttggaaggtgtgcatgtggaagaggaagaaggagaaaaaacagaagatgaatctctggtagaaaataatgataacatagatgaaactgaaggctcggaagaggatgataaagaaaatgataagactgaagaaatgccaaatgattcagtccttgaaaacaagtctcttcaagaaaatgaggaggaggagattgggaacctagagcttgcctgggatatgctggatttagcaaagatcatttttaaaaggcaagaaacaaaagaagcacagctttatgctgcccaggcacatcttaaactcggagaagttagtgttgaatctgaaaactatgtgcaagctgtggaggagttccagtcctgccttaacctgcaggaacagtacctggaagcccacgaccgtctccttgcagagacccactaccagctgggcttggcttatgggtacaactctcagtatgatgaggcagtggcacagttcagcaaatctattgaagtcattgagaacagaatggctgtactaaacgagcaggtgaaggaggctgaaggatcgtctgctgaatacaagaaagaaattgaggaactaaaggaactgctacccgaaattagagagaagatagaagatgcaaaggagtctcagcgtagtgggaatgtagctgaactggctctgaaagctactctggtggagagttctacttcaggtttcactcctggtggaggaggctcttcagtctccatgattgccagtagaaagccaacagacggtgcttcctcatcaaattgtgtgactgatatttcccaccttgtcagaaagaagaggaaaccagaggaagagagtccccggaaagatgatgcaaagaaagccaaacaa

SEQ ID NO: 123434 - DNA, 1308 bp, Homo sapiens
atggagtgtgtgtgtgtgaaagagaaagagagagaagaaaaagaaggaaaggaggaagaggaggaagatgaagcagtagcagaaagaggaggaaaaggagaaaggagaggagagagaaggggagaaaggaagagagagaaggagacatacacagagaaaaacagatacagagacacaaagagagacagagacagagagaggaaggagccctatgaaataccaagttctttaatagggcatggagatcccaaagatgaattagacagaaatcttgcccttaagcaggtcaaaacctactgggtgatccagttcagcaaatctattgaagtcattgagaagagaatggctgtactaaacgagcaggtgaaggaggctgaaggatcgtctgctgaatacaagaaagaaattgaggaactgaaggaactgctacccgaaattacagaaaagacagaagatgcaaaggagtctcagactactgggaatgtagctgaactggctctgaaagctactctgtggaggaggctcttcagtctcctgattgccagtagaaagccaacagatggtgcttcctcatcaaattgtgtgactgatatttctcactttgtcagaaagaagaggaaaccggaggaacagagtccctggaaagatgatgcaaagaaagtcaaacaagagctggaggtgaacggaggcagtggagatgctgtccccagtggaaatgaagttttggaaaacatggaggaggaggctgagaatcgggttgaaagccgggcggcagtggaggggacagtggaggctggagctacagctgaaagcactgcatatatgtatgacatacctgccatgtaccaggagaatacagcagtgagcaaaacagatgaagtttctgacctcatacacaaactagcacaaacagatttgctagcacaagagagagctggaaagagagccagtccccaggatggaggctctgcagaagggcaggctcagagtgaccgccaggaagcaacaaagcagcgacacaaacaggaagctggcgacaggcattatgacaagcaaatgcttgaataccaaggagcacatgagctttacagcagcagggaaaaaagaaaagaaaagaaaaaaaagcccccacatggacgcctgcctccaactccagtggccctgcacggtgcaaaaaggagattgctaacaaaaaggttattcaacgcttctccgaataaacccaaaggccactccacacagttcagtgtgatgagtcaagctgagcagcagcctgttttgaaacatgctgatatctttcacaaataa

SEQ ID NO: 123435 - DNA, 458 bp, Homo sapiens
ggccccagtgttgcgctctctggccgttccttacactttgcttcaggctccagtgcaggggcgtagtgggatatggccaactcgggctgcaaggacgtcacgggtccagatgaggagagttttctgtactttgcctacggcagcaacctgctgacagagaggatccacctccgaaacccctcggcggcgttcttctgtgtggcccgcctgcaggcaagaaggggttaaaagtggaatgtatgttgtaatagaagttaaagttgcaactcaagaaggaaaagaaataacctgtcgaagttatctgatgacaaattacgaaagtgctcccccatccccacagtataaaaagattatttgcatgggtgcaaaagaaaatggtttgccgctggagtatcaagagaagttaaaagcaatagaaccaaatgactatacaggaaagggctcagaagaaaatgaaa

SEQ ID NO: 123436 - DNA, 712 bp, Homo sapiens
gaccggcccacgcttcccgccagtcccctaaccctgaggctgccgcgcggcggtcactgcgccggggtagtgggccccagtgttgcgctctctggccgttccttacactttgcttcaggctccagtgcaggggcgtagtgggatatggccaactcgggctgcaaggacgtcacgggtccagatgaggagagttttctgtactttgcctacggcagcaacctgctgacagagaggatccacctccgaaacccctcggcggcgttcttctgtgtggcccgcctgcaggattttaagcttgactttggcaattcccaagggcaaaacaagtcaaacttggcatggagggatagccaccatttttcagagtcctggcgatgaagtgtggggagtagtatggaaaatgaacaaaagcaatttaaattctctggatgagcaagaaggggttaaaagtggaatgtatgttgtaatagaagttaaagttgcaactcaagaaggaaaagaaataacctgtcgaagttatctgatgacaaattacgaaagtgctcccccatccccacagtataaaaagattatttgcatgggtgcaaaagaaaatggtttgccgctggagtatcaagagaagttaaaagcaatagaaccaaatgactatacaggaaaggtctcagaagaaattgaagacatcatcaaaaagggggaaacacaaactctttag

SEQ ID NO: 123437 - DNA, 1234 bp, Homo sapiens
atggccaactcgggctgcaaggacgtcacgggtccagatgaggagagttttctgtactttgcctacggcagcaacctgctgacagagaggatccacctccgaaacccctcggcggcgttcttctgtgtggcccgcctgcagcttctaattgaaagccccagaatgtcccgattggctaagttttggccacgtacccatgccgtgattttaagcaaaactgagagaaccagcttctggcctttgaagcctcaaaaatgggagtcaggctctgatactccctattcccaaactcgtaaggattttaagcttgactttggcaattcccaaggcaaaacaagtcaaacttggcatggagggatagccaccatttttcagagtcctggcgatgaagtgtggggagtagtatggaaaatgaacaaaagcaatttaaattctctggatgagcaagaaggggttaaaagtggaatgtatgttgtaatagaagttaaagttgcaactcaagaaggaaaagaaataacctgtcgaagttatctgatgacaaattacgaaagtgctcccccatccccacagtataaaaagattatttgcatgggtgcaaaagaaaatggttttgcggttgaagtatcaagagaagttaaaagcaatagaaccaaatgactatacaggaaaggtctcagaagaaattgaagacatcatcaaaaaggggggaaccaccaaactctttagaacataacagaattttatctaagggtacttctatgggctaatattaaaatatttttaacacttgagaacagggatctgggggatctccacgtttgatccattttcagcagtgctctgaaggagtatcttacttgggtgattccttgtttttagactataaaaaaaaactgggataggagttagacaatttaaaaggggtgtatgagggcctaaaatatgtgacaaatgaatgtgagtaccccttctgagaacactaaaagctattcttctgaattaatcttaaagcgttcccttgctctggtaaaagatagaatttgtagctccacttggatgatggtagctgagtgaattgctctgctcctggtcctgagatttttaaaaaatccagccttaatgagagtaatctggcagaccaattggataataaccattttgaaaattggaaagatggtatactgtttttagaggaatacaccgtatttgtggtttaataaaaaaaaaaaaaaaa

SEQ ID NO: 123438 - DNA, 336 bp, Homo sapiens
atggccaacacggctaaacccaattcaaagggctcagtgaatgttctgcaacacagatttgggaacacattgtgtacggatgtggtggcaagaggactggacattcctcaagtcaactggattgttcactatgaccatccggatgaccctaaggaatatattcatcgtgtagtgcctgcctttgttgatctgaatgtcaatggcaatgaaggcaagcagaaaaagcgaggaggtggtggtggatttgactaccagaaaatcaagaaagttgagaagtccaaaatctttaaacacattagcaagaaatcatccgatagcaggcagctctctcattga

SEQ ID NO: 123439 - DNA, 3157 bp, Homo sapiens
  misc_feature (1)...(3157): n = a,t,c or g
aatcaaaacaaaagcccatgaatgtgggcttatcagaaactcaaaatggaggcatgtctcaagaagcagtgggaaatataaaagttacaaagtctccccagaaatccactgtattaaccaatggagaagcagcaatgcagtcttccaattcagaatcaaaaaagaaaaagaagaaaaagagaaaaatggtgaatgatgctgagcctgatacgaaaaaagcaaaaactgaaaacaaagggaaatctgaagaagaaagtgccgagactactaaagaaacagaaaataatgtggagaagccagataatgatgaagatgagagtgaggtgcccagtctgcccctgggactgacaggagcttttgaggatacttcgtttgcttctctatgtaatcttgtcaatgaaaacactctgaaggcaataaaagaaatgggttttacaaacatgactgaaattcagcataaaagtatcagaccacttctggaaggcagggatcttctagcagctgcaaaaacaggcagtggtaaaaccctggcttttctcatccctgcagttgaactcattgttaagttaaggttcatgcccaggaatggaacaggagtccttattctctcacctactagagaactagccatgcaaacctttggtgttcttaaggagctgatgactcaccacgtgcatacctatggcttgataatgggtggcagtaacagatctgctgaagcacagaaacttggtaatgggatcaacatcattgtggccacaccaggccgtctgctggaccatatgcagaataccccaggatttatgtataaaaacctgcagtgtctggttattgatgaagctgatcgtatcttggatgtggggtttgaagaggaattaaagcaaattattaaacttttgccaacacgtagacagactatgctcttttctgccacccaaactcgaaaagttgaagacctggcaaggatttctctgaaaaaggagccattgtatgttggcgttgatgatgataaagcgaatgcaacagtggatggtcttgaacagggatatgttgtttgtccttctgaaaagagattccttctgctctttacattccttaagaagaaccgaaagaagaagcttatggtcttcttttcatcttgtatgtctgtgaaataccactatgagttgctgaactacattgatttgcccgtcttggccattcatggaaagcaaaagcaaaataagcgtacaaccacattcttccagttctgcaatgcagattcgggaacactattgtgtacggatgtggcagcgagaggactagacattcctgaagtcgactggattgttcagtatgaccctccggatgaccctaaggaatatattcatcgtgtgggtagaacagccagagggcntaaatgggagagggcatgccttgctcattttgcgcccagaagaattgggttttcttcgttacttaaaacaatccaaggttccattaagtgaatttgacttttcctggtctaaaatttctgacattcagttctcagcttgagaaattgattgaaaaagaattactttcttcataagtcagccccaggaagcatataagtcatacatacgagcctatgattcccattctctgaaacagatctttaatgttaataacctaaatttgcctcaggttgctctgtcatttggtttcaaggtgcctcccttcgttgatctgaacgtcaacagtaatgaaggcaagcagaaaaagcgaggaggtggtggtggatttggctaccagaaaaccaagaaagttgagaaatccaaaatctttaaacacattagcaagaaatcatctgacagcaggcagttctctcactgaacacatgccttcctttcatcttgaataactttgtcctaaaatgaattttttttccccttgatttaacaggatttttgtagactttagaatttggaacttccctacaaagagtataaattgacttggggttgcaagcactgaggcactgttacttctatcaccgtctctccttttatttctggggatattaaaacagggctttaagtttcttgggttggccccaagggcaggagccaagggaatatctgggtgttttccttgtggatgataataattttaattttaaatatccctccctccatacaagtggtatggtaccattttaatcataattctaattagtacctttccttcttgttttgtgaagatttttgtggcatggattgctgtgctcactgctgtaaaaggtgacctagtgtactgggcagctggtggcggtgcagaaaagagtctcaggttattttagatttgtttaattcaaggtggtttggatttggtaagcctttgcactctgtagagtacttagaagacaagggcaacttacttggagttagagccaagctgtcagacggtgcccagcacacattaatgttagcttctttctgagaaaaaaatacctcttccaggccctgaaacaaaaaatacatttgctgtgaagattgaaaatgaacaaagttagaaaaaaaaacagcaaaatcagtgatttagtcasatgagtttttcgttgtaggagcacttgatttctagtgtgttttgtacagtatataactacaagatagtacattttgtagcagttcaaagccaaagttgctagcatcattttgctgttgtgccagttaatcataggatcccattaaataagtgtgctaacatcgaatatagagaaaactggtaaagaacattccagtaggaaaagaaaagaacaatcttccatttctgggcttggccaccatcaccctggtcggacctgtcctggacttccaaccttgactgctgagctcctggcttagcttcttgggttcctaattcctggtgtttaataattctctccacgatcatgtttttctgattttttttttcagaaataatgttttttaaaagacaaaaacaaagggaagaatatttaattactgagcagaagtaaatactgttggtattttgtacataaacctaatttttatatgcatgtttatgctttttaatttttttatcaaaaattaagtcatctacctactacttgtaaccagcttgtttcataacatgttattttcctgtgtcattaaataattacttcaaaaaaaaa

SEQ ID NO: 123440 - DNA, 2706 bp, Homo sapiens
atggctcagcaggctacgctgtgttctatgaaaggctgcatgagagcacttgtggcccagttaaaatctgagagtgaagacttacagcagacagtgcaggccaagagagaggtgccaaaaagtaaagtccctgctgctgagaagagagagagtgggcctaagcaggctgctgtaaatgctgccgtgcagagggtgcaggtccttccagacgtggatactttgttacacttcgccacagaaagtactccagacgggttttcttgttcctccagcctaagtgctctgagcctggatgagccatttatacagaaagatgtagaattaagaatcatgcctccagttcaggaaaacgacaatgggaatgaaactgaatcagaacagcctgaggaatcaaatgaaaaccaggataaagaggtagaaaagcctgactctgaaaaagacttattagatgattctgatgacgatgatattgaaatattagaagaatgtattatttcagccatgccaacaaagtcatcacgcaaagccaaaaaactagcccagactgcttcaaaattacctccacctgtggcaaggaaaccaagtcagctacctgtgtataaacttctgccagcacagaataggctgcaggcacaaaaacatgttagctttacaccaggggatgatgtgccccgggtgtactgtgtagaagggacacctataaacttttccacagcaacgtctctaagtgatctgacaatagagtcccctccaaatgaattggctactggagatgggtcagagcggtatacagtcaggaaaaagccacaagcctttccgagtgaaaaagatatggaccaagtccaacaagcatcctcgacttcatctggagctaacaaaaatcaagtagacactaagaaaaagaagcctacttcaccagtaaagcccatgccacaaaatactgaatatagaacgcgtctacctaacaatgaagacagagtgcgggggagcttcgccttggactcaccgcatcactacacccctattgaggggacgccgtactgcttttcccgaaatgactccttgagttctctggattttgatgatgacgatgttgacctttccagggaaaaggccgagttaagaaagggcaaagaaagcaaggattccgaagccaaagttacctgccgcccagaaccaaactcaagccagcaggcagctagtaagtcacaagccagtataaaacatccagcaaacagagcacagtccaaaccagtgctgcagaaacagcccactttcccccagtcctccaaagacggaccagatagaggggcagcaactgacgaaaaactgcagaattttgctattgaaaatactccagtttgcttttctcgaaattcctctctgagttcccttagtgacattgaccaggaaaacaacaataacaaagaaagtgaaccaatcaaagaagctgaacctgccaactcacaaggagagcccagtagacagctgagccaacaaaatcttaccaaacaagcaagtttatccaagaatgccagcagtatccccagaagtgagtcggcatctaaaggactgaatcagatgagtaacggcaatgggtcaaataaaaaggtagaactttctagaatgtcttcaactaaatcaagtggaagtgaatcagacagatcagaaaggcctgcattagtacgccagtctactttcatcaaagaagccccaagcccaaccctgaggaggaaactggaggaatctgcctcatttgaatccctttctccatcttctagaccagattctcccaccaggtcgcaggcacagaccccagttttaagcccttcccttcctgatatgtctctgtccacacatccatctgttcaggcagagtccagtgaaaaagcaaaaagtgaggatgaaaggcatgtgagctccatgccagcacccagacagatgaaggaaaaccaggtgcccaccaaaggaacatggaggaaaatcaaggaaagtgacatttctcccacaggcatggcttctcagagcgcttcctcaggtgctgccagtggtgctgaatccaagcctctgatctatcagatggcacctcctgtctctaaaacagaggatgtttgggtgagaattgaggactgccccattaacaaccctagatctggacggtcccccacaggcaacacccccccagtgattgacagtgtttcagagaagggaagttcaagcattaaagattcaaaagacacccatgggaaacagagtgtgggcagtggcagtcctgtgcaaaccgtgggtctggaaacccgcctcaactcctttgttcaggtagaggccccagaacagaaaggaactgaggcaaaaccaggacagagtaacccagtctctatagcagagactgctgagacgtgtatagcagagcgtacccctttcagttccagtagctccagcaagcacagctcacctagcgggactgttgctgccagagtgacaccttttaattacaaccctagccctaggaagagcagcgcagacagcacttcagcccggccgtctcagatccctacgccagtgagcaccaacacgaagaagagagattcgaagactgacagcacagaatccagtggagcccaaagtcctaaacgccattccgggtcgttctgtgtttcctttatgtcttctgcctccaagcttttttccacaagcagttcctga

SEQ ID NO: 123441 - DNA, 387 bp, Homo sapiens
tcagagcagtgaataaaacatccaaggtccctgcaatgtgtggagttcacggtagagatgggaaagaagtaaaggaaggcggcatttgtccagtgcaagtcgtccgttgagtgctctgagcactttacgttttacatcagtatcacagcatgcagccaagcgggtggtcgttattaggccacagggccaatgagatgaaagacacttttgatgagaattctgggacaaaggtctgcgctttttctctttggctacaaagctggatgcttccaggtcagagctattgctcaggttgtcaactgagatgtcttcttctgtctgctttgttctagctgcactggcagccgattggatggtgcccacgtgcattgagggagagtgggtcat

SEQ ID NO: 123442 - DNA, 1027 bp, Homo sapiens
atgacccactctccctcaatgcacgtgggcaccatccaatcggctgccagtgcagctagaacaaagcagacagaagaagacatctcagttgacaacctgagcaatagctctgacctggaagcatccagctttgtagccaaagagaaaaagcgcagacctttgtcccagaattctcatcaaaagtgtctttcatctcattggccctgtgtaccttgtttcctagatcctgtgtcttctttcactatctactctcttgttttgccggagcagttccagatgcttattgagaaagggtgcatgaaagacgtggagagtaaaggaagctcctgtgtccatacttggggcaaacacggggagaaaagggaagggtccacagaagcagggacagcgatagagcatgcagaagaagcccaggcctatagctcacagacagaggtgtcgagcagcaatggctgcaggcaacagcctcagattccaatcaccacaggaacaggtgttgtgtatcctggtgctatcactatggcaactaccacaccatcgcctcagatgacatctgactgctctagcacactcggccagcccggagcccagcctcccggtcatccagagcacttatggtatgaagacagatggcggaagcctagctggaaatcaaatgatcaatggagaggatgaaatggcaatgtatgatgactatgaagatgaccccaaatcagactatagcagtgaaaatgaagccccggaggctgtcagtgccaactgaggagtttttgtttgctgaattaaagtactctgacatttcacccccctccccaacaaagagttattaaagagcccgcatgcatttgtggctccacaattacatcagcagaatggtcttaattgtttcgtaaagtgtgagacagattaagttttccctgatttttcatgaacttgagttttttgttgttattgttattgttgttgttgttgtttttttaatttaggtgaagacatattaaatatgagacaccaggacttgaaactt

SEQ ID NO: 123443 - DNA, 487 bp, Homo sapiens; identical to SEQ ID NO: 118513

SEQ ID NO: 123444 - DNA, 1212 bp, Homo sapiens
cggccccttattcgctccgacaaggtacaaaaaggctctggacggcggcgtggtaggaggacgggagcgggggcgggaagttccctgaaggagcgagacagggagggacagggcagaggaggagaaggaaggcgatgcgacggacaggcgcacccgctcaggctgactctcgggggcgaggtcgagccaggggcggctgccctgggggcgaggcgacgctgtctcaacctccacctcgcggcggaacccgaggacaggagcctcagatgaaagaaacaatcatgaaccaggaaaaaactcgccatacctgcaggcacaaagtgcgcattggtgggaaaggaactgctcgcagaaagaagaaggtggttcatagaacagccacagccagatgacaaaaaacttcagtttctccttaaagaagttaggggtaaaccattatctctggtattgaaggaggtgaatatgtcttacaaaccaaggaaccagtggatccacttttaacaacccctaaaaggttcaggccatctcttgggcagcgaacacttttcacccattaccaggcccatgctggagaccaaagccagctgacaagaaatggctaccccagccatccttaaacccaagcttgggtgccggatagtcctgacttaggtttaagggaagactggcccgaagcttcttgcccccaaacaatcctggtggatggaaaagccacccacttgcctactggcagaggatgatgatgatgaaagttcccagatccttgtggagaattttgatgaggcttcccaagaatgagggcaaacttgaattgaggtcaacttcctgaagataaaaccttgaagaagttacttgggagccgctattttaaaataatgactgctttttaagaaatttttgtttatggatctgataaaatctagatctctaatatttttaagccccaagcccccttgggacactgcagcccttttccagtttttgcttatacacaattccattctttgcagctaattaaggccgcaagaagcctgggaactcaagtttgaaacaaagattaataaagttctttgcctagtatacagttttatttttttatttcattgacaccgatctgtacacagtaaaaaaaattgcttatagaaagctaatcatggcatgtaatatggctgataacctttggaatttgattaaagatttaaaatcaaaaaa

SEQ ID NO: 123445 - DNA, 370 bp, Homo sapiens
  misc_feature (1)...(370): n = a,t,c or g
aggtgcggcaagtctactgcgggctggtccgggctcctcaggttcagacccgaccgttatccagtcggttcgtggagaggagaggtgcactttacaggtccccgatgaaccaagagaaccctccaccatatccaggccctggtccaacggccccatacccacagtacggctggcagggtggacctcaggagcctcctaaaaccacagtgtatgtggtagaagaccaaagaagagatgagctaggaccatccacctgcctcacagcctgctggacggctctctgttgctgctgtctctgggacatgctcacctgaccagaccagcccagccgtcctgtcctgccagctctgctgccacctctgacaggtgn

SEQ ID NO: 123446 - DNA, 738 bp, Homo sapiens
atgaccattctcaatgaatgtggtgagaaggtgatcgggggcaaccctcacttgcaaaccgaggcttttaaaaggcaaaatagaatgttctacataaagtacctgaccaaaacagatttctctatccccaagaagatggaaaaatccaagggcatctttgagtctacgtcccttagtgtcatgaccacactgtcatcacatgacactcagatccacgctggtgcagtcattagggagaccatcattgaagtgctggacctgactgttacttccagcactagttacttccgctccgctcccacccgcgggactcgcgacctgcccctgcccccggctggcccagctcggaataggcagagcagcgcctcagaaacgcagcccaaggcgaagaaatccagaagcctcccgcggacgtcccccggacggggtgtggcgagccccgctccgagcccgccgactcctcgtgagacggaaccgcagcgacgcggagaccctgggctgcgcaacccctgcctgagccaggccagcccgggtgccccccagttctcagggcctccccagggagcccggggacgcgccctgtccgtgcctgatccccgcccggtcccagctgggtcgggccaggtccgctgcacctcacctctcctctcccgaaccgactggataacggtcgggtctgaacctgaggagcccggaccagccgcagtagacttgccgcacctgtctcagagcaagtga

SEQ ID NO: 123447 - DNA, 871 bp, Homo sapiens
gtcaggcgcccggttgctcctcacttgctctgagacaggtgcggcaagtctactgcgggctggtccgggctcctcaggttcagacccgaccgttatccagtcggttcgtggagagcagaggtgcactttacaggtccccaatgaaccaagagaaccctccaccatatccaggccctggtccaacggccccatacccaccttatccaccacaaccaatgggtccaggacctattgggggaccctacccacctcctcaagggtacccctacccaaggatacccacagtacggctggcagggtggacctcagggagcctccttaaaaccacagtgttattgtgggtaggaagaccaaaggaagagatgaagctagggaccatccacctgccttcacagcctgctgggacgggtctttgtttgttgctgtctctggggacatggttcaccttgaccaggaccaggcccaggccgttcctgttcctggccagctctgctgccaacctcttgacaggtgtgccttgcccccatctcttctgattgctgtttaacaaatggactagctttgcacagacacctctaccttcagcactatgggattttagaattaatggggggttgctactggtttaattcagtggacttggatctttttaatggtccaaaaatcccatttcttattggaatctttaaagatgtgctaaatgacttttttggccaaaggcttagttgtgaaaaatataatttttaaattatacattcaaggtagtggccaaatgtaacacatcaatcatggaatgatttctctgcttaacagccgccctgtatggtttcaataaattgtgtccaaagccccaaaaaaaaaaaaaaaaaaa

SEQ ID NO: 123448 - DNA, 524 bp, Homo sapiens
cgccgaaagcgaagaaggaagctcctgcccctcctaaagctgaagccaaagcgaaggctttaaaggccaagaaggcagtgttgaaaggtgtccacaaccacacacacaaaaaagaagatccacacacccctcaccttccagcggcccaagtcactgcgactccggagacagcccaaatatcctcggaagagcgctcccaggagaaacaagcttgaccactatgctatcatcaagtttccgctgaccactgagtctgccatgaagaagatagaagacaacaacacacttgtgttcattgtggatgttaaagccaacaagcaccagattaaacaggctgtgcagaagctgtatgacattgatgtggccaaggtcaacaccctgattcggcctgatggagagaagaaggcatatgttcgactggctcctgattacgatgctttggatgttgccaacaaaattgggatcatctaaactgagtccagctgcctaattctgaatatatatatatatatcttttcaccata

SEQ ID NO: 123449 - DNA, 1197 bp, Homo sapiens
atgctttaccaggttctcatggttgatacctgtgggacacgaggagaaggggcctttctgaagtacagaaagcctgcctgcccaactgccctgggcttcatgtttcccagaagccacggactcaccgctgatactgtcttggtgtccagtctgagtcgctggttcctttggcggcggctgctgctgctgctgctgctgctgctgctgaatctgcccttgcagaaagcggtccatcggaaggcgactccggaaagtgccattgcggactgcagtggcccgcgcgactgtgcgccttgggtaaaatttgctatgctagaattacactccttcaaatgtcccgctggtgaatactggtctaaagacgtctgttgcaagaactgttctgcaggtacatttgtcaaggcgccctgcgaaatcccccatactcaaggacaatgtgagaagtgtcacccaggaacattcacagagaaagataattacctggatgcttgtatactttgctccacctgtgataaaggtgacttctatggcaagaagaccgcagttcacgaagccttgtgtgataacattgacacccggactgtcatggaagagatgcgggctttggtcagtcagtgcaacctctacatggcagccaggaaggctgaacggaggaggcccaaccgggctctgctggagaacattgccatgtacctcacccacatgctgaagatctttggggccatagaggaggagagccccctggggttcccagttggtgggcctggaaccaacctgaaccccattgaaaatggtggtatggacaagtttctgacaactgtgtctgttctgaggaaaacacatcgtgtcagcaacggacagaatagtgtctgccgaagtgtatcctattggaagcccaaatgtaccttttgctccctgacccacatcacctatattaggtacttggagctaaggttgacgctcgagtcaacagtcatgccctaccttcaggtgttatcagaattcagagagggagtacgaaagattgcccgagagaaaaaagttcttgaggttctacagctcagtgatgccctccgggatgacatcctgcctgagcttggggtccggtttgaagaccatgaaggagccctgtctgctcttctgaacgtcctgagttcaaatcccaacaaccacatggtggctcacaaccacccgtaa

SEQ ID NO: 123450 - DNA, 642 bp, Homo sapiens
atggacggtgatgaaaaaacatcttttatctgtgctgtccacaatgggatttttagagaatggaagcaaaccggtacatgtagtcctatcaaaaaggggcagctgcttttacgagtagaatgccatgggaaaataaaggcccagggtggccagatgtatattaaagcagcactgttcacaagagcaaagacatggaatcaacctaaatgcccatcaaatgatagactggataaagaaaatgtgggtccatatataccgtgtgaatactacacagccataaaaaagaagatcatgtcctctgtggaaacatggatggagctggaggccattatcctcagcaaactcacacaggaacagaaaagcaaattccgcacgttctcactttatagcagcagagttttccagaggacacaagacgtgccatatcacaataaactgaatgaagaagcagataaaccaaccacaaacaaaaagggactgatcctaaacctgagactggtgaatacaccaattggcaggaaaaatacaggtaaactttctgctataaaggaaaagttgctcaagaggccaaagaggaaacacctaagtaaaatctatacacttaaaaatgacagcgacttaataaaggacaaaaatatctga

SEQ ID NO: 123451 - DNA, 825 bp, Homo sapiens
atgatcgaatttggatttaattatgtgcctataaagataaccaagaagcaaataagaagcctggagatagttatacccaatgaagacgtaaaagcaccgggtctctggattgatgggaatggtacagttgagggaccaaccctgagaaaggaactgattttgtcttcaaatattggacaacatgatttggacacaaagactaaacagattcagcagtggattaagaaaaaacacctagtccagattaccataaagaaaggaaaaaatgtagacgtgtcagaaaatgaaatggaggagatatttcatcaaatactccagactatgcctggaatagctacattctcatctaggccacaagctgttcaaggaggaaaagctttaatactctccttcctaattcatgcaaaagcctttagtaccgctgaagacacccagaatgaaggaaaaaagacaaaaaagaataaaacagcttttagtaacgttggaagaaaaattagtcagcgagttattcacttatttgatgagaagggcaatgatttgggaaacatgcaccgagcaaatgtgattagacttatggatgagcgagacctgcgactggttcaaaggaacaccagcacagaacctgcagagtatcagctcatgacaggattgcagatcctccaggagcggcagaggctgagggagatggagaaggcgaaccccaaaactggtggttgtcttacccgtgacttcgcctccctcagcgactgccacagaaagacatttgcttatggtagcggtgacaatggagtaaacctgcatcgagtccatatcccacaggattga

SEQ ID NO: 123452 - DNA, 1889 bp, Homo sapiens
tcatgaggaaaaccgcccttttgtgtgtgaacatgtggctgtggcaaaacattgcaaataaaccaagtctcactagcgatgctgttgtacatgtcctggcaagaagaaaatgaagctcaaagtcaaaaaatctcgtgaaaaacggagtttggcctctcatctcagtggatatatccctcccaaaaggaaacaagggcaaggcttatctttgtgtcaaaacggagagtcacccaactgtgtggaagacaaaatgctctcggcagttccagtacttacccttggctaagaactgccctgctttgtttaaaggactgcagaccaaggagcgagctttctctcagaggcatatttttccgtattaaaattactgatgcagaacatttgattccttatcatttccatggtctttgttcaaagggtctctttcctgggtctcttgagtttctcgatatgccttctcttcctttttgctcaaaggacaaagaacccacattaaagcttttcctccttgaacagcttgtggcctagatgagaatgtagctattccagggcatagtctggagtatttgatgaaatatctcctccatttcattttcttgacccggttacacttttttcctttctttatgggtaatctgggactagggtgttttttcttaatccactggctgaatctgtttaggtctttgtggtccaaatcatggttgtccaatatttggaagaccaaaatccagttcctttctcaggggttgggtcccagttttgggggttccgccttctccatctccctcagcctctgccgctcctggaggatctgcaatcctgtcatgagctgatactctgcaggttctgtgctggtgttcctttgaacccagtcgcaggtctcggtcatccataagtctaatcacatttgctcggtgcatgtttcccaaatcattgcctttctcatcaaataagtgaaataactcgctgaactaatttttccttcccaacgttactaaaagctgttttattccttttttgtcttttttccttcattcctgggtgtcttccagcggtacttaaaggcttttgccatgaattaggaaggagagtcttggggcagaagcaataggggacaactgtgctggtgctgtcttttgcaggatgtgtttaccaaaaacatctaatgcaactattttcaggactttacaggtttgtaggtgttaacctctttagaaaaagagcagccatccttttttaggaagaactgtaatcatccccagttgatgaggagaagctcttctgtagagaagaatgacagttgaaactgagacttctcagtaagagaacttcgtttacttggttcaagtcttaagccacggagcccactaaatgacgaatgagaaaaaaaatcccagtcacttcgcgaccttcccccataaggcctcctcccgcaacagcaggcagcaagaacaacgcatttgtccagcatgtcctgcgcaggcgcccttcgcctggctcgctctgccccacctgtgccaggcagtaagccgcaagagcacttccgggagcccccgacccggttgttggctattgatttgttctttaaaaatgtattaattattgaacacccgtataaccataacctagatttagcaaatgctgccaccaccctggcagaccttccacacccttatcctggacctataaaaacccgagaccctagcaggcagacacacaagccgctgtacgtggagaaaaacaaatcgatgaaagaagacaagcggctgacatcgagagacatcaaggggagcatgccggcagaagagcactcagacagatgctggcaggccattgacccgcggaaggaggcggagtttggacggggcagtctgaggagagcctag

SEQ ID NO: 123453 - DNA, 2712 bp, Homo sapiens
gacccctgccagctgccgcgagtctccgctgctggaatcttgttagcggctgtctttttggagggttctggtttcccgacatttttgtttccagcccaggagaggatatcgtgattttccccccttgagcccaggctctgctctctgggggggtggggggcgctccaagccggggagccgtgccagccgagtcgtgcgggctgtggcagggaaggggccaccatgggatgtactctgagcgcagaggagagagccgccctcgagcggagcaaggcgattgagaaaaacctcaaagaggatggcatcagcgccgccaaagacgtgaaattactcctgctcggggctggagaatcaggaaaaagcaccattgtgaagcagatgaagatcatccattgaagatggcttctccggagaagacgtgaaacagtacaagcctgttgtcttacagcaacactatccagtccctgggcagccatcgtacgggccatggacactctgggcatcgaatatggtgataaggagagaaaggctgacgccaagatggtgtgtgatgtggtgagtcggatggaagacaccgagcccttctctgcagagctgctttctgccatgatgcggctctggggcgactcaagaatccaagagtgcttcaaccggtcccgggagtatcagctcatcgactctgcccaatactacctgggacagcctgggatcggattggggccgccgacttaccagcccaccgagcaggacatcctccgaaccaggggttcaaaaccacttggcatcgtagaaacccacttcacattcaagaacctccacttcaggctgtttgacgtcggaggccagcgatctgaacgcaagaagtggatccattgcttcgaggacgtcacggccatcattttctgtgtcgcgctcagcggctatgaccaggtgctccacgaagacgaaaccacgaaccgcatgcacgagtctctcatgctcttagactccatctgtaacaacaagttgttcatcgatacctccatcattctcttcctcaacaagaaagatctctttggcgagaagatcaagaagtcacccctgaccatctgctttcctgaatacacaggcaacaatacctatgaagacgcagccgcctacatccaaacacaattttgaaagcaaaaaccggctaacccaaacaaaagaaatatattggcaacaatgacttgtgcccacagacacgaaataacatccccaggtggtgttcgacgccgtcaccgacatcatcattgcccaaccaacctccggggctgcgggcttgtacttgacctcttgttcctgtattagcaacctatttgactgcttcacgggactctttgcctgttgacgttgatctccctggtagcatgaccttttggcctttgtaagacacacagcctttctgtatcaagcccctgtctaacctacgaccccagagtgactgacggctgtgtatttctgtagaatgcttgtagaatccgggttttagttgagtcttcacatttagaatttgaaaggaaaaacagaacatttctgcatgtgctttgtagcttaaaaaaaggaaaactcaccatttcatccatatttctttttcttggcaaaacaaacatacccatctggcaccgacggcctgcccccgtcccacctcgcggcgcagcccctggagctcctgctggggggcagggcccatctgccgcctggggctccggtgcggtgcactggtccgaggagtgtgctcaggccgggctttccagaaggccacaggcatctggcaaaccctgcttgcctgccggccgcccagacaccacagacgccacctggcggccctgaaggccactcccgccacacggttcactccaggttcgtatagaaaaagcacagctctcactggccagtagctgccaaaaagaacacccatcgtataaggaaatccagcccccatagaaaacaatctgcccaccgaccccctttctaaggatagccctttgtaggggttttttggttcctttttttttttttttcagtttttgtttttacttttgtcccgcccgagtactatgtattaccagcccccccaccccacagatcagttttcctagtctttgggaaacgggttgtgtttttttttcctttgccgtgttggatttccggtcccggctgacacctcccttcgtgtgtgcgcccccttcccccacccctgccttttgtttcggtgccctgtgtcccgtctctctcatgtggggatgtttgtgctgcagacaaaaagaacaaaaaaaaatttttaaataccacaagatggaaaaaaaaaacaaaaaaattttaaaaagatggaatgtagtgtttacattaaagcccgcccgttttccatgaccaatccctatgtcatttctactttgactaatacccaaaccctaaacctcttcacggtttcacttttaagacttaatctttgctgaagaagaccagtcacagccatttcaaataaagaggaggcaaaaagacaaaacacacaaaaaattaaaaaaaaaaacttaaaaaaaaaaggaaaaaagaaaaaaaagcccacgggtctttgtaagcctttctattcccaatcggtgaggtttctgtgatatcttacacactgccagtctacttctctgactaatggaaaattcctgtgtagctcaataaaagagaatgtttgtctgt

SEQ ID NO: 123454 - DNA, 412 bp, Homo sapiens
ccatgtgtgctgctcggctagcggcggttgcggttgcccagtcggtgtatgccttctcggcgcgcccgctggccggcggggagcctgtgagcctgggctccctgcggggcaaggtactacttatcgagaatgtggcgtccctctgaggcaccacggtccgggactacacccagatgaacgagctgctgtctcaagggctcagctgtgcctagggcgcccctcctaccccggctgcttggcagttgcagtgctgctgtctcggtggggttttcatctatgaggggggttcctctaaacctacgagggaggaacacctgatcttacagaaaataccacctggagatgggtgctgggttctgttattccatattttcccaaaccaatgctgtcttcctcattattatatggcttt

SEQ ID NO: 123455 - DNA, 289 bp, Homo sapiens
  misc_feature (1)...(289): n = a,t,c or g
aggggcgccctaggcacagctgggcccttgaaaacagcagggcttcgatgtcaggctcgatgtcaatggtctggaancggggggtcggtnataagcncggtgncgtcgtcgctgggagctggcagggcctcccgcagctganacttgtggcctcttggcggggctgtgcctcggacccgtagatggaccnagataggtcgggccccgagcnagagctnagatccctctggggctgggaccaaacccgcctttcccaggtgtacggtactccactggatatgctctcagg

SEQ ID NO: 123456 - DNA, 987 bp, Homo sapiens
  misc_feature (1)...(987): n = a,t,c or g
agtgtggtggaattcccgccgccggccagttaaaaggaggcgcctgctggcctccccttacagtgcttgttcggggcgctccgctggcttcttggacaattgcgccatgtgtgctgctcggctagcggcggcggcggcggcccagtcggtgtatgccttctcggcgcgcccgctggccggcggggagcctgtgagcctgggctccctgcggggcaaggtactacttatcgagaatgtggcgtccctctgaggcaccacggtccgggactacacccagatgaacgagctgcagcggcgcctcggaccccggggcctggtggtgctcggcttccccgtgcaaccagtttgggcatcaggagaacgccaagaacgaagagattctgaattccctcaagtacgtccggcctggtggtgggatcgagcccaacttcattgctcttccataagagcgaggtgaaccggtgcgggggcgcaccctctcttcgccttcctgcgggaggccctgccagctccccagcgacgacgccaccgcgcttatgaccgaccccaagctcatcacctggtctccggtgttcgcaaaaancccggaaaaattaagttttttttgggcccccctgggaacttctttgagaagttcctcggtgggccctgcacggtgttgcccctacgcaggtacagccgccgctttccagaccattgacatcgagcctgacatcgaagccctgctgtctcaagggcccagctgtgcctagggcggcccctcctacccacggctgcttggcagttgcagtgctgctgtctcgggggggttttcatctatgaagggtgtttcctctaaacctacgagggaggaacacctgatcttacagaaaataccacctcgagatgggtggtggtccctgttgatcccagtctctgccaagaccaaggcgaagtttccccactaataaagtgccgggtgtcagcagaaaaaaaaaaaaaaaaaaa

SEQ ID NO: 123457 - DNA, 1131 bp, Homo sapiens
atggaatactatgcagccgtaaaaaaggatgagttcttgtcctttgcagggacatgggtgaagctggaaaccatcattctcagcatactaacacaggaacagaaaaccaaacacctcatgttcgcactcataagtgggaggaacctattcaatcctgggaatggaaaaattcctccaacccccaacccgggcttctacactgatacagagagccacccagagtttttgtggaggcaaacactcaagtccacaggggcctccacaagccttagaccctggagcagcccagtctcggctgccatatccccaaaagaggccgcggctgtggtgcccgggagcagaagcaccctgacggtggatcagacgactccacccatccacactgttccctccgccgggaaggccatgcctgctggggctaacagcacagtaggcctgcttctgcctgaactctgctggcaggcacagccccatgatttcccgggaagcacctggatggtggattggctgtggctcttgcatgagggagccctgcagaccagaacacctaacaaaggaaatgcaggcatggagtcagtgatcagaggtgctctccaaggcccaggagcagacaagaccataaattcaaaggagagagctgacatgaccaagcaacattttatggaagagctggaaatcgaggggaaccttgaaataaggacaagacatcctcttccccatggctatgtgttaacaaagcggcagcaagcatgtgtatccatcaggtattcagtgaacagtagagactatttttgctgtagtgcggacttttgcataggcaaacaacagaagcgcactgacgtctctccctactggctgctgatgcatgctgatgctgacgctacctgtgggtgttctcacctccaaggacccagaatctcgtttgctagagggagaggcaggtgccaagagcagtggggcttgtgtggagtcgatgtgacatcagccttagtgaccaatagctctggccaacttatagggccatgtctgaaccttggggacaccttgtctgatggttgcactcagattgcatgccatagggattggttatttctacagaacaatgtagaggctgcctctctggaggggtaa

SEQ ID NO: 123458 - DNA, 438 bp, Homo sapiens
tcatgagcccgttgtgaccacccgacagcattcgtcgtgtgctatagattttatccttggcctgctggacatgttgatgccgctgtccattgatatgtatgtgcccgcgctaccgatagtttcatcgcagtttggcgtaccttgctcaagggcacgattatcatcttgcatgagtcttcgatccatgataacttcaatctgacctcccaaaagctgtgggcattcgtaccaaacaaggctccccggacttctggcatcatctgctggcctgagatccagtctgcttttcagggtggtggaaacctttattttacaatccccattgtggatcgtaactccaccaactatgttctcaggcaggtacgactcctgggcaattgagacattaacaatcgtgtgtggtgcggatcttgtacatagagactgtctttgcaccat

SEQ ID NO: 123459 - DNA, 734 bp, Homo sapiens
cggctggacactgtcacactttcagaagaactggaggtgggtcctgatcatattacatgaagctttccaccattgtgaacaattaggcaaggcatgagtgacagaggggcatcgctgataaatacagagcaatactggggcagtgaagaggaagctacagagacattcgtgtttcttcaaatatcagaagcttccacatcacagcaggagagctgacgacgagctcctcctcctgaaggcttagtccaaaaacttcctgttggcatttgcaccaaacaaggctccccggacttctggcatcatctgctgggctatgagatccagccggctttccagggtgttggaaacctttattttacgatctccattatagatctcaactccaccagctatgtcttcaggcaggtaggactcctggtcaatttggacatcaacatcgtttttggtggcaattttgtacataggaattgccttctgcactgcagcctttaccagagggaaatcttgtttcctgcaacgaacaatcattcggggctccagcaactggtacaaaccctggagaaccagtccatccagcagcacttggtacctggttgtatcttttaccaccttgctgagtctctgttttgcttcatttagtaggtctgtgataaggtcatctcttgctctgaggacaatagatctcgcttgattcatcaaattggacatctgaattttcttctgctgctcaatcg

SEQ ID NO: 123460 - DNA, 1065 bp, Homo sapiens
atggaatactatgcagtcataaaaaaggatgagttcatgtcctttgcagggacatggatgaagctggaaaccatcattctcagcaaactaacacaggaaccagaaacccacccccctcatgttctcactcataagtgggagctgaacaatgagaacacatgggcacagggaggggaacatcacacactgaggcctttcagggagtgggggcccaggggagtgatagcattaggagaaatatctaatgtagatgatgggttgatgggtgcagcaaagagaggtggagaaaacaggagaagggataactacgacttttgtcctcaaataccaggaaaactacctgtgaatacgggacctttcatgacaaagggactttgcagatgtgattcagttaaggatctgtggatgggaagcttatctggacacagccagtgtaatcataagagtccttataataaaggggcaggagagtttacagcagagagaaggcgaggtggcagtagcagcaggggtcggagtaatgccattgctgaagagggctggaaagttattttgctgcctaaacagtttaaagcagtggttctaaacctctttcagcaattaggcaaggacattagtgacagaggggcatccactgaaaaagacagagcaatactcgaacagcaaagaggaagccacttagacattcttgtttcttcaaatatcagaagcttccacatcatagcaggagggctagggatggacttcacctcccaaaagctgttggcatttggaccaaacaaggctccccggacttctggcatcatctgctggcctgagatccagtcggcttttcagggtgttggaaacctttattttacaatccccattgtggatctcaactccaccaactatgtcctcaggcagaagcatagagaggaagctattgcttatgaaaaggcacaggacgaggaaatagctcaaggggccaatgacagggtggggaacagggactcaaagaagtccatgggtagcaggacagtgtgtcagtgtcttcagaatatatctacaatgcatgctgtctaa

SEQ ID NO: 123461 - DNA, 2055 bp, Homo sapiens; identical to SEQ ID NO: 117491

SEQ ID NO: 123462 - DNA, 352 bp, Homo sapiens; identical to SEQ ID NO: 117493

SEQ ID NO: 123463 - DNA, 1446 bp, Homo sapiens; identical to SEQ ID NO: 117500

SEQ ID NO: 123464 - DNA, 177 bp, Homo sapiens
gcacaaaaatagagcattaaaccaccaaagctaagaaccctcacggagtccattgcacccaccccttgccacctccaccagaacaagcactggtatccacagctgagagacccatagacagttcacatcacaggactctgtgcagacaacccccagtatcagcccagagccaggtag

SEQ ID NO: 123465 - DNA, 3021 bp, Homo sapiens
atgagtgaactcccattcacaattgcttcaaagagaataaaatacctaggaatccaatttacaagggatgtgaaggacctcttcaaggagaactacaaaccactgctcaacaaaataaaagaggacacaaacaaatggaagaacattccatgctcatggataggaagaatcaatatcgtgaaaatggcccatactgcccaaagtaatttatagattcaatgctatccccatcaagctaacattgactttcttcacagaattagaaaaacctgctataaatttcatatggaagcaaaaaagagcctttatagccaagacaatcctaagccaaaagaacaaagctggaggcatcacactacctgacttcaaactatactacaaggctacagtaaaaaaaaaacagcatggtaccagtaccaaaacagagatatagaccaatggaacagaacagagccctcagaaataatgctacacatctacaaccatctgatctttgagaaacctgagaaaaacaaacaatggggaaaggactccctatttaataaatggtgttgggaaaactggctagccatatgaagaaaactgaaactggatcccttccttacaccttatacaaaaattaattcaagatggattaaagacttaactgttagacctaaaaccataaaaaccctagaagaaaacctaggcaatacaattcaggccataggcatgggcaaggacttcatgactaaaacaccaaaagcaatggcaacaaaagccaaaattgacaaatgggatctaattaaactaaagagcttctgcacagcaaaagaaactaccatcagagtgaacaggcaacctacagcatgggagaaaatttttacaatctactcatctgacaaagggctaatatccagaatctacaaagaactcaaacaaatttacaagaaaaaaacaaacaaccccatcaaaaagtgggcgaaggacatgaacagacacttctcaaaagaagacatttatgcagccaaaaaacacatgaaaaaattctcatcatcactggccatcagagaaatgcaaatcaaaaccactatgagatatcatctcacaccggttagaatggtgatcattaaaaagtcaggaaacaacaggtgctggagaggatgtggagaaataggaacacttttacactgttggtgggactgtaaactggttcaaccattgtggaagtcagtgtggcaattactcagggatctagaactagaaataccatttgacccagccatcccattactgggtatatacccaaatgactataaatcatgctgctataaagacacatgcacacgtatgtttattgcggtattattcacaatagcaaagacttggaaccaagccaaatgtccaacaatgatagactggattcagaaaatgtggcacatatacaccatggaatactatgcagccataaaaaaggatgagttcatgtcctttgtagggacatggatgaaattggaaatcatcattctcagtaaactatcgcaagaacaaaaaaccaagcaccgcatattctcactcatagcttctaatagagctgtaacactcatcacatggcccaagattccattccttggaatccgtgaggccaagaaccccaggtcagagaacacgaggcttgccaccatcttggaagtggcccaccgccatcttggaagtggctcgccaccatcttgggagctctgtgagcaaggacccccggtaacattttggcgatcacaaagggacctccaaagtgctgtacctagcccttatactctgctttcccaaataccagaggaagcagagtggtttacagtcctggacgttaaggatgcctttttctgcatccctgtacatcctgactctcaattcttgtttgcctttgaagatccttcaaacccaacgtctcaactcacctggactgttttaccccaagggttcaaggatagcccccatctatttggccaggcattagcccaagacttgagccaattctcatacatggacactcttgtcctttggtatggggatgatttaattttagccacccattcagaaaccttgtgccatcaagccacccaagtgctcttaaatttcctcactacctgtggctacaaggtttccaaacgaaaggctcagctctgctcacagcaggttaagtacttagggctaaaattatccaaaggcaccacggccctcagtgaggaatgtatccagcctaaactggcttatcctcatcccagaaccctaaagcaactaagagcattccttggcataacaggcttctgccaaatgtggattcccaggtacagcaaaatagccaggccattatatacactaattaaggaaactcagaaagccaatacccatttagtaagatggacacctgaagcagaagcagctttccataccctaaagaaggccctaacccaagccccagtgttaagcttgccaacagggcaagacttttctttatatgtcacagaagaaaaaggaatagctctaggagtccttatacaggtccgagggacgagcttgcaacctgtggcatacctgaataaagaaaatgatgtagtagcaaagggaactagtgctcagctggcagaactaatagccctcactcgggcactagaattaggagaagggaaaagtgtaaatatatatacagactctaagtatgcttacctagtcctccatgccaaggaagcaatatggagagaaagggaattcctaacttccaaggaaacacctatcaaacatcaggaagccattaggagattactactagctgtacagaaacctaaagaagtgacagtcttacactgcccgggtcaccagaaaggaaaggaaaaggaaataggaaggaaccaccaagcggatattgaagccaaaagagccacaaggcaggactctccattagaaatgcttatagaaggacccttagtatggggtaatcccctccaggaaaccaagccccagtactcagaagaagaaatagaatga

SEQ ID NO: 123466 - DNA, 1966 bp, Homo sapiens
ctatattagtctccttgatctggccaatagagattccacctcagggcttgtttcctctgcttgaagctctcctttcccacatggctgcatggctcatgcctctttcaggtcacctttatgagagaggacaggcactggtatccacggctgagagacccacagatggttcacatcacaggactctgtgcagacaacccccagtaccagaccagagccaggaagccacatccataggaagagggggagagtactacatcaagagaacacgcagagggacaaaagaatctgaacaacagccttcaaccctagaccttccgtctgacggagcctacccaaatgagaagaaaccagaaaaccaatcctcataatatgacaaaacaaggctcttcaatacccccccaaaaaaatcacactagttcaccagcaatggatccaaaccaagaagaaatccctgatttacctggagaagaattcaggagtgaataaaatacctaggaatccaacttatgagggatgtgaaggaccttttcaaggagaactacaaaccactgctcaacaaaataaaggaggacacaaacaaacggaagatcattccatgctcatggataggaagaatcaatattgtgaaaatggccatactgcccaagctgtacctaacccttacactctgctttcccaaataccagaggacgcagagtggtttacagtcctggaccctaagcatgccgttttctgcatccctgtacatcctgactctcaattcttgtttgcctttgaagatccttcaaacccaatgtctcaactcatctggactgttttaccccaagggttcaggaatagcccccatctatttggccaggcattagcccaagacttgagccaattctcctacctggacactcttgtccttcggtacatggatgatttacttttagccacccattcagaaaccttgtgccatcaagccacccaagcactcttaaatttccttgctacctgtggctacaaggtttccaaaccaaaggctcagctctgctcacagcaggttaaatacttagggctaaaattatccaaaggcaccagaaccctcagtgaggaacgtatccagcctatactgggttatcctcatcccaaaaccctaaagcaactaacagcgttccttggcataacaggtttctgccaaatatggattcccagcatactcactgctaaaggagacttgtggctgtcagataaccatttacttaaatatcaggttctattacttgaagggccagtgctgcaactgcgcacttgtgcaactcttaacccagccacatttcttccagacaatgaagaaaagatagaacataactgtcaacaagtaattgctcaaacctacgccactcgaggggaccttttagaggttcccttgactgatcccgacctcaacttgtatactgatggaagttcctttgtacaaaaaggacttcaaaaagcgggatatgcagtggtcagtgataatggaatacttgaaagtaatcccttcactccaggaactagcactcagctggcagaactggtagccctcacttgggcactagaattcggagaaggaaaaagggtaaatataaatacaggctctaagtatgcttacctagtcctccatgcccatgcatcaatatggagagaaagggaattcctaacttccgagggaacacctatcaaacatcaggaagccattaggagattattattggttgtacagaaacctgaagaggtggcagtcttacactgctggggtcatccgaaaggaaaggaaagggaaatagaagggaactgccaagcggatattgaagccaaaagagcctcaaggcaggaccctccattagaaatgcttatagaaagacacctagtatggggtaatcccctctgggaaaccaacccccagtactcagcagaagaaatagaatggggaacctcatga

SEQ ID NO: 123467 - DNA, 474 bp, Homo sapiens
tcagatgttgcccttgtccacgtgtccatcacatgcacatttctgccagagcggagataaggccccctcctcggccccctccttttctgctgctgcttgtttttctttttcagacagggccttgcagtcacccaggctgttctcctcctccagctcatccttcctgttcatcatggccacagtggcctggcgcagttcacctgtttcggttttgctggcaaagcccgctgcctgcttgatcgctgccgctgtgagtgccaatcctcgactcctcttcaagccatgctgcaggacggcttcaaactgggcacacagacaggtgaccctctgccagtggtcagaactttcttcttgcttctggccagagtaaaagcaactgtcagtgttggctgacagtggcttgctcgggcagttgttgcctgggggtggggatgccgtagctgggacattgccgtggcatttgtaaactgtcat

SEQ ID NO: 123468 - DNA, 1587 bp, Homo sapiens
tcacttggactcggaatcaggaaaccaggggttgtaacccagactctgccaccaaccaacaacgttgcttagagaaattacttctgccttcaggatctcagtgtcctcgtctacaatcatccatgcaccacgtgggacaacagaggaattttcaatgcccaatgtagttagtgatagagctaacggctgagagtggccggagggtggtggccggtacagcagtgtacccagtgcagtccaccacgcccgcacttgtctggcagcagagttgagcggcacttccaggccccaggaaccacgggcacttcctcctgaaactggggtggctacagctgaagctgagaagagcaaccagcctgctgctatttccaaaaccaaatgggcagggggctccgctgcagagggctcgccgaggctctcgccttcacccggcgccgcgcaggtgcccgctctccccatgcaggacatgtcagaagggtcctcttccccttctccaccgggggggcacatttggttggcgagtttgacgccctgcagcctggctctgtggaacagttgctgccaaagcccggggagccagccacgggggcgagatgaaggagattgtctggtgagagccacagagccatctgccaccggccccgacccccgcaggacgcgcctgtgctccatttctgcatctctcgtggtccgtaatactccagatccaggaatttctgacaggagaccagggatttctgacaggagaccaggaacttctgacaggagaccagggacttctgacaggagaccagggatttctgacaggagaccaggaacttctgacaggagaccagggacttctgacaggagaccagggacttctgacaggagaccaggaacttctgacaggagaccagggatttctgacaggagaccaggaacttctgacaggagaccagggatttctgacaggagaccagggacttctgacaggagaccagggatttctgacaggagaccagggacttctgacaggagaccagggacttctgacaggagaccagggatttcacgtctaccacgtgactggattcctgcggccgccgcgagccgggagaattctaatagcgcagatgcccggaaccgctgcagcagcccgagccggaagtgccagactcctacttcccaccggatgcggggctcggcaggctcggtaggctcctccgcaggccacacagccggcggcacaggcctcccaactccttccaggtgttcccaggccttgcaggtgttcccagcggtactggggaagaggggcttcttatcatgggagagatctctgaagcagagggacatcaggggccctgatttctcaagcacggcgctcatataaccctcaagccctttgagggcagctccagaatccagctctgcctgcttggtctttgaattcctagagcctgctctcaggaatggccttgacagagccgacttcccgctggaaggatactgggggctcctccagcacattctctcacagggggcagcacttagagcccaaaacgggaagggaaggagggtctggctcgagtggcaggaccccat

SEQ ID NO: 123469 - DNA, 524 bp, Homo sapiens
agaaatttacaattgagtatctggtcatgaagttcctaaaagctgttagccatgcaatttccaaatccaagaaatggaaactaattttgaaagaactgaaatttgaggtgggtggacccttgccactacacttcttaaggcaagcatcaaaagccaggaaggctgatgttgaacagcacactttagccaaatatttgatggagctgactctcattgactacgatatgatgcattatcatccttctaaggcagcaacagctgcttcctgcttgtctcagaaggttctgggccaaggaaaatggaacttaaagcagcagtgttatacaggatacacacagaatgaagtattggaagtcatgcagcacgtggccaaaaatgtgctgaaagtaaacgaaaacttaactaaattcatcgccatcaagaataagtatgcaagcaacaaattcctgaagatcagcatgatccctcagctgaactcaaaagccatcaaagaccttgccttccctctgatgggagggtcctag

SEQ ID NO: 123470 - DNA, 849 bp, Homo sapiens
atgctgtgtgacttccaagatgggtcaactagcagacatgtgaatgagccttcaaataatcccagccctcagccttggagcgaagaccagggccaagccagcgctacagtgccctgtgcgaaatctgtaatgcacagactcaagaaatttacaattgagtatctggtcatgaagttcctaaaagctgttagccatgcaatacagatggaaatgttggctccaaagggtccttctcccatacctgaggatgcctccgtgaaagaagagaacatctgccgagctttttctgatgctttgctctacaaaattgaggatattgataacaaagattggaataaccctcagctctgcagtgactatttaaggacaatgcttatactagtttccaaatccaagaaatggaaactaattttgaaagaactgaaatttgaggtgggtggacccttgccactacacttcttaaggcaagcatcaaaagccgggaaggctgatgttgaacagcacactttagccaaatatttgatggagctgactctcattgactacgatatgatgcattatcatccttctaaggcagcaacagctgcttcctgcttgtctcagaaggttctgggccaaggaaaatggaacttaaagcagcagtgttatacaggatacacacagaatgaagtattggaagtcatgcagcacgtggccaaaaatgtgctgaaagtaaatgaaaacttaactaaattcatcgccatcaagaataagtatgcaagcaacaaattcctgaagatcagcatgatccctcagctgaactcaaaagccatcaaagaccttgccttccctctgatgggagggtcctag

SEQ ID NO: 123471 - DNA, 1526 bp, Homo sapiens
gaggctacagcgtcgaagatccccagcgctgcgggctcggagagcagtcctaacggcgcctcgtacgctagtgtcctcccttttcagtccgcgtccctccctgggccgggctggcactcttgccttccccgtccctcatggcgctgctccgacgcccgacggtgtccagtgatttggagaatattgacacaggagttaattctaaagttaagagtcatgtgactattaggcgaactgttttagaagaaattggaaatagagttacaaccagagcagcacaagtagctaagaaagctcagaacaccaaagttccagttcaacccaccaaaacaacaaatgtcaacaaacaactgaaacctactgcttctgtcaaaccagtacagatggaaaagttggctccaaagggtccttctcccacacctgaggatgtctccatgaaggaagagaatctctgccaagctttttctgatgccttgctctgcaaaatcgaggacattgataacgaagattgggagaaccctcagctctgcagtgactacgttaaggatatctatcagtatctcaggcagctggaggttttgcagtccataaacccacatttcttagatggaagagatataaatggacgcatgcgtgccatcctagtggattggctggtacaagtccactccaagtttaggcttctgcaggagactctgtacatgtgcgttggcattatggatcgatttttacaggttcagccagtttcccggaagaagcttcagttagttgggattactgctctgctcttggctccaaagtatgagaaaatgttttctccaaatattgaagacttttgtttacatcacagacaatgcttatcccagtttcccaaatccgagaaatggaaactctaattttgaaagaattgaaatttgagttgggtcgacccttgccactacacttcttaaggcgagcatcaaaagccggggaggttgatgttgaacagcacactttagccaagtattttgatggagctgactctcatcgactatgatatggtgcattatcatcctttctaaggtagcagcagctgcttcctgcttgtctcagaaggttctaggacaaggaaaatggaacttaaagcagcagtattaccacaaggatacacaagagaatgaagtattggaagtcatgcagcacatggccaagaatgtggtgaaagtaaatgaaaacttaactaaattcatcgccatcaagaataagtatgcaagcagcaaactcctgaagatcagcatgatccctcagctgaactcaaaagccgtcaaagaccttgcctccccactgataggaaggtcctaggctgccgtgggccctggggatgtgtgcttcattgtgccctttttcttattggtttagaactcttgattttgtacatagtcctctggtctatctcatgaaacctcttctcagaccagttttctaaacatatattgaggaaaaataaagcgattggtttttcttaaggtaaaaaaaaaaaaaaaaaa

SEQ ID NO: 123472 - DNA, 1878 bp, Homo sapiens
gagccagagaagcagcagttatatgacataccagccagccccaagaaggcaggactccatcccccagacagccaagcaagtgggcagggtgttcccctgatatcagtgactaccttaagaagaggcggttacagcacattaccaaatcctcagaaatcggaatggatttatgacactccagtgtctccaggaaaggccagcgtcagaaacacgcctctcaccagctttgcggaagaatcaaggccccacgctctccccagttccagctccactttctacaatcctccaagtggcagatccaggtccctcactccacaactgaataacaatgtgcccatgcagaaaaaactcagccttccagaaattccttcttatggctttcttgtacccagaggcacatttcctttggatgaagatgtcagctacaaggttccttcaagctttctgattccccgagtggaacagcagaacaccaagcccaatatttatgacatccctaaagcaacgtcgagtgtttctcaggctgggaaggagctggagaaagccaaggaggtgtcagagaattccgcgggccataattcctcatggttctccagacggacaacttccccatctcctgaaccggacagattatcaggttccagttctgacagcagagctagcatcgtttcctcgtgctccaccacatccaccgacgactcctccagctcttcctcggaggagtcagcaaaggagctctccttggacctggatgtggccaaggagacagtgatggctctgcagcacaaggtggtcagctctgtcgctggcctgatgctctttgtcagcaggaagtggagattccgagactatctggaggccaacattgatgcaatccacaggtccactgatcacatagaagaatctgtaagagaatttctggattttgcccgaggagtccatgggactgcctgtaacctcactgacagtaaccttcagaacagaattcgggaccagatgcagaccatctccaactcctaccgcatcctgcttgaaacaaaggaaagcttggataatcgcaattggcctctggaagttcttgtgactgacagtgtccagaacagcccagatgaccttgagaggtttgtcatggtggcacggatgcttccagaagacatcaagaggtttgcctccattgtcattgccaatggaaggctcctttttaagcggaactgtgaaaaggaagagactgtgcagttgaccccaaatgcagaatttaagtgtgaaaaatacatccagcctccccaaagagaaactgaatcacaccaaaagagtaccccttccactaagcaaagggaagatgaacactcttctgaactattaaagaaaaatagggcaaatatctgtggacagacattgcctaacttagaagagaaagataaacctatcttggaacaaaggttagatgaaaacaaagacttaggaaccatgaatcctggccctcttatacctcagccttcgagtcaacagactcctgagaggaaaccccgcttatctgaacactgccggctctactttggggcgctcttcaaagccatcagcgcatttcacggcagcctcagcagcagccagcccgcggagatcatcactcagagcaagctggtcatcatggtgggacagaagctggtggacacgctgtgcatggagacccaggagagggacgtgcgcaacgagatcctccgtggcagcagtcacctctgcagcctgctcaaggacgtagcgctggccactaagaatgccgtgctcacgtaccccagccctgccgcgctggggcacctccaggcggaggctgagaagctggagcaacacacgcggcagttcagagggacactgggatga

SEQ ID NO: 123473 - DNA, 2016 bp, Homo sapiens
atgggcctgaagtcatggggaggaatgggccttgggacagcatttggaaagggtctgcggggggagaaagcttggtgtgtttctgggaggtaccactggcggtacagccagtggtccgggacactcactcaaggtccctgggtgtggcgggtgcatagcttgtcagaccgggtgtatgacgtgcctacccagcaccggggccccgtggtcctgaaggagccagagaagcagcagttatatgacataccagccagccccaagaaggcaggactccatcccccagacagccaagcaagtgggcagggtgttcccctgatatcagtgactaccttaagaagaggcggttacagcacattaccaaatcctcagaaatcggaatggatttatgacactccagtgtctccaggaaaggccagcgtcagaaacacgcctctcaccagctttgcggaagaatcaaggccccacgctctccccagttccagctccactttctacaatcctccaagtggcagatccaggtccctcactccacaactgaataacaatgtgcccatgcagaaaaaactcagccttccagaaattccttcttatggctttcttgtacccagaggcacatttcctttggatgaagatgtcagctacaaggttccttcaagctttctgattccccgagtggaacagcagaacaccaagcccaatatttatgacatccctaaagcaacgtcgagtgtttctcaggctgggaaggagctggagaaagccaaggaggtgtcagagaattccgcgggccataattcctcatggttctccagacggacaacttccccatctcctgaaccggacagattatcaggttccagttctgacagcagagctagcatcgtttcctcgtgctccaccacatccaccgacgactcctccagctcttcctcggaggagtcagcaaaggagctctccttggacctggatgtggccaaggagacagtgatggctctgcagcacaaggtggtcagctctgtcgctggcctgatgctctttgtcagcaggaagtggagattccgagactatctggaggccaacattgatgcaatccacaggtccactgatcacatagaagaatctgtaagagaatttctggattttgcccgaggagtccatgggactgcctgtaacctcactgacagtaaccttcagaacagaattcgggaccagatgcagaccatctccaactcctaccgcatcctgcttgaaacaaaggaaagcttggataatcgcaattggcctctggaagttcttgtgactgacagtgtccagaacagcccagatgaccttgagaggtttgtcatggtggcacggatgcttccagaagacatcaagaggtttgcctccattgtcattgccaatggaaggctcctttttaagcggaactgtgaaaaggaagagactgtgcagttgaccccaaatgcagaatttaagtgtgaaaaatacatccagcctccccaaagagaaactgaatcacaccaaaagagtaccccttccactaagcaaagggaagatgaacactcttctgaactattaaagaaaaatagggcaaatatctgtggacagaatcctggccctcttatacctcagccttcgagtcaacagactcctgagaggaaaccccgcttatctgaacactgccggctctactttggggcgctcttcaaagccatcagcgcatttcacggcagcctcagcagcagccagcccgcggagatcatcactcagagcaagctggtcatcatggtgggacagaagctggtggacacgctgtgcatggagacccaggagagggacgtgcgcaacgagatcctccgtggcagcagtcacctctgcagcctgctcaaggacgtagcgctggccactaagaatgccgtgctcacgtaccccagccctgccgcgctggggcacctccaggcggaggctgagaagctggagcaacacacgcggcagttcagagggacactgggatga

SEQ ID NO: 123474 - DNA, 648 bp, Homo sapiens
atgacttccacacaaacaagtgtgtgtgaggagatccccattatcctcagcaagaagctccacaacaggagagcaggctgcgtcacgcatctgacgaaccagattcagagaggtccagtgagaggtatctccatcaagctacaggaggaggagaaagaaaggagggacaattatgtccccaaggtctcagccctggatcaggagatcatcgaagtagatcctgacactaaggaaatgctgaagcttttggactttggcagcctgtccaacctgcagcagcaaaaggccaccagggtctatgcggtggtgcagatctcggcccccatgttcctactctgggccctacccctgagcgtggcacccctcataacagatttcaaaatgtttgtcaccacctcctatttaatttccttgttcctcattataaacagcagcgccaaccctatcatttatttctttgtggggagcctcagaaagaaaaggctgaaggaatctctcagagtgattctccaacgggcgttagcagataagccagaggtggggaggaacaaaaaggcagctggcatcgacccaatggagcaaccacactctactcagcatgtggagaaccttcttcccagggagcacagggtcgatgtggaaacataa

SEQ ID NO: 123475 - DNA, 829 bp, Homo sapiens
ggtctaatctttgttgcctgctctggaggtagcaggagcctcaacggttcagagaagtcctatctccttcctgtaggcagcagaaattcatttctcatgaacatcaaagtcttcttaatagaagccactcattggccagaagaaaaacaaggagcacatgggaatcttgatcaaagttgctcaaggtccagtaacctctggaagcccaagagagagctcatattcagaggacaggaagacaattccagaccattggtccacagaggtgtcacctgtccttctgtgtctgtgtcagcctcactgccccctgacttacccctgcccccaggaaaaatgtcacagaaaagtactacatgtgcctgggcaatgacttccacacaaacaagtgtgtgtgaggagatccccattatcctcagcaagaagctccacaacaggagagcaggctgcgtcacgcatctgacgaaccagattcagagaggtccagtgagaggtatctccatcaagctacaggaggaggagaaagaaaggagggacaattatgtccccaaggtctcagccctggatcaggagatcatcgaagtagatcctgacactaaggaaatgctgaagcttttggactttggcagcctgtccaacctgcaggtcactcggcctacagttgggatgaatttcaaaatgcctcgtggagctgtttgaattttttctgtagtgctgtattattttcaataaatctgggacaacacgccagaaaaaaaaacaaaactcgaggggggccccggtccccatttcgccttattgggagccgacatacattgcatgtgccggctgt

SEQ ID NO: 123476 - DNA, 726 bp, Homo sapiens
caaaagaccctgcactgaatacaagtttacctcagaaagttttaggaacaactgaagaaataagtggtaagaagcatacagaagacactatttctgtggcgtcatctttacattctagtcctcctgcatctcctcaaggctcccctcacaaagttggcagtatcatatctgatcacagcagcaagatcagtggccagagctgccccggaataggtggggcttacttgcaaaagaaaatccttcagattaccaggagcacagccaaaagaacagacagtactgagaaggccactgaggagaatagagacaggacaagttgtgagaacacaaccagaaaaagaatgacatccccgtttagaagacttagggaaagaatgctttaaagggagagactagtcaacagccaaaaagaggacacagatcacaatcaagctacagaaagctgtgagaaggtgaaggatgttggaagcaacatcaaagatgcgaaagggagtgccatcttaaattcaattagccaaggcaacagtaacactttaaactggttgtatacgcgattcaagtctaaaaggaggaagacactctgatgaagttccttatttaattttagtgttaagtttgttttcagttattaaggtaaagatggcttaaagtaaaccatttgtcaaaggttaggcagacaacttagtaaaatgcgatttttaaacacttgaaaaaaaaaaaaaaaaa

SEQ ID NO: 123477 - DNA, 2052 bp, Homo sapiens
ttggcagtatcatatctgatcacagcagcaagatcagtggccagagctgccccggaataggtggggcttacttgcaaaagaaaatccttcagattaccaggagcacagccaaaagaacagacagtactgagaaggccactgaggagaatagagacaggacaagttgtgagaacacaaccagaaaaagaatgacatccccgtttagaagacttagggaaagaatgctttcaagggagagactagtcaacagccaaaaagaggacacagatcacaatcaagctacagaaagctgtgagaaagtgaaggatgttggaagcaacatcaaagatgagaaagggagtgccatcttcaattcaaatagccaaggcaacagttacacacttattccatcagctaaatctgacaacttgtctgactccagccatagtgagatttcttcacggtccagcatcgtgagcaattgttctgttgactccatgtctgcagctctacaggatgaacggtgttcctctcaggccctggcagtccctgaatccactggggcattggaaaagacagagcacgcttcagggataggagatcatagtcaacatggccctgggtggacactcttgaagccatctctaatcaagtgtttagctgtctcatcgtctgtgagcaatgaagagatttctcaagagcatatcattatagaagcagctgacagtgggtcgtgggaagttgggacttcgtgttcaagcagctcccatgacaacttccaaagccttccaaacccaaaaagctgggattttttgaactcttacagacatacccatttggatgaccccattgctgaagttgaacccactgactctgagccctattcctgttctaaaagctgctctagaacttgtgggcagtgtaaaggaagcctagagagaaagagttggacctcctccagttctctgtctgacacgtatgaaccaaactatgggacagttaaacggagagtattggagagcaccccagctgagtcatctgaaggcttggaccccaaggatgccactgacccagtttataaaactgtcacttcaagtacagaaaagggcttgattgtgtactgtgtcacctcacccaagaaggacgataggtatagggagccacctcccactcctccaggatatttggggatttctttagcggacctaaaggaaggaccccacacacacctaaaacctccagattatagtgtggcagtgcagaggtcaaagatgatgcataacagcctctctagactgccaccagcttctctcagtagcaacctcgtggcctgtgttccatcgaagattgtaactcagcctcagaggcataatttgcagccattccatcctaaactaggagatgtgactgatgcagatagcgaagcagatgcaactctaggaaacaaatgcaagttactatatatgtctgatgtcagaaatccagtccctgcagttaaggatgtgttggtccagaaatacacttcctttaacttcttccacccccaagaagcacttgatagacgaagagaagaactggctctcccagaaggtgcctctggagaagcctgtctatccacaagatctctgaagagatcaggtgtccaagctttggcccagcaaacacattctagaaacttcttgccagagaagcagccattctcagctcaggcagcaggaattctgcatggctctataaaccataacacacggggtccttgtttgcttgagggcactaagatgatgactggtgttttatacagagcatacttgctgtgcatcgcatatagcagggacttaatagtggatgagcagatcatgaatggcttgagaaaagccatttgataatttcaactgaaacctcagacacaaatcttgatgtagcatcgcatgtggaaaacaccacgtgccaaaccctgtgacatggacattggactttcctagcctgccaggcgctaaggaaggggacaacccattgcagccaagccaggaagtcaatgagaggcaaacacagcatggtctatgattaaacaaa

SEQ ID NO: 123478 - DNA, 1338 bp, Homo sapiens
atgacatttaagaaccccaaatacccttttgtgtcaaaccttgccaaacaaaaaggaatgtctgtaattaaggtcaatgggaaactacaacaatccaatccaaacaggactacaaatggcccagacccttcaggaatgaaagtttgggtcagtccacaaggtaaaaatccacaacccactgaggtgcttgctgaaggcaaagggaatacagagtgggtagtagaagaagatactagaaactttggttttgggatccagaaacacaccgatataggtatcaaatatgactcaagcactggtatctatgacctggacttcaatgtggtgctggacaggcgtgcgagtgaggaaggcatcacactgactgcagccctggccgctgacagagagaccccaagtgagaactgcctgccgagcccagtcaaccccacagctcaaggagaggaaggcatccacccagatcccatcatcgtcttggaacaggaagaccccactacagcacctcatccccagaggttatgccaacagcagcagtgtcagaggcctctgtgcaggctacaacctgtatggccacacattgtggacctgacaccactgactgaaatagggagtgaggagccagttggtgagctgaattttaagcatattaggtttgaggtgtctgaagacaatatgacatttgatgccagtgaccagggaccattctttgagaactactggcaactggtgttgtctgctaccccaggtgatgtcacctggaatggagcccttggccttcatactcctaagtcctcatccccagatacctgctcagcccagcaggccagccagtgctgggaactctcacctgggggccggagaatagggacactgctcctccctcaggagtctggggcttcctggctgccaccaggtgtcaccagcagcttggcagcagtgagagttatcatgaactgtggagacaaggccacccctaggaatggtggagtgaggacccttaagaagctgagctccctgccactaagcaaagcaggaggcaaggtcctctatggagaaatcaatccagagcaggaagtgcaggccagtctaagttttgctgcccttctagaaagttatgggatctttatggaaacagaatttctggtggcctgcctgatatctcagggtggccagctgagaaatcaggacttctccagctccatttacagtctggctcctgggcctttggatcccagcagtgtccgagcaggagctcaaaggacagccccaccatgggggatcagccctagaagctgtcactacatctccaacggacgcaactattttccaggtgaatga

SEQ ID NO: 123479 - DNA, 411 bp, Homo sapiens
cccagcaccacatagaagtccaggccgtagataccaatgcttgggtcatatttgatacccagatcgatgtgttcctggatcccaaaaccaaagtttccagtatctgagaagttgttttttcttaactcatactcccgcacctttagacccttctccaagatttcttctgccttggcccctcgaactgtgcagtggacagcaatcttttcatttctccggatgccaaaggatctgacagtgtatctagctttggaaaacacaggggtctgccctgtgagctgctccaacaccttggctgctcgcgtcagtctgtctccactctccccaacacagatgttgagacagagtttgcggatgcgaagttcccgcatggggttctccttttcaccttgatcctgcgccatgatggag

SEQ ID NO: 123480 - DNA, 515 bp, Homo sapiens
gatgcattttccagtgctgacttctctagcatgctctctgaggaggaaaaggaagagttaaaagcagagttagttcagctagaagacgaaattacaacactacgacaagttttgtcagcgaaagaaaggcatctagttgagataaaacaaaaactcggcatgaacctgatgaatgaattaaaacagaacttcagcaaaagctggcatgacatgcagactaccactgcctacaagaaaacacatgaaaccctgagtcacgcagggcaaaaggcaactgcagctttcagcaacgttggaacggccatcagcaagaagttcggagacatgaggaattctcctactttcaaatcatttgaggagagggttgagacaactgtcacaagcctcaagacgaaagtaggcggtacgaaccctaatggaggcagttttgaggaggtcctcagctccacggcccatgccagtgcccagagcttggcaggaggctcccggcggaccaaggaggaggagctgcagtg

SEQ ID NO: 123481 - DNA, 1362 bp, Homo sapiens
tttcgtgtggactggaaggggcggaggtaaccacaagcggctagtggcggctgcctgcgtccccaaccccctccgcgcagcgctcgcgacacgcgtgccaggagtgggagcgagcggcggggccagctgcgttctgagcctgggcgcagctgccatctgctctgggaagcaccagggtgtccccgccgccctcagctcgaagtcagccaccatggaggcgcaggcacaaggtttgttggagactgaaccgttgcaaggaacagacgaagatgcagtagccagtgctgacttctctagcatgctctctgaggaggaaaaggaagagttaaaagcagagttagttcagctagaagacgaaattacaacactacgacaagttttgtcagccgaaagaaaggcatctagttgagataaaacaaaaactcggcatgaacctgatgaatgaattaaaaccagaacttcagcaaaagctggcactgacagtgcagactaccactgcctacaagagaacacatgataccctgagtcacgcagggcaaaaggcaactgcagctttcagcaacgttggaacggccatcagcaagaagttcggagacatgagttactccattcgccattccataagtatgcctgctatgaggaattctcctactttcaaatcatttgaggagagggttgagacaactgtcacaagcctcaagacgaaagtaggcggtacgaaccctaatggaggcagttttgaggaggtcctcagctccacggcccatgccagtgcccagagcttggcaggaggctcccggcggaccaaggaggaggagctgcagtgctaagtccagccagcgtgcagctgcatccagaaaccggccactacccagcccatctctgcctgtgcttatccatataagaagaccaaaatcccgctgggaaaaaacccaggccttgacattgttattcaaatggcccctccagaaagtttaatgatttccatttgtatttgtgttgatgatggaccacttgacccatcacatttcagtattcatagatgactgtcacattttaaaatgttcccacttgagcaggtacacaactggtcataattcctgtctgtgtaattcgatgtatatttttccaaacatgtagctattgtttgctttgatttttgcttggcctcctttatgatgtgcatgtccttgaaggctgaatgaacagtccctttcagttcagcagatcaacaggatggagctcttcatgactgtctccagcaataggatgatttactataaatttcatccaactacttgtgatctctctcacctacatcaattatgtatgttaatttcagcaattaaaagaattgatttt

SEQ ID NO: 123482 - DNA, 1984 bp, Homo sapiens
gtttgttggagactgaaccgctgcaaggaacagacgaagatgcactagccagcgctgacttctctagcatgctctatgaggaggaaaaggaagaggttaaagctgagctagttcagctagaagacgaaattacaacactacgacaagttttgtcagcgaaagaaaggcatctagttgagataaaacaaaaactcggcatgaacctgatgaatgaattaaaacagagacttcagcaaaagctggcatgacatgcagactaccactgcctacaagaaaacacatgaaaccctgagtcacgcagggcaaaaggcaactgcaagctttcagcaacgtttggaacggccatcagcaagaagttcggagacatgagacgaaagtaggcggtacgaaccctaatggaaggcagttttgaggaggtcctcagctccacggcccatgccagtgcccagagcttgggaggagggctcccggcggacccaaggaggaggagctgcagtgcttaagtccagccagcgtgcagctgcattccagaaaccggccattacccagcccctttttgcctgtgctaatccagataagaagacccaaaattccgctgggaaaaacccaggccctggacatggttattccaaatggccccctcccagaaaggtttaatggatttcccattggtatttggtgttggatgatggaccacttgacccatcacattccagtattccatagatgactgtcacattttaaaatgttcccacttgagcaggtacacaactggctcataattcctgtctgtgtaattccgatgtatatttttccaaacatgtagctattgtttgctttgatttttgcttggcctcctttatgatgtgcatgtccttgaaggctgaatgaacagtccctttcgagttcagcagatcaacaggatggagctcttcatgactgtctccagcaataggatgatttactataaatttcatccaactacttgtgatctctctcacctacatcaattatgtatgttaatttcagcaattaaaagaattgattttaatgactttgaattcttaatttctttgtcttaaaagttgctagttatgattttacagatgcaattttaaatcaacttttagccaggtgcggcggctcacacctgtaatcccaactattttggatgccaaggtgagaggattgcttgaggccaggagttaaagatcagcctgggcaacacagaccctgtctctacaaaaaaagaaaaaaattagccagacatagtgttgcttgcctgtagtcccagctactctagaggctgaggcaggaggattgcatgagcctaggagttcgaaactgcagtgagctatgattgcaccactgcactactccagcctgggtgacagagtgagacactgtctccaaaaatagtaataataagtagtcaacttttactgctaatttggtgaacatgagagaggatatgaaaataaatattacctcagctatcctaggatgttaaaatcatctccaattttaaaattctctccaatctacatacagtagtagttagtcagataaaggatatccaaaaaagagatagctagaaaatgggagaagcagagttctgcaacccctttcagtttgtaaattgttcacatgtatgaaaataactggtatttatcaatccactcagatttcctgcacctaacttttatccttatatatcatatgtatcctcttttctttttcctaaatgggaacatatatttgttattaggtggcagagatatagccttaagatatatttgtaaaatgccccctgaatagacatccaacctaaaaaaaatccctatttaaaaagcccatataatatatacatatttgttagcatgctaattgttcatgttttgtgtttattaaatagaagtgatatatatgacattttgaagtaaagcacatctgaaaaattctcctcaaaaaaaaaaaaaaaaaa

SEQ ID NO: 123483 - DNA, 473 bp, Homo sapiens
  misc_feature (1)...(473): n = a,t,c or g
tttctgtttaactacagtgactcttccaacgcacccctctacaaacatcagcaagaagtccaaagtttctttgtggttatggctttgatttctgtgccgtggatgcttctgattaagccgtttattcttagagccagtcatcggaaatcccagctgcaggcatccaggatccaagaagatgccactgagaacattgaaggtgatagctccagcccttctagccgttctggccagaggacttctgcagatacccacggggctctggacgaccatggagaagagttcaactttggagacgtctttgtccaccaagccatccacaccatcgagtactgcctgggctgcatttcaaacacagcctcctacctgcggctctggggccttcaccttgctcatgcacaactgtctgaagtgctctggactatggtgatgaacagcggccttcagacgcgaggctgnggaggaatcgtcgg

SEQ ID NO: 123484 - DNA, 570 bp, Homo sapiens
cgtggtggaattcatgagagacgcttgctctcccagaagacagacaatgagatttggaacaccttcttccacgggcgctatctgatcctacttatgggcatcttctccatctacacgggtttgatctacaatgactgcttctccaagtccttgaacatctttggctcttcttggagtgtccaacccatgttcagaaacggcacatggaatactcatgtaatggaggaaagtctatatctgcagctggacccagccataccaggagtgtattttggaaatccatacccgtttgggattgatccgatttggaacttggcttcaaacaaactcacatttctgaactcgtataaaatgaagatgtcggtgatcctgggaattgtccagatggtttttggtgtcatcctcagccttttcaatcacatatacttcagaagaactctcaacatcattctgcaatttatccctgagatgatttttatcctgtgtctgtttggatacctggttttcatgatcattttcaaatggtgctgctttgacgtccatgtatctcagcacgcccccagcatcctc

SEQ ID NO: 123485 - DNA, 2024 bp, Homo sapiens
atgttggagagcgtcaatgtgaggctggaagatttaatcaccggcccttgctgggaggctggctggaatgctggctatgcctttctggttgtggctgtggaagatttcacaattgggaaactgttcgataagctagagggaacgaagctgtgtcttaagaatgctttgcccagggtcataacacaaacagagtctcaccgccagcgcctgctgcaggaagccgctgccaactggcactcctggctcatcaaggtgcagaagatgaaagctgtctaccacatcctgaacatgtgcaacatcgacgtcacccagcagtgtgtcatcgccgagatctggttcccggtggcagatgccacacgtatcaagagggcactggagcaaggcatggaactaagtggctcctccatggcccccatcatgaccacagtgcaatctaaaacagcccctcccacatttaacaggaccaataaattcacagctggcttccagaatattgttgatgcctatggtgtcggcagctaccgggagataaacccagccccctacaccatcatcactttccccttcctgttcgctgtgatgtttggagactgtggtcatggaaccgtgatgctcctggctgcactttggatgattctgaatgagagacgcttgctctcccagaagacagacaatgagatttggaacaccttcttccacgggcgctatctgatcctacttatgggcatcttctccatctacacgggtttgatctacaatgactgcttctccaagtccttgaacatctttggctcttcttggagtgtccaacccatgttcagaaacggcacatggaagacaggtacacatgatccccacctggcagtgctgtttaaaatgggccatgtagaaggcagggactgtgtcttacgcatcgtgcttgcaaagattggctacaggaacggcttcttgagaaagatttggaacttggcttcaaacaaactcacatttctgaactcgtataaaatgaagatgtcggtgatcctgggaattgtccagatggttttcggtgtcatcctcagccttttcaatcacatatacttcagaagaactctcaacatcattctgcaatttatccctgagatgatttttatcctgtgtctgtttggatacctggttttcatgatcattttcaaatggtgctgctttgacgtccatgtatctcagcacgcccccagcatcctcatccacttcatcaacatgtttctgtttaactacagtgactcttccaacgcacccctctacaaacatcagttcaactttggagacgtctttgtccaccaagccatccacaccatcgagtactgcctgggctgcatttcaaacacagcctcctacctgcggctctgggccctcagcctggctcatgcacaactgtctgaagtgctctggactatggtgatgaacagcggccttcagacgcgaggctggggaggaatcgtcggggtttttattatttttgccgtatttgctgtcctgacagtagccatccttctgatcatggagggcctctctgctttcctgcacgccctgcgactgcactgggttgagttccagaacaagtttctatgtcggggatggttacaagttttctccattctcctttaaacacatcctggatggcacagccgaggagtaggctgagggctgcacctcccacggtggtcaccatgccaatgaaggaagttcagtcttgtctttgatatcagcccctgcaaggcgctcaatgggaaggttgttcttggctcacctgaagcatgaaactgtgtattatttggacgtcagcctgtggatttgatacgacttaaccacgtcagaggaaggactttggcaagtgatattgtcttcatgtggggtattaattctcaaataataaaataattgacaaatgaggggagaatgctaaacagatgtcttcttgcaatattttaaatattgtatttgagaaaataaacatctgagtcattcaaaaaaaaaaaaaaaaa

SEQ ID NO: 123486 - DNA, 936 bp, Homo sapiens
atggcacctggccggtcagcagcgcagccagcatctatgcaggcactggggggcttgggatcccagatctccatgtcctgttctaccagtttctggggcggcttggggtctgggggcctggccacagagatggctgggggtctggcagaaatggggggcatccagaatgagaaggagaccatgcaaagcctgaacgaccacctggactacctggacagagtgaggaacctggagaccgagaactggaggctggagagcaaaatccaggagtatctggagaagagaccccatgtcagagactggggccattacttcaagaccatcaaggaactgagggctcagatcttcgcaaatactgtggacaatgtccacatcattctgcagatcgacaatgcccagtcaagtatgagacaagagctggccatgcgccagtctgtggagagcaacatccatgggctctgcaaggtcattgatgacaccaatgtcactctgctgcagctggagacagagatgggcgctctcaaggaggagctgctcctcatgaagaagaaccatgaagaggaagtaaaaggcttgcaagtccagattgccaactctgggttggccgtggaggtagatgcccccaaatctcaagtcctcgccaagatggagcagctcaacagaatcctgctgtacttggagtcaaagctggcacagaactgggcagagggccagcgcaaggtccaggagtacaaggacttgctgaacatcagggtcaagctggaggctgagatcgccacctaccgccgcctgctggaagacagcgagggcctcaatcttggtgatgccctggacagcagcaactccatgcaaaccatccaaaagaccaccacccgccagatagtggatagcaaagtggtgtctgagatcagtgacaccaaagttctgagacattaa

SEQ ID NO: 123487 - DNA, 729 bp, Homo sapiens
caggaatgggaggcatccagaacgagaaggagaccatgcaaagcctgaacgaccgcctggcctcttacctggacagagtgaggagcctggagaccgagaaccggaggctggagagcaaaatccgggagcacttggagaagaagggaccccaggtcagagactggagccattacttcaagatcatcgaggacctgagggctcagatcttcgcaaatactgtggacaatgcccgcatcgttctgcagattgacaatgcccgtcttgctgctgatgactttagagtcaagtatgagacagagctggccatgcgccagtctgtggagaacgacatccatgggctccgcaaggtcattgatgacaccaatatcacacgactgcagctggagacagagatcgaggctctcaaggaggagctgctcttcatgaagaagaaccacgaagaggaagtaaaaggcctacaagcccagattgccagctctgggttgaccgtggaggtagatgcccccaaatctcaggacctcgccaagatcatggcagacatccgggcccaatatgacgagctggctcggaagaaccgagaggagctagacaagtactggtctcagcaggtgcgtgaggggaggggatggctgccaaggtgtgggagggaggcagacggaatgaggggcctgatggactgtccccatcctgcagattgaggagagcaccacagtggttcaccacacagtt

SEQ ID NO: 123488 - DNA, 554 bp, Homo sapiens
  misc_feature (1)...(554): n = a,t,c or g
cccacgcgtccgggagagcaccacagtggtcaccacacagtctgctgaggttggagctgctgagacgacgctcacagagctgagacgtacagtccagtccttggagatcgacctggactccatgagaaatctgaaggccagcttggagaacagcctgagggaggtggaggcccgctacgccctacagatggagcagctcaacgggatcctgctgcaccttgagtcagagctggcacagacccgggcagagggacagcgccaggcccaggagtatgaggccctgctgaacatcaaggtcaagctggaggctgagatcgncccacctaccgccgcctgctggaagatggcgaggactttaatcttggtgatgccttggacagcagcaactccatgcaaaccatccaaaagaccaccacccgccggatagtggatggcaaagtggtgtctgagaccaatgacaccaaagttctgaggcattaagccagcagaagcagggtaccctttggggagcaggaggccaataaaaagttcagagttcaaaaaaaaaaaaaaaa

SEQ ID NO: 123489 - DNA, 755 bp, Homo sapiens
gccgaacacttgctgaagccgctgcccgcggacaagcagatcgagaccgggcccttcctcgaggcggtgtcccacctgccgcccttcttcgattgccttgggtccccagtgtttactcccatcaaggcagacataagcggcaacatcacgaaaatcaaagctgggtacgacaccaacccaacccaggttccgaaccttgaaaaccattctggagggggaaaaggaaatgtatggagcaaaggggcccaaagtaggggccacactggcgctgatgtggctgaaaagaggcctccgattcatccaggtcttcctccagagcatctgcgacggggagcgggacgagaaccaccccaacctcatccgtgtcaacgccaccaaggcctacgagatggccctcaagaagtaccatggctggatcgtgcagaagatcttccaggcagcactgtacgcagcaccctataagtctgacttcctgaaagcgctctccaaggggcagaatgttacggaggaggagtgcctggagaaaatccgcctcttcctagtcaactacacggcgaccatcgatgtcatctacgagatgtacacccagatgaacgctgagcttaactacaaggtgtaggcatgcccactgctggacacgtccccgactcgtggccacatggagaaacaggcaaaccagaatcactgtgaatcaagtcggtgaactgcccctggcctgtgtcccccagagcagcccagggtcctgccagagtctg

SEQ ID NO: 123490 - DNA, 1572 bp, Homo sapiens
atggcctgcggtggccctgaaaaatcactcttgctgcgaatctcaatctgtcttctcattttgtccccagattgccttgggtccccagtgtttactcccatcaaggcagacataagcggcaacatcacgaaaatcaaagctgtgtacgacaaccaacccaagccaagttcccggaccctgcagaacatcctggaggtggagaaagaaatgtatggagcagagtggcccaaagtaggggccacactggcgctgatgtggctgaaaagggagggagcagagcagctcatctggggaccccagtgggacagtgaggggcagcaaaggaaagagcctgctggggcctgtgggggtcatgtggacacagaaatggacaaggcaggcccagacccacccctcgtggatcttacagccagtgtgacttgtcatgggccagcaccaggcctggaggagagaagaggcctccgcttcatccaggtcttcctccagagcatctgcgacggggagcgggacgagaaccaccccaacctcatccgtgtcaacgccaccaaggcctacgagatggccctcaagaagtaccatggctggatcgtgcagaagatcttccagctccctctgcctgcccaccctggcggccatgagaacgaggggctgacgggccctgtacagtgttcctgtggggtacagtctgcaagcaggctggggcagaagccagtatggttccagagaggaagagctggtcatagggaggttatatggggacacgacccttcagttttgctggttggttggtggatgggttcccgggttcacgccggccccacagccctgcgcctgcgcattgagcgcctgcgcttgagcccctgcagctcccacgggcccgaaaggtccctgtggctgcagagtgggaaagattggaggagctcagacagagaggctggccccaaggctggggaagtcatccaagctctgagtggagagcggcagctggaaggagatgtaggagggaaggaaacacacaagactgagcctcatgtgcctggcacataccccttcctgagcattggtttcccctttctgccccgagccctggccactgccggctgtgtgaccccaaggaggttacatcacttctctgagcatgtttcctcatcgcaacctccagctggtggccctgagccccagtccctcttagagatgggcttgggggagctgctcagtgcttcaacgtgctttgaatgtgagtgccttcagcatgactggctgtttggcactgctggttttgggttagtacacagctacagtaaccagaacagcagggcatgggactatgagtggcaagatgcagcggcacctagcttggacagggtggtcagcaaagaagcctcctctgataatgtggctttggagtacagattggagggaggccaggcactgtgccaaaccctcatggccttgcccttccgcagtccttgtggcagccccgtgcttcagaagaggtcagacgttcaaggagtagagtgtcaagcgggggtcacaaacaaatgcctagagaggacagatggcagggactga

SEQ ID NO: 123491 - DNA, 515 bp, Homo sapiens
tttttgttttcttttttcttttttatttttattttttgcatttatttaaaaaatcccatcatgaccctggaagcctttagaacagttttatcctttgaaacacaggacacatttctcccagtgcgcagaatttcaagtttacgtggttcagcttaagaagtgtatgtttcacgttccttagaggacaacagacccaagttatcactatgagaaaggaacagcttgtcccagcttcaatgggataatccaacaccaccagctaccagaagaccctctcactccagtctcagaggggagcacgctcagtagggcttgctgtcattcttcgaacgtttgagctgcactttaagccgcttcatgccaatctgaaagccgttcatggactggatggcagcttgggccgaaacaggattgtcgtaacttacaaaaccaaaacacttgctcaggtttgtctgcttgtctatgaaaaccttggcagacacgacattcccaaagggcataaacatctgcagcag

SEQ ID NO: 123492 - DNA, 1856 bp, Homo sapiens
atgaacggcaccctggaccacccagaccaaccagatcttgatgctatcaagatgtttgtgggccaggttccaaggacctggtctgaaaaggacttgcgggaactcttcgaacagtatggtgctgtgtatgaaatcaacgtcctaagggataggagccaaaacccgcctcagagcaaagggtgctgttttgttacattttacacccgtaaagctgcattagaagctcagaatgctcttcacaacatgaaagtcctcccagggatgcatcaccctatacagatgaaacctgctgacagtgagaagaacaatgcagtggaagacaggaagctgtttattggtatgatttccaagaagtgcactgaaaatgacatccgagtcatgttctcttcgtttggacagattgaagaatgccggatattgcggggacctgatggcctgagccgaggttgtgcatttgtgacttttacaacaagagccatggcacagacggctatcaaggcaatgcaccaagcacagaccatggagggttgctcatcacccatggtggtaaaatttgctgatacacagaaggacaaagaacagaagagaatggcccagcagctccagcagcagatgcagcaaatcagcgcagcatctgtgtggggaaaccttgctggtctaaatactcttggaccccagtatttagcactccttcagcagactgcctcctctgggaacctcaacaccctgagcagcctccacccaatgggagggttgaatgcaatgcagttacagaatttggctgcactagctgctgcagctagtgcagctcagaacacaccaagtggtaccaatgctctcactacatccagcagtcccctcagcgtgctcactagttcagggtcctcacctagctctagcagcagtaattctgtcaaccccatagcctcacttggagccctgcagacattagctggagcaacggctggcctcaatgttggctctttggcaggaatggctgctttaaatggtggcctgggcagcagtggcctttccaatggcaccgggagcaccatggaggccctcactcaggcctactcgggtatccagcaatatgctgctgctgcgctccccactctgtacaaccagaatcttctgacacagcagagtattggtgctgctggaagccagaaggaaggtccagagggagccaacctgttcatctaccacctgccccaagaagtttggtgatcagaccctgctgcagatgtttatgccctttgggaatgtcgtgtctgccaaggttttcatagacaagcagacaaacctgagcaagtgttttggttttgtaagttacgacaatcctgtttcggcccaagctgccatccagtccatgaacggctttcagattggcatgaagcggcttaaagtgcagctcaaacgttcgaagaatgacagcaagccctactgagcgtgctcccctctgagactggagtgagagggtcttctggcacagcttgccctgaagactcggctactgccttctgtgggagtttcgcttcgtacagaggacaagtttgtgctttggtttccagtgttttactttggagtttaggtagctggtggtgttggattatcccattgaagctgggacagctgttcctttctcatagtgataacttgggtctgttgtcctctaaggaacgtgaaacatacacttcttaagctgaaccacgtaaacttgaaattctgcgcactgggagaaatgtgtcctgtgtttcaaaggataaaactgttctaaaggcttccagggtcatgatgggattttttaaataaatgcaaaaaataaaaataaaaaagaaaaaagaaaacaaaaa

SEQ ID NO: 123493 - DNA, 1315 bp, Homo sapiens
atgaagaactacaactgctggcgtagagtattcctgtttgtggtgactccaattcccatgggtcacattaagcacagacaagggccaaacaagcagcagaggggacagaagagagatgaacagcgcatgaggaaagaaaacagaggacacaggaaagggtgcacatggtgtgggggcggcacagaaggcacaggatgggggaagtatgagaaatctgaagtagaaaggggcttggtgagatatgagagaaagcgcagggcgtattctggtatccagcaatatgctgctgcagccctccccactgtgtacaaccagaatttattgacacagcagagtattggtgctgctggaagccagaaggaagcctgtgcttatgccgtgatgtcactggcatctcgggctcctgtgtaccgcagcttcgacagtgaaaaggcaggagaccgagaggtgcagaggaccatgctggagctactgaaccagctggacggctttcagcccaacactcaagtgaaggtaattgcagccactaacagggtggacatcctggatccagccctgctgcgctcaggccgcatagaccgcaagattgagtttccaatgcccaacgaggaggccagaggccagaatcatgcagatccactcacggaagatgaatgtcagcatgacactaccctggttgctctgcaaatggcattgaatgtctacaatgggaagcaagctccctatgcttcctgccacatatttgaactgtaccaggaagataatgggtttctgcttgaacacacaggttttgtaagttatgacaatcctgtctcagctcaagctgccatccagtccatgaacggctttcaaattggaatgaagaggcttaaagtgcagctcaaacgttcgaagaatgatagtaagccctactgagcgtgctcccctctgagactggagtgagagggtcttctggtaagtgggggaggagcacccttaatgattcgaagccctgaggcatgtgtgttgacagccctggaccctgatccctgccactctcgcaggcacagcttgccctgaagactcggctactgccttctgtgggagtttcgcttcgtacagaggacaagtttgtgactttggtttccagtgttttactttggagtttaggtgccatatcctgaggttttttttgtttttgtttttgtttctcctttatttaaagtttgctgtgtttgtaaccagtgttgtgtttgagaaggaccaacaccaaaccaccctggggggaagggggacaggggaaacattttaacaacagacggatgatccaggattt

SEQ ID NO: 123494 - DNA, 438 bp, Homo sapiens
cgccagaatgcgactgtgcttttgagccagactacgctgtcccgccactttcagtgagtgaatgtatgcagcacattcggattatggagggcaggtctcgctctcttccatcctcccccttactcacacatcagtctatcagtgttcggctccagcctgtgaagaagttaactggtgatgctgaacaggagcttggcccccctccatctgtagatgaggcagcaaacacactcatgactcgtctgggtttcctccttggagagaaagtcacagaagttcagccaggtgaccaatacagcatggaagtacaggatgaaaatcagacctcagcaatcacccaacggataagtccttgttccactctgactagcagcactgcctctccaccagccagtagccccctgctttacactcccacccatcagtacaaatgcaacg

SEQ ID NO: 123495 - DNA, 1374 bp, Homo sapiens
gctatagctgccatagatagtgattcctctgatggatctaggcaaagtgaatggaaattctggaaaggattcaccattctagatgccattaagaacatttatgattcatgggaggaggtcaaaatgtcaacattaacagaagtttggaagaagttgattccaaccctcatggatagctttgaagacttcattggaggaagtaactgtcgatgtgtgggaatgcactgtgctccagacacagatatagtcatgaagtacatgcagagcaaggttactatagccctaggtttgtcagggtaccaaaagaggagtcttagggaaatggaaagtgctgaaaagattgctgtgaggggcacctcaaagtcaaccccattaagtttttatgagctcctggagtcacccctgaacttcacagatggagggagcgaggaaccaccggatcgaagacagtcaagtgtagactctcgccaaagccgctctgggcaaggtggcatctccacagaaagcgactgtgcttttgagccagactacgctgtcccgccacttccagtgagtgaaggtatgcagcacattcggattatggagggcatgtctcgctctcttccatcctcccccttactcacacatcagtctatcagtgttcggctccagcctgtgaagaagttaactgtcatctcagagcaacatccagaagactatagagagagtaccattacgacaattctatgcattggtgctttcactggctccctcttctcctgtgataccgtttggaagctatcctactatcccctggaagggggagctcttcctaattcctgggagacttgtgatggtaaacactttacaactgaggctagaacccctctgaggaaggcaaagtttgttgagagcccacgaattccagaatccgagcttggctcaccaaccctcacttcagctcagaaactggacgtggatgcatactgccctggtgatgctgaacaggagcttggcccccctccatctgtagatgaggcagcaaacacactcatgactcgtctgggtttcctccttggagagaaagtcacagaagttcagccaggtgaccaatacagcatggaagtacaggatgaaaatcagacctcagcaatcacccagcggataagtccttgttccactctgactagcagcactgcctctccaccagccagtagcccctgctctacactcccacccatcagtacaaatgcaactgccaaggactgcagctatggggctgttactagtccaacctctacccttgaaagcagagatagtggcatcattgaagtagttcagaaaaagttcattccttactggtatagtcgagagttttatgaaagaaagatttga

SEQ ID NO: 123496 - DNA, 1020 bp, Homo sapiens
  misc_feature (1)...(1020): n = a,t,c or g
ggctgtgtgctgtgttaattgatattagagccccctccagatttgaactgggaccatttctccccatcccctacctgcacagggattgttaaacaagtctgggcctgtccttgtgtcccaggcaatgtaagcgttgtccccacctctcactccagcaggaagaaccggacccggcgaacctggaagtggaccatgatttcttccaggacaaggtgtggccccatttggccctgagggtcccaggcttttgagactctgaaggttcagagcgcctgggccggctatttacgactacaacacctttgaccagaatggcgtggtgggcccccacccggttagttgtcaacatgtactttgctactgccttcagtggtcacgggctccagcaggccccctggcattgggcgagctgtagcagagatggtactgaagggcaggttccagaccatcgacctgagccccttcctcttttacccgcttttacttggggagagaagatccagggagaacaacatcatcttgaggcatgtgtgctctggcattgggcttccactggcttgcaacccctggctgtgtttaaaaagccttgtttgctggcttccaatcttccccaaagtactgtgcccaggccttctttccccctccccagtgtcctcttcctctcaggcaggccattggcaccccatatgggctgggcaagggacaggcagtgaggccgagggccaatagcgaagtgatgancggggatccgtaggactgatctgtagcccatgctgatgtcgacccaccagggcaatccatctggaggcctgagcaccctggcccaggactggcttcatccctggcactgacccaggaaagactgcctctgaccctcttagcagacagagcccaggcatggtagcactctggggcagcctggctcaggtttattgattttcgtctgtttaccctatccattaatcaatacatgtaattaactcctaaaatttaaaaaaaaaaaaaaaaaaaaaataaacc

SEQ ID NO: 123497 - DNA, 852 bp, Homo sapiens
atgtccggagcccttgatgtcctgcaaatgaaggaggaggatgtccttaagttccatgcagcaggaacccacttaggcggcaccaatcttgacttccagatggaacagtacatctataaaaggaaaagtgatggcatctatatcataaatctgaagaggacctgggagaagtttctgctggcagctcgtgctgttgttgccattgaaaaccctgctgatgtcagtgttatatcctccgggaatactggccagagggctgtgctgaagtttgctgctgccactggagccactccaattgctggccacttcactcctggaaccttcactaaccagatccaggcagccttccgggagccacggcttcttgtggttactgaccccagggctgaccaccagcctctcacggagtcatcttatgttaacctacctaccattgctctgtgtaacacagattctcctctgcgctatgtggacattgcaacaacaagggagctcactcaagatcctgaagagattgaaaaagaagagcaggctgctgctgaaaaggcagtgaccaaggaggaatttcagggtgaatggactgctcctgctcctgagttcactgccactcagcctgaggttgcagacttgtctgaaggtgtacaggtgccctctgtgcctattcagcagttccctactgacgactggagcactcagcctgccacggaaaactggtctgcagctcccactgctcaggccactgaatggaagatgcagcaacaaagcaccatcttggaagcagagagcagccctcaccagacaccaaacctgccagcaccttggtctaggacttctcagcctccagaactgtga

SEQ ID NO: 123498 - DNA, 1578 bp, Homo sapiens
atggcagaaggcaaaggagaagaaaggcatcttctttacaaggcagcaagaatgggaaatgccgagcaaagggagcctgaacctctaggacttttaattgataccagtggtctccgctctgaaacagtccaccagaatgagggtaccaaactgacctcagaggtttccagtactgtcagggaaaaaccacctactcaagcctcagtaattgcagatgcccctccccctaccaagcccaatggtccaaggtcaatttcagactgttgtgctggcagtgagaatgttaagccagtggttcttagcttactgggctccgtgggagtgggaccctctaagcaagaccactggatgattcaacagccacacaaagcagcaacattttttggatgcattgggatagataaatttggggagatcctgaagagaaaagctgctgaagcccatgtggatgctcattactacgagcagaatgagcagccaacaggaacttgtgctgcatgcatcactggtgacaacagtgatattgttgagatgatatgggactcaaaaattggggagaaatcttcagtatctaaatcattatctaaattctggaagctaatacagttggatcaattgttttggataggtccagtaacctttgctgccactatcaaaaactcagaaattggccggcttaaagcgaaacttttcaccatgtctggagcccttgatgtcctgcaaatgaaggaggaggatgtccttaagttccttgcagcaggaacctgcttaggtggtaccaatcttgacttccagatggaacagtacatctctataaggaaaagtgatggcatccacatcgtaaatctgaagaggacctgggagaagcttctgctggcagcttgtgccattgttgccattgaaaaccctgctgatgtcagtgttatatcctccaggaatattggccaaagggctgtgctgaagtttgctgctgccactggagccactccaattgttggccacttcactcctggaaccttcactaaccacatccaggcagccttccaagagccacggcttcttgtggttactgaccccagggctgaccaccagcctctcacagaggcatcttacgttaacctatctaccgttgctttgtgtaacacagattctcctctgcactttgtggacattgccattctatgcaacaataagggagctcactcaatgggtttgatgtggtggatgccagcccgggaaggtttgcgcgcgtgtggcaccatttcccatgaacacccatgggaattcatgcctgatctctacagagatcctaaagagactgaaaaagcagagcagcctgctgctgaaaaggctgtgaccaaggaggaatttcagggtgaatggactgctccagctcctgagttaactgctactcagcctgaggttgcagactggtctgaaggtgtgcaggtgccctctgcgcctattcatcagttccctactgaagactggagtgctgagcctgccacggaaggctggtccacagctcccaatgctcaggccattgaatgggtaggagcaaacactgaaaggtcttaa

SEQ ID NO: 123499 - DNA, 2328 bp, Homo sapiens
atggagacagagattgtagtgatgatgccacaggggacctctgggccaccagaagctggaagagaagaggaaggatctcccctagagctttcagaggaagtgcagctcgctgacaccttgatttcagacttccagcctccagaactaggggtccatacggcgttctggattcccatcgtaacttcaaggaaaactttcacaatgtgcggagcccttgatgtcctgcaaatgaagaagaaggatgtccttaagttccttgcagcaggaacccacttaggtggcaccaatcttgacttccagatgaaacagtacatctataaaaggaaaagttatggcacctacatcacaaatctgaagaggacctgggagaagcttctgctggcagctcatgccattgttgccattgaataccctgctgatgtcagtgtcatattctccaggaatactggccagagggccgtgctgaagtttgctgctgccactggagccactccaattgctggccgcttcactcctgcaaccttcactaaccagatccaggcaaccttccgggagccacggcttcttgtggttaccgaccccagggctgaccaccagcctctcacggaggcatcttatgttaacctacctaccatcgctctgtgtaacacagattctcctctgcactgtgtggacattgccatcccatgcaacaacaagggagctccctcagtgggtcagatatggtggatgccagctcgggaagttctgcacatgcgtggcaccatttcctgtgaacacccgtgggaggtcatgcctgatctctacttctacagagatcctgaagagattgaaaaagaagagcaggctgctgctgaaaaggctgtgaccaaggaggaatttcagggtgagtggactgctctagctcctgagttcactgctactcagcctgagattgcagactggtttgaagaaatacaaactaccatcagagaatactataaacacctctacgcaaataaactagaaaatctagaagaaatggataaattcctcgacacatacatcctcccaagactaaaccaggaagaagttgaatctctgaatagaccaataacaggctttgaaattcaggcaataattaatagcttaccaaccaaaaaaagtccaggaccagatggattcacagccgaattctaccagagggcaatcaggcagaagaaggaaataaaggttattcaattaggaaaagaggaagtcaaattgtccctgtttgcagatgatatgatggtatatctagaaaaccccatcgtctcagcccaaaatctccttaagctggtaggcaacttcagcaaagtctcaggatacaaaatcaatgtgcaaaaatcacaagtattcttatacaccaataacagacaaacagagagccaaatcatgagtgaactcccattcacaattgcttcaaagagaataaaatacctaggaatccaacctacaagggacatgaaggacctcttcaaggagaattacaaatcgctgctgaatgaaataaaagaggatacaaacaaatggaagaacattccatgctcatgggtaggaagaatcaatattgtgaaaatggccatactgaccaaggtaatttatagattcactgccatccccatcaagctaccaatgacttccttcacagaattggaaaaaactactttaaagttcatatggaaccaaaaaagagcccacattgccaagtcaatcctaagccaaaagaacaaagccagaggcatcacgctacctgacttcaaactatactacaaggctacagtaaccaaaacaggatggtactggtaccaaaacagagatatagaacaatggaacagaacagagccctcagaaataatgccacatatctacgactgtctgatctctgacaaaaacaagaaatggggaaaggattccttgtttaatgaatggtgctgggaaaactggctagccatttgtagaaagctgaaactggatcccttccttacaccttatacaaaaattaattcaagatggattaaaaacttaaatgttagacctaaaaccgtaaaaactctagaagaaaacctaggcaataccattcaagacataggcatgggcaaggacttcgtgtctaaaacaccaaaagcaatggcaacaaaagccaaaattgacaaatgggatctaattaaactaaagagcttctgcacagcaaaagaaactaccatcagaatgaacaggcaacctacagaatgggagaaaatttttgcaatctactcatctgacaaagggctaatatccagaatctacaatgaactcaaacaaatttag

SEQ ID NO: 123500 - DNA, 1152 bp, Homo sapiens
atgctgacgatgatgatgccgacagggacaggtgtcttggtaccctttgggtgctcagtcgtgcttaccaatggtgacaatgaggacaaggaagaggaaagcccgctagggccgctcgcccgtcgccgcctgcggaacgcggaggggcagcacggccacgcccggccactcgaacctgctccccggcgccgcgtgaccgtgtcaggtccccgtcggcctcgccgtgccgaccccgggcgcctccacagtggctcggaggccgctgctgcccggatgcccgggttccacgaggctctcccagcccgacaagcccgccgatcccacgggcacgggcggaggagagggaaccgccgcgcccgccccgcgcgccgtcgccgaccccgggaaattttcacagtgtccggagcccttgatgtcctgcaaatgaagaaagaggatgtccttaagttccttgcagcaggaacccagttaggtggcagcaatcttgacttccaggtggaacagtatgtctataaaaggaaaagtgatggcatctacatcataaatctgacgaggacctggaagaagcttctgctggcagctcgtgccattgttgccattgaaaacgctgctgctgtcagtgttatatcctccaggaatactggccagagggtcgtgctgaagtttgctgctgccaccggagccactccaatcgctggccccttcactcctggaaccttcactaaccagatccaggcagccttctgggagccacggcttcttgtgggagctcgctcagtgggtttgatgtggtggatgctggctcgggaagctctgtgcatgcgtggcagcatttcccgtgaacacccctgggaggtcatgcctgatctctacttctacagagatcctgaagagattgaaaaagagcaggctgctgctgaaaacactgtgaccaaggaggaatttcagggtgaatggactgctccagctcctgagttcactgctactcagcctgaggttgcagactggcctgacggcgtgcaggtgccctctgtgcctattcagcagctccctactgaagactggagcactcagcctgccacggaagactggtctgcagctcccactgctcaggccactgaaggggtaggagcaaccactgaatggtcctaa

SEQ ID NO: 123501 - DNA, 1204 bp, Homo sapiens
ggttcggttttgccgggccgacccacgcgtccgacctgcagaggggtccatacggcgttgttctggattcccgtcgtaacttagagggaaattgtcacaatgtccggagcccttgatgtcctgcaaatgaaggaggaggatgtccttaagttccttgcagcgaggaacccacttaggtggcaccaatcttgacttccagatggaacagtacatctataaaaggaaaagtgatggcatctatatcataaatctcaagaggacctgggaagaagcttctgctggcagctcagtgcaattgttgccattgaaaaccctgctgatgtcagtgttatatcctcccaggaaatactgggccagaagggctgtgctgaaagttttgctgctgccactgggagccactccaatttgctgggcccgcttcactccctggaacctttcactaacccagatccagggcagcccttccggggagccacgggctttcttgttggttactgacccccaggggctgaaccaccagccctctcacgggggcaatcttaatgtttaacctaccctaccattggcgctggttaacccggatttccccttcggcgctatgtggacatttgccatcccatgcaacaaccaagggagctcactccagtggggtttgatgtggtggaatgctggcctcgggaagtttctgcgccatgcgtggcacccatttcccgtgaacaccccatgggaggtcaatgcctgaatctgtacttctacagagatcctgaagagattgaaaaagaagagccaggctgctgcttaagaagccaggtgaccaaggaggaatttcagggtgaatggactgctcccgctcctgagttcacttgttactcagcctgaggttgcagactggtctgaaggtgtacagggtgccctctggtgcctattcagcaattccccctactgaagactggagcgctcagcctgccacggaagactggtctgcagctcccactgctcaggccactgaatgggtaggagcaaccactgactggtcttaagctgttcttgcataggctcttaagcagcatggaaaaatggttgatggaaaataaacatcagtttctaaaagttgtcttcatttagtttgctttttactccagatcagaatacctgggattgcatatcaaagcataataataaatacatgtctcgaaaaaaaaaa

SEQ ID NO: 123502 - DNA, 1083 bp, Homo sapiens
  misc_feature (1)...(1083): n = a,t,c or g
atggggaaagtgaaggttggagtcaatggatttggttgtattgggcgcctggtcatcaggactgcttgtaattctggtaaagtagatattatcgccatcaatgacccattcattgacctcagctacatggtctacatgttccagtatgatcccacccatggtaaattccatggcaccgtcaaggctgagaacgggaagcttgtcatcaatggaaatcccatcactatcttccaggagccagatccctccaaaatcaagtggggtgatgctggcactgagtatgtcatggagtccactggcatcttcaccaccatggagaatgctggggctcacttgcagtggggagccaaaaggccacagggctctccagaacatcatccctgccactactgggctgccaaggctgtgaggaaggtcatccctgagctgaatggtaagctcactggcatggccctccgtgtccccactgccaacgtgtcagtggtggacctcacctaccatctggaaaaacctgccaaatatgatgacatcaagaaggtggtgaagcaggcatcagagggccccctcaaaggcatcctgggctacactgggcaccaggtggtctcctccgacttcaacagtgacacccactcttccaccttcaatgctggggctggcactgccctcaacgaccactttgtcaagctcatttcctggtatgacaatgaatttggctacaacaacagggtggtggacctcatggcccacatggcctccaaggagtaagacccctggaccaccagccccagcaagagcacaagaggaagagagagaccctcactgctggggagtccctgccacactcagtcccccaccacactgaatctcccctcctcacagttgccatgtagaccccttgaagaggggaggggcctagggagccgcaccttgtcatgtaccatcaataaagtaccctgtgctcaaccnnnnnnnnnnnnnnnnnnnnngggggcccgttttaaagaatccttagggggcccaaacttaacccggccttccaacggaaaagttttttccttaaagggaggcgaataaaaaccaacc

SEQ ID NO: 123503 - DNA, 671 bp, Homo sapiens
  misc_feature (1)...(671): n = a,t,c or g
cccatcgaccgcctgcaggaattcggcacgaggcctgttcgacagtcagccgcatgcttcttttgcgtcgccagccgagctcacatcgctgagacaccatggggaaggtgaaggtcggagtcaacggatttggtcgtattgggcgcctggtcaccagggcatgcttttaactctggtaaagtggatattgttgccatcaatgaccccttcattgacctcaactacatggtttacatgttccaatatgattccacccatggcaaattccatggcaccgtcaaggctgagaacgggaagcttgtcatcaatggaaatcccatcaccatcttccaggagccgagatccctccaaaatcaagtggggcgatgctgggcgctgaagtacgtcgtggagtccactgggcgtcttcaccaccatggagaaaggctgggggctcatttgcagggggggagccaaaagggtcattcatctcttgccccctcttgcttgatgccccccatgttcgtcatgggtgtgaacccatgaaaaagatgacaacagcctcaaggatcatcagcaatggcctcctgcaccaccaactgcttagcacccctggccaaaggtcatccatgacactttggtgtccggggaaggactcaaggaccacagggcattgccttanattggcaacc

SEQ ID NO: 123504 - DNA, 992 bp, Homo sapiens
  misc_feature (1)...(992): n = a,t,c or g
ataattncccctccagcatcctaatttgtatgtgagatatacacatcatcatatgcaccagagacttgatggctccggaaactgcggcgtgatggccgcggggctcttcagtaacatcatccctgggcctctaactggcgctgcccaaggcttgtggccaaggtcatcctgaagcttgaaccgggaaagcttcactgggcatggcccttccggtgtcccccactgcccaacgttgtcagtgggtggacttggaccctgccgttctagaaaaaccctggccaaaatatgatgaacatcaagaaaggtggtgaaagcaaggcgtcggaagggcccccttcaaaggggcatccctgggcttaccacttgagccaccagggtgggtctcccttctgactttcaacaagcggacaccccactccctcccacctttcgacggctggggcctggcattgcccctcaaacgacccacttttgtcaaagctcactttcctgggtattgacaacgaattttgggctacagctaccagggtgggtgggacctcaatggccccacatgggctttccaagggagttaagaccccctgggatcacccagcncccagcaaggaggcacaagagggaaggagagagaccctcacttgcctggggagtccctgccgacactcagttcccccaccacactgaatcttcccctccttcacagtttgccatgtagacccctgaaaaagggggaaggggcttagggaagccgcaccttgtcatgttaccatcaataaatgtaccctgtgctcacccaccaagagaaaaaacctagacaaaaatgaaagccaaaaggggggggcccttttaaaagaacccttgggggggccaaagttaacccgggcaggcaaggaaaaagttttttccttatagggggccgaataaaaacctacctgggaatttttggaaaggacccttactttgggggggggacaaaatgggccaaccaacct

SEQ ID NO: 123505 - DNA, 753 bp, Homo sapiens
  misc_feature (1)...(753): n = a,t,c or g
agggtgtcgccgctgtgccgctagcggtgccccgcctgctgcggtggcaccagccaggaggcggagtggaagtggccgtggggcgggtatgggactagctggcgtgtgcgccctgagacgctcagcgggctatatactcgtcggtggggccggcggtcagtctgcggcagcggcagcaagacggtacagtgaaggagagtgggcgtctggcggcgtccgcagtttcagcagagccgctgcagccatggccccaatcaaggttcggctccctggctgaatcccactggggcctttgggaaggagacagacttattactacgatgattcgctggtgtccatctttgggaaacgacgtcttcaagaggttctccatggtaggtacaggatggctagtaagaacgccctgaatgcgcaaccagatggcccaggcctcacctgcagcctggcacccaatatcatctcacagctctgaggccctgggccagattacttcctccacccctccctatctcacctggcccagccctgtgctgggggccctgcaattggaatgttggccagatttctgcaataaacacttgtggtttgcggcccctaaatatattaaaaaacaacaaattaaaaaaaaacccggggggccccctttaaaaaaatcccggggggggcccatttttccggggagaggagaaaaaannnnnnnnnnnnnnagggggggtgatataataggggggccggggccgtggttaaccccgg

SEQ ID NO: 123506 - DNA, 864 bp, Homo sapiens
  misc_feature (1)...(864): n = a,t,c or g
ggcacgaggatgggactagctggcgtgtgcgccctgagacgctcagcgggctatatactcgtcggtggggccggcggtcagtcttggncccccgggcagcggcagcaagacggtgcagtgaaggagagtgggcgtctggcggggtccgcagtttcagcagagccgctgcagccatggccccaatcaaggtgggagatgccatcccagcagtggaggtggtttgaaggggagccagggaacaaggtgaaacctggcaaaagcttgttcaagggcaagaagggtgtgctgtttggagttcctgggggccctccacccctgggatgttcccaagacacacctggccaagggtttgtgggagcaaggctgaaggctctgyaaggccaaagggaagtccagggtggtggccctgttctgagttgttaatgatgccctttgtgactgggcgcagtggggccaagccccacaaggcggaaaggcaaggttcgggctcctggctgaatccccactggggccctttgggaaggacgacagacttattacctagatgaatcgctggtgtcccatcttttgggaatacgacgtctcaagaaggttctccattggtggtacaggatggcatagttgaaggcccttaaatgtggaaccagatggcacaggccttcaccttgcagcctgggcacccaatatcatcttcacagctcttgaggccctgggcccagatttacttcccctcccccctccctattcttcaccttgcccagccctgtgcttggggcccttgcaatttgggaatgttgggcagatttctgcaataaacactttgtgggttttgcggccaaaacaaaaaaaaaaaaaaaagtcgac

SEQ ID NO: 123507 - DNA, 721 bp, Homo sapiens
  misc_feature (1)...(721): n = a,t,c or g
cagtgctgttctggcggcacacatggtaaccctgccattggcgacaggaatgcagaagnagatcctgccctgggcaccagcacaaatgaagatcagattcatggctcctcctgagcgcaagtactcggtgtggatcgcggctcccatcctggcctcgctgtccacctccagcaggatgtggatcagcaagcaggagtatgacgagtccggcccctccatcgtccaccgcaaatgcttctaggcggactatgacttagatttaaaaactggaacggtgaaggtgacagcagtcggttggagcgagcatcccccaaagttcacaatgtggccgaggactttgattgcacattgttgttttttttaatagtcattccaaatatgagatgcattgttacaggaagtcccttgccatcctaaaagccaccccacttctctctaaggagaatggcccagtcctctcccaagtccacacaggggaggtgatagcattgctttcgtgtaattaatgtaatgcaaaatttttttaatcttcgccttaatacttttttattttgttttattttgaatgacgagccttcgtgcccccccttcccccttttttgtcccccaacttgagatgtatgaaggcttttggtctccctgggagtgggtggaggcagccagggcttacctgtacactgacttgagaccagttgaataaaagtgcacaccttaaaaaaaa

SEQ ID NO: 123508 - DNA, 1914 bp, Homo sapiens
cgcgtccgccccgcgagcacagagcctcgcctttgccgatccgccgcccgtccacacccgccgccagctcaccatggatgatgatatcgccgcgctcgtcgtcgacaacggctccggcatgtgcaaggccggcttcgcgggcgacgatgccccccgggccgtcttcccctccatcgtggggcgccccaggcaccagggcgtgatggtgggcatgggtcagaaggattcctatgtgggcgacgaggcccagagcaagagaggcatcctcaccctgaagtaccccatcgagcacggcatcgtcaccaactgggacgacatggagaaaatctggcaccacaccttctacaatgagctgcgtgtggctcccgaggagcaccccgtgctgctgaccgaggcccccctgaaccccaaggccaaccgcgagaagatgacccagatcatgtttgagaccttcaacaccccagccatgtacgttgctatccaggctgtgctatccctgtacgcctctggccgtaccactggcatcgtgatggactccggtgacggggtcacccacactgtgcccatctacgaggggtatgccctcccccatgccatcctgcgtctggacctggctggccgggacctgactgactacctcatgaagatcctcaccgagcgcggctacagcttcaccaccacggccgagcgggaaatcgtgcgtgacattaaggagaagctgtgctacgtcgccctggacttcgagcaagagatggccacggctgcttccagctcctccctggagaagagctacgagctgcctgacggccaggtcatcaccattggcaatgagcggttccgctgccctgaggcactcttccagccttccttcctgggcactggagtcctgtggcatccacgaaactaccttcaactccatcatgaagtgtgacgtggacatccgcaaagacctgtacgccaacacagtgctttccggcggcacccaccaattccccttgccttgccgaccaggatgctgaaagaaaatcactgccctggaacccgtccacaatgaagattcagaatcattgcttcctcctgaggcgcaaagtactccgttatggaatcgcggggctccaatcctgggcctcgctggtccaccttccagccaagatgtgggatcagaaaagcagggagtatgacgagtccgggcccctcccattcgtccaccgcaaaatgctttctagggcggactatgacttagttgcggttacacccctttcttgacaaaaacctaaacttgcgccagaaaaccaagatgagaattggcatggcctttatttgttttttttgttttggtttggttttttttttttttttttggcttgacctcaggattttaaaaaactgggaacggtgaaaggtgaacagccagtcgggttggaagccgagcattccccccaaagtttcacaaatgtgggccggaggacttttgattggcacattgttgtttttttttaatagtcaattcccaaatatggagatgcggttgttacagggaagtcccttgcccatcctaaaagacacccccacttcttctctaaggagaatggcccagttcttctcccaaagtcccacacaggggaagggtgatagcattgcttttcgtgtaaaataatgtaatgcaaaattttttttaatctttcgccttaatacttttttattttgttttattttggaatgatgagccttccgtgccccccccttcccccttttttgtccccccaactttgagattgtatgaaggcttttgggtctccctgggggagtggggtgggagggcagccaggggctttacctggtacacttgacttggaggacccagtttgaataaaaaagtgcacaaccttaaaaatgaaaaaaaaaaaaaaaaaa

SEQ ID NO: 123509 - DNA, 424 bp, Homo sapiens
tggagccagtgagaataccccactgggagaggggagaagaatcagctgtttgggctgttgtttcttatgttgttgcagacatggaagaaatgctgcctaggtcctagaaacagtaagaaagagacgtcgtcatgcttctggccaggaatcctgggtctgcaactttggaaaactcctcttcacataacaatttcatccaattcatcttcaaagcacaactctatttcatgctttctgttattatctttcttgatactttccaaattctctgattctagaaaaaggaatcattctcccctccctccaaccacatagaatcaacatatggtagggattacagtgggggcatttctttatatcacctcttaaaaacattgtttccactttaaaagtaaacacttaataaatttttggaagatctctg

SEQ ID NO: 123510 - DNA, 1784 bp, Homo sapiens
atgaaattccttatcttcgcatttttcggtggtgttcaccttttatccctgtgctctgggaaagctatatgcaagaatggcatctctaagaggacttttgaagaaataaaagaagaaatagccagctgtggagatgttgctaaagcaatcatcaacctagctgtttatggtaaagcccagaacagatcctatgagcgattggcacttctggttgatactgttggacccagactgagtggctccaagaacctagaaaaagccatccaaattatgtaccaaaacctgcagcaagatgggctggagaaagttcacctggagccagtgagaataccccactgggagaggggagaagaatcagctgtgatgctggagccaagaattcataagatagccatcctgggtcttggcagcagcattgggactcctccagaaggcattacagcagaagttctggtggtgacctctttcgatgaactgcagagaagggcctcagaagcaagagggaagattgttgtttataaccaaccttacatcaactactcaaggacggtgcaataccgaacgcagggggcggtggaagctgccaaggtgggggctttggcatctctcattcgatccgtggcctccttctccatctacagtcctcacacaggtattcaggaataccaggatggcgtgcccaagattccaacagcctgtattacggtggaagatgcagaaatgatgtcaagaatggcttctcatgggatcaaaattgtcattcagctaaagatgggggcaaagacctacccagatactgattccttcaacactgtagcagagatcactgggagcaaatatccagaacaggttgtactggtcagtggacatctggacagctgggatgttgggcagggtgccatggatgatggcggtggagcctttatatcatgggaagcactctcacttattaaagatcttgggctgcgtccaaagaggactctgcggctggtgctctggactgcagaagaacaaggtggagttggtgccttccagtattatcagttacacaaggtaaatatttccaactacagtctggtgatggagtctgacgcaggaaccttcttacccactgggctgcaattcactggcagtgaaaaggccagggccatcatggaggaggttatgagcctgctgccagcccctcaatatcactcaggtcctgagccatggagaagggacagacatcaacttttggatccaagctggaagtgcctggagccatgtctacttgatgacttatacaagtatttcttctttccatcactcccacggagacaccatgactgtccatgggatccaaacgcagatggaatgtttgctgctgctgttttgggctgttgtttcttatgtgtgttgcagacatggaaggaaatgctgcctaggtcctagaaacagtaagaaagaaaccgttttcatgcttctggccagggaatcctgggtttgcaaccttgggaaaactcctcttcacataaccattttcatcccaattcatcttgaaaagcaacactctatttcatgctttctcgttattatctttcttggatactttccaaattctctggattctaggataaagggaatcattctcccctccctcccaccacatagaatcaacatatggtagggattacagtgggggcattttctttatatcacctcttaaaaacattgtttccactttaaaaagttaaacacttaataaatttttggaagatctctgaaaaaaaaaaaaaaaaaaaaaa

SEQ ID NO: 123511 - DNA, 645 bp, Homo sapiens
atcaagtaatagatcacatattgtgaaactgccagttaacaggcaattgaagtttatgcatactccacatcagttccttcttctcagcagtccaccagccaaagaatccaattttagagctgctaaaaaactctttggaagcacctttgcatttcatggctcacacattgaaaactggcactccatcctgaggaatggtctggttgttgcttctaatacacgattgcagctccatggtgcaatgtatggaagtggaatctatcttagtccaatgtcaagcatatcatttggttactcagggatgaacaagaaacagaaggtgtcagccaaggacgagccagcttcaagcagtaaaagcagcaatacatcacagtcacagaaaaaaggacagcaatcccaattcctgcaaagccgtaacttaaaatgcatagccttatgtgaagtgatcacctcatctgacctgcacaaacatggagagatatgggttgtccccaatactgaccatgtctgcacacgattctttttcgtctatgaagacggccaagtgggagatgcaaatattaatacacaagaaggaggcattcacaaagagatcctccgagtaattggtaatcaaactgctactggttaaaggaccaccattta

SEQ ID NO: 123512 - DNA, 737 bp, Homo sapiens
cctaccgtatgtgaacgggagctgtgtgtgtttgcttttcaaaccctgggagtaatgaatgaagctgctgatgaaatagcaactggagctcaggtggtagatctactagtatccatgtgtaggtctgcgttggaatctcctagaaaagttgtgattttcgagccatatccttctgtggtagatcctaatgatcctcagatgttggccttcaaccccaggcaattgaagtttatgcatactccacatcagttccttcttctcagcagtccaccagccaaagaatccaattttagagctgctaaaaaactctttggaagcacctttgcatttcactccatggtgcaatgtatggaagtggaatctatcttagtccaatgtcaagcatatcatttggttactcagcctaatgtgatcaaacctttaccctagaatggaactttgcatagtaggtcgattgtactttcagctgcatcagacagctttgtccctaaattatgattttgccgatgttttcagggatgaacaagaaacagaaggtgtcagccaaggacgagccagcttcaagcagtaaaagcagcaatacatcacaggtgttgtagtgactttagtgactgcttatgattagtgaactgtggcctcatcagccagcagagcatggaaaaataggctttttaagtctgaaaaattatttaatgtggtcattacttataaaggaataaaactcactctgaaatgca

SEQ ID NO: 123513 - DNA, 488 bp, Homo sapiens
  misc_feature (1)...(488): n = a,t,c or g
tactaaattcgcggccgcgtcgacgcttacatgaacaaggtagagctggagtctcgcctggaagggctgaccgacgagatcaacttcctcaggcagctatatgaagaggagatccgggagctgcagtcccagatctcggacacatctgtggtgctgtccatggacaacagccgctcctccagggccgtggttgtgaagaagatcgagacacgtgatgggaagctggtgtctgagtcctctgacgtcctgcccaagtgaacagctgcggcagcccctcccagcctacccctcctgcgctgccccagagcctgggaaggaggccgctatgcatggtagcactgggaacaggagacccacctgaggctcaggcctagccctcagcccacctggggagtgtactacctggggacccgccttgcccatgcctncagctacaaaacaattcaattggttggttttgtgggtcgaaataaacctcggcttgctct

SEQ ID NO: 123514 - DNA, 649 bp, Homo sapiens
agtgacccagaagtccttcaaggtgtccaactctggcccaagggccttcagtagccattcctacatgtgtgggcccagtgcctgcatcagctcctcgagcttctcccgaatgggcagcagcagtttccggggtagcctgggtggagactttggcagggccagtggtaggggaggcatcaccccagtcacggtcaaccagagcctgctgagcccccttaacctggaggtggaccccaacatccaagctgtgtgcacccaggtgaaggagcagatcaagaccctcaacaacaagtttgcctccttcattgacaagctgtacactctgggccaagagaagctgaagctggaggtggaacttgataacatgcaggggctggtggaggacttcaagaacaagtacgaggatgatatcaaaaagcatacagagatggagaatgaatttgtcctcatcaagaaggatatggatgaagcttacaagaacaaggtagagctggagtctcacctggaagggcttactgaagagatcagcttcctcaggcaactgtatgaagaggagatccgggagctgcagtcccagatctcggacacatctgtggtgctgtccattgacaacagtcgctccctggacatgaacagcatcatcgctgag

SEQ ID NO: 123515 - DNA, 613 bp, Homo sapiens
ctggagactgggccaggagaagctgaagctggaggcggagcttggcaacatgcagccgctggtggaggacttcaagaacaagtatgaggatgagatcaataagcgtacagagatggagaatgaatttgtcctcatcaagaaggatgcagatgaagcttccatgaacaaggtagagctagggtctcgcctggaagggctgactgacgagatcaacttcctcatgcagctatatgaagaggagatccgggagctgcagtcccagatctcagacacgtctgtggtgctgtccatggacaacagctgctccctggacatggacagcatcattgctgagagggcttccctggaggccgccatcacagatgccgagctgcacggggatttggtggttaaggatgccaacgccaagctgtccgagctggaggccgccctgcagcgggccaagcaggacatggcgtggcagctgcgtgaataccaggagctgatgaacgtcaagctggccctggacatagagatcgccacctacaggaagctgctggagggcaaggagagccggctggagtctgggatgcagaacaggagtatccatagaagaccaccagtggcggtggag

SEQ ID NO: 123516 - DNA, 1668 bp, Homo sapiens
atgcagcgggccccccgaccggcgctcgcccgggttctgcgcctaagagttggccacgacgaggcgatttatgcaacagtatcctgtttcagcactgccaaggctatgcgagaacgcggccaggacagcctggcaggactcgtgctgtatgtaggactcttcgggcaccccgggatgctgcacagggccaagtacagccgctttcggaacgagtcgatcacgtccttggacgaaggtagctccggaggctcggtcgggaacaagggctcgccgcagcctccccaccccgccctggcacctcacctgccgactgaagatgccaccttgccgtcgcaggagagccccaccccactgtgcaccttgatcccccgcatggcaagcatgaagctggccaacccggccactttgctgagtctgaaaaacttttgcctgggtaccaaagaggtgcctcggctgaagctccaggaaagccgggacccaggttccagcggcccctcttccccagaaaccagtttaagtaggtccgggactgcacctccaccgcagcaggacctggtgggacacagggcaaccgccctaacccctgattcgtgcccgcttcctggccctggggagccaacacttaggagcaggcaggacaggcactttctacagcacctgttggggatgggcatgaactactgtgtgaggtgggcagcagcagcttccgagatgtcctgggcaccagcatgggtctgtgtggaggctatgcggggccagcgtatgggaggcatcacagccgtcacagtcaaccagaacgtgctgagcccccttaacctggaagtggaccccaacatgcagggcatgcacacccaggagaaagagcaggtcaagaccctcaacaagtctgcctccttcgttgacaaggtactgttcctggaacagcagaacaagatgctggagaccaactggagcctcctgcagcagcagaagccggctcagagcaacatggacaacatgttcgagagctacatcaacaaccttctggggcagctagagatcctgggccaggagaagctgaaactggaggcagagcttggcaacatgcaggggctctgcatgtttttcgtgaaggaggacttcaagaaaaagtacgaggacgagatcaataagcctacagagatggagaatgaatttgtcctcatcaagaaggatgtggatgacgcttacatgaacaaggtagagctagagtttcgcctggaggggctgactgacgagatcaacttcctcaggcagctgtatgaagaggagatcccagagctgcagtcccagatcttggacacatctgtggtgctgtccatggacaacagccgctccctggacatggacagcatcatcgcggagatcaagtatgaggagctgcagacactggctgggaagcactgggatgaccggcgtcttacaaagacgaagatttctgagatgaaccggaacatcagccggctccaggctgagattgagggcctgcctcaaaggccagagcagagagcttccctggagtccgtcatcgcagatgctgagcagcggggggagctggccattaaggacgccaagactaagctgtccgagctggaggccgcccagcagcgggccaagcaggacatggcacatggcacggcagctgcctga

SEQ ID NO: 123517 - DNA, 3576 bp, Homo sapiens
ttaattgctggtggctcggagagagggttgatttatacccaattcgttgcccaaaccgctatgtgcattactatcacagctggatgcactatttttccgcctattcgttaggacgtctctactggcaatcttctcagtgcgaagacaacacttcgctacgcgaggcgctaaccctgtacaaatacgatagcgccgggagtcgtatgttcgaagagctggcagcgggaagcgatcgtttctatgccacgcttccctggcagccattaactgtccagtctgaatgcccggtaacgcgatcaatatcacggtcatcgaaccgacaatgatgtcagtaaaccagtgtgcgccaatcattactctgggaaatgcaaaaaccacaaaaataataagggcgataaggcctgcaactttgccgaaataacgccacatgaatgccgaaaaaataagcagcatcatgccgtgatcgccgggaaagctatctcgtgaggcatctttcgtgggaacagagagcagttcgctgacgcggttaatatcggtaaaagtcaatgttgggctggcccgttttacaggaattaatgcctgacccagctggtttaataccactgcagttaatagcatgaccagaccaataatcacgatacgtcgtctgccaggggcgttttctttcagccagaaactcagcatcaacatacccatcgccagcagtgaacaaccgtcgaaggcgcgattgttggtcaatgcaaccagccacaaaaaggccttactttcgaccagtttccatgagcatgaaatgttcttccatttgtttgtgtcctcttttatttcgctgagcagttgtttgtagttctccttgaagaggtccttcacatcccttgtaagttggattcctaggtattttattctctttgaagcaattgtgaatgggagttcactcatgattgggctctctgtttgtctgttattggtgtataagaatgcttgtgatttttgcacattgattttgtatgctgagactttgctgaagttgcttatcaggttaaggagagtttgggctgagacgatggggttttctaaatatacaatcatgtcatctgcaaaaaaggacaatgtgagttcctcttttcctagtagaataccctttatttctttctcttgcctgattgccctggccagaacttccaacacttttggatttggtttggtgtccttatcatactgtaaactttccacttcactttctgttgcatcatcttttgttggaggtgactggttgtgagatggaacaggggacactgttggtgattttggcccagtaagtgtcttctcctttatgggggttaaaactttcttctttgaatgctctggctcatgttcattctgggtctttaattcaattaaagaatatatctgtccctttttatggctttggatttggttgtgagtgtcgtcgttcggctgctctgtcatgtcgtgacctcttgttgctggtgtgtgtgtgctcgacgtctcgctactatattggttcgtctcagttctggttttgtgtctttctgctttttctcctcttttgtgtcgttttcgtcgtctcgactctctatcagtgctgcgtccgtttgctactcttagaggggatcttgctctagtcatgggtctcaagtttattccaatccctggaggcttgtaaccaggtttttgggcgtccccgagtcctgttctggactggtgggcgcgaattttcccccgggggtgctcccgcgccaccaatacggccattagagcggcggtataccgcggggaattagtgtccgacaaaaagtcaagttccggggtataatgtagccatatgatgcctatttctttctttctttcttgttgttgcgtccccttttctgtctgtctctttttctctcttcctcttttgcggccctttcttctttctgttgtcctctctttccctttgtttgtcccttgttcttttttctctagaagagatcggagcgccctttctccctctcccatgtctttcttttctttcttttcttttattgtttgtttgctttttacacggttcttgtgtggttcctcctgttttgtgcttttgtggctgttcaattcatttcttatatccaacaattcttgtcgctcggtttttactgtatctttttcctcagcggcaaggtaacgtagtctcatctgttccaattcttcctgctgttttttaagacgagccatttgactttcttgctcccttttttccggattcgccggaacgcgtttcttcggcacttcaatcttgcgtttgccgctcatgtactgcccggtcaacgactccggcaccgccataatcgcttccagcggaccttctgcgaccacttcaccgccgtgaacacctgcgcccgggccaatgtcgatcacatggtcagcggcgcgaattgcgtcttcgtcgtgctccaccacaatcacggtattaccgagatcgcgcagatggataagcgtacccaacaggcgctcgttatcacgctggtgcaggccgatagacggctcgtccagcacgtacataacgccaaccaggcccgcaccaatctggctcgccagacggatacgctgtgcttcaccgccagaaagcgtttctgccgagcgggaaagcgtcaggtaattcaggccgacgttaacgaggaatttcagacgatcgccgatctctttaaggattttttctgcaatcttcgcccgctgacctgcgagtttgagattgttgaagaattccatcgcatgaccaatgctcatgtcggagatagcaggcagcggcgtattctcgacatacacgtggcgcgcttcccgacgcagacgcgtcccttcgcagctggcgcacggacgattactgataaacttggctaattcttcgcgtaccgcgctggattccgtctctttatagcggcgctccatattatgcagcacgccttcgaacggatgacgacgaatggaggtatcgcccgatcgtccacgagctggtggactagaaatgtcgacggtagcccggtaaaggtcgttcctgggcgtcttctccccgtcgacgacgattcctctctcttctgcacatggagagagatggccacctgttccagcttctgcccaagtgttagggggtggagtgagaccttcgatactttgtggttggaacttatgtgacaggctgctgtttcttcccatgttggggggagggatgtattgacgtggagtgaccccgtgaaaccccgtgggtagccatacggggccgatcttggggatacctgctatcttgtcccctggccctattggttgtgccttgggtggtatgatgtgtgttgatggtccacgagaaatctgctgagctcccagtcgaggtctgagggttgtcactgcatcctgagtcatcgatacccattggcagcaggcacacaacggcacacaaacagaagggggggtatagttagctcggtccacagcagctgctgacatcctcagaagtgaagacagcatgcccgtgtcccataggctactgggtttcttaaagaggtcctggcggtccccgaggtacat

SEQ ID NO: 123518 - DNA, 2793 bp, Homo sapiens
atgaatttgtcctcatcaagaaggattgtggatgaagcttacattaacaaggtagagctggagtctcgcctggaagggctgactgatgagatcaacttcctcaggcagctgtatgaagaggagatccgggagctgcagtcctggatctcagacacatctgtggtgctgtccatggacaacagccgctccctggacatgaacagcgtcatcgctgaggtcaaggcacagtacgaggagatcgccaaccgcagccaggccgaggctgagagcatgtaccagatcaaggatgaggagctgcagagtctggctgggaagcatggggataacctgcggtgcacaaagactaagatctccgagatgaaccggaacatcagccggctccaggctgagaatgagggcctcaaaggccagagggctttcctggaggccgccattgcagatgccgagcagtgtggagagctggccattaaggatgctaacgccaagttgtcgagctggaggccgccctgcagcgggccaagcaggacatggcgtggcagctgcgagctgatgaacgtcaggctggccctggacatcgagatcgccacctacaagaagctgctggagggcgaggagagccggctggagtctgggatgcagaacatgagtattcatacgaagaccaccagcggctatgcaagtggtctgagctcggcctgtgggggcctcacaagccccggcctcagctacggcctgggcgccagctccttcagccgcaccagctactccagggccgtggttgtgaagatcgagacacgtgatgggaagctggtgtccgagtcctctgacgtcctgcccaaggacattgtggctgtgctgaatgaagagggaggctaccatcagattggaccagcagaatactgtactgactcctttattatgtcagtgaccatagcatttgctacccagttggaacagattcacctctgctgtggagaccagtcacttggaagtacagaaatacctttaactggattacttaaaaagggcagtacagaaatcaaccagcacccagtcacagtcgaaggtgcttttacccttgaccctccaaacagagccaaacagaagcttgcacctattcctgtggagctagccccaacttctttaattgaattaaagacccagaatgaacatgagccagagcattcaaagaagaaagttttaacccccataaaggagaagacacttactgggccaaaatcaccaacagtgtcccctgttccatctcacaaccagtcacctccaacaaaagatgatgcaacagaaagtgaagtggaaagtttacagtatgataaggacaccaaaccaaatccaaaagccagttcttctgtacctgcttcactggcccagctagtgactacatccaatgcttcagaagtagcttcaggacagaagattgctgtaccagcaacatcacatcatttttgcttttcaatagacttaaggagtatacatgccttggagattggttttccaatcaactgtatattaaggtactcatatccattctttggaagtgcagctcctattatgactaatcctcctgtagaagttcggaaaaacatggaagtttttcttccccagtcttactgtgcatttgattttgcaactatgcctcatcagctgcaagacaccttcttaaggattccattactggttgaactatggcacaaggataaaatgagtaaagatttacttctgggaattgcgagaatccagctttctaacatcttgtcttcagaaaaaactcgttttttaggttctaatggtgaacagtgttggcgtcaaacttacagtgaaagtgtgcctgttatagcagcacagggaagtattgactgctttaatgaaagcattattcaaggggatgaaaagcttaatgatgctgaaaataagtataagattttggaaaaagagttccaacagttcaaggaccagcaaaacaacaaaccagaaatccgtctacagtctgaaataaatcttctcaccttggaaaaggttgaacttgaaagaaagttggaatctgcaactaagtctaaactgcattacaagcagcagtggggacgagctttgaaagaacttgccagacttaaacagggtgtatctgccgtacagcaaaagccgtcttctcttcctccagcaccttgtccttcagagatccagacagagcctcgtgaaacgttagaatacaaagcagcacttgagctagaaatgtggaaggagatgcaagaagatatatttgaaaatcagctgaagcagaaagaactggctcatatgcaggctcttgcagaggaatggaagaaaagggaccgagaaagagaatcactagtaaagaaaaagcttcaaagagaaaaaaaggaactgcaatcagaacgtcagcggaacctgcaagaactgcaggactctatccgtagggccaaagaggactgtattcaccaagtagaactagaaaggttaaaaatcaaacagctcgaagaggataaacaccgccttcagcaacagctgaagcagaaagaactggctcatatgcaggctcttgcagaggaatggaagaaaagggaccgagaaagagaatcactagtaaagaaaaagtcattcatgtctcctcggcagacagttagggttggtttagaccatccttctgtcctaacggttactcgtttggaaccttccgttgggtctggaaattgtggggaccttcagggggcgggaaacgggcctacgattagggaaccccggggaatcaaaggattttaa

SEQ ID NO: 123519 - DNA, 1756 bp, Homo sapiens
ttcggcaattcctacctccactcctgcctccaccatgtccatcagggtgacccagaagtcctacaaggtgtccacctctggcccccgggccttcagcagccgctcctacacgagtgggcccggttcccgcatcagctcctcgagcttctcccgagtgggcagcagcaactttcgcggtggcctgggcggcggctatggtggggccagcggcatgggaggcatcaccgcagttacggtcaaccagagcctgctgagcccccttgtccctggaggtggaccccaacatccaggccgtgcgcacccaggagaaggagcagatcaagaccctgaacaacaagtttgcctccttcatagacaaggtacggttcctggagcagcagaacaagatgctggagaccaagtggagcctcctgcagcagcagaagacggctcgaagcaacatggacaacatgttcgagagctacatcaacaaccttaggcggcagctggagacttctgggccaggagaagctgaagctggagaccggagcttgcgcaacatgcaggggctggtggaggacttcaagaacaagtatgaggatgagatcaataagcgtacagagatggagaacgaatttgtcctcatcaagaaggatgtggatgtggatgaagcttacatgaacaaggtagagctggagtctcgcctggaagggcatgaccgacgagatcaacttccatcaggcagctatatgaagaggagatccgggagctgcagtcccagatctcggacacatctgtggtgctgtccatggacaacagccgctccctggacatggacagcatcattgctgaggtcaaggcacagtacgaggatattgccaaccgcagccgggctgaggctgagagcatgtaccagatcaagtatgaggagctgcagagcctggctgggaagcacggggatgacctgcggcgcacaaagacttgagatctcttgagatgaacccggaacatcagccggctccaggctgagattgagggcctcaaaggccagagggcttccctgggaggccgccattgcagatgccgagcagcgtgggagagctggccatttaaggatgccaacgccaagttgttccgagctggaggccgccctgcagcgggccaagcaggacatggcgcggcacttgcgttgagttaccagggagcttgattgaacgttcaagcttggccctgggacattcgagattcgccacctacaggaagctgctggagggcgaggagagccggcttggagtctgcggatgcagaacatgagtattcatacgaagaccaccggcggctatgcaggtggtctgagctcggcctatgggggcctcacaagccccggcctcagctacagcctgggctccagcatttggctctggcgcgggctccagctccttcagccgcaccagctcctccagggccgtggttgtgaagaagatcgagacacgtgatgggaagctggtgtctgagtcctctgacgtcctgcccaagtgaacagctgcggcagcccctcccagcctacccctcctgggctgccccagagcctgggaaggaggccgctatgcagggtagcactgggaacaggagacccccctgagggtcagccctagccctcagcccacctggggagtttactacctggggaccccccttgcccatgcctccagctacaaaacaattcaattgctttttttttttttggtcccaaaataaaacctcagctagctctgcc

SEQ ID NO: 123520 - DNA, 3244 bp, Homo sapiens
atggcagcctctgccaatcacgaagaacaggagtttgcttggcaggagaatcagtcaccatctccgagttcctatgcttatggctggactgagccagagggaacagcaagtgcaaacgccctgaagcaggaatgtgctggtgtcttcaaggaacagaaagaagaccagggtgcaggaataacgcacggaaggttgccaggaaagcactgtcacacatttgcatgcaggttaaatttctcaaaatctgagcccctacagcgagtgacagtgggaagtgtgaaagaaaggctcaagattcgctgctgtgctgttgttattgtcaatggtgttatatccacaggcaagcaactaaacgtctctgagcttcagtttctttatctgagaaatggcataatagtactttatggggtttcccagggatcaaatgagataaagtgctttgcacaggacctggcaaatgctgaaccggagactgaccaggttccttcaaggatcctcagccatgcaaaagggaagcgcctttctgagggagccaagcttgcatctagaccttcacagtggtgcaacataacttctcagagatcggcatggtaccattcagtgaatttgggaatttcaggagaagaccaagtgtcagcacactgtctgctgaagtgcgatacctggcttcttaggaaagtggtacaaataggactggacttttcatttaccctgaaagcagcttttaagcaactcaactacattagggccccggggaaggactttacattgccaaaatctacagggctcacccttgacacgccagagtgccctctcagcactggggaagaagccagggagaaactcggagggctggaatggagaaactggattaatcatatttgcatgaaacaggacattctatctttcatatcaaaggaacatgccactcattggccaaggagcctgagccaggatgaagcaggggccatccattctgaggagcactaccccagtccctgctatgccatggctaaagcaccttcctcatgggagatgttcttggcagttaatttacgcgagaatcttgcagcaatatggcggatacagccaatgaaatgtcaaagaaagaaggcagttggctgctcaggaaaattgccaaggatgcagaaggaaatgaagatgatcaaagacgaggatgtgcatttcgacttggctgtgaagaagaccccctcctttccccactgcctgcagccagtggcttctcggggaaaggctccccaaagacaccccttcccggaagctctccgagggccattttcccagtttcggtatgaacctcccccaggagacctagatgggttccccggggtcttcgaaggagcagggtctaggaaacggaagagcatgcccacaaagatgccctataaccaccctgcagaagaagtcaccctcgccctccactcagaggagaacaaaaaccacggccttcccaacctccctttgctgttcccgcagcccccgcgccccaagtatgactctcagatgatcgacctgtgcaacgtgggcttccaattctaccgcagcctggaacactttgggggcaagcccgtcaagcaggaacccattaagcccagcgccgtgtggccccagccaacgcccactccattcctgcccacgccctacccctactaccccaaagtccacccgggcctcatgttccccttcttcgtgccctcgtcctcgcccttccccttcagccggcacaccttcctgcccaagcagcccccggaacctctgctgccccggaaagccgagccccaggagagcgaggagaccaagcagaaggtggagagggtggacgtgaacgtgcagatcgatgacagctactacgtggacgtgggcggctcgcagaagcgctggcagtgccccacctgcgagaagtcctacacctccaagtacaacctggtcacccacatcctgggccacagtgggatcaagccgcacgcgtgcacgcactgcgggaagctcttcaagcagctcagccacctgcatacccacatgctgacccaccagggcacgcggccccacaagtgccaggtgtgccacaaggccttcacccagaccagccacctgaagcgccacatgatgcagcacagcgaggtgaagccgcacaactgccgcgtgtgcggccgcggctttgcctaccccagcgagctcaaggcccacgaagccaagcacgccagtgggcgcgagaacatctgtgtggagtgcggcctcgacttccccaccttggcccagctgaagagacacctcaccacgcaccggggccccatccagtacaactgctccgagtgcgacaagaccttccagtacccgagccagctgcagaaccacatgatgaagcacaaggacatccggccctacatctgctcagagtgtggcatggagtttgtgcagccgcaccacctcaagcagcactccctcacccacaaggtactgcggggcctctggtggggcggacggggccttgggaagaggagcggggccctgagcagagcactggggagcaggacgcctgtgccgctctgcaccttaccccgaggaggtcttcaaggggaaatacaggcccaagagtctgagttcagcccagtttgcaaccatagccctggagtcattcaggctgaactaaaacaaggccctagtggtgttcctgaaatcttaccccagctaaactcctgccctacaaaaggtacctgtagatactatccagaggggagtcgcctgccaagtgcaggaaccatcaacaaaggacccagactgggattcagccgtaaaggggaccattcgctaacttcaggggctcctttatatgtgggaaaggaatcaaaagtgcattttagagcatatgaagatcctggtgtgaaggagcataagtgtgggatttgtgggcgggagttcaccctgctggccaacatgaagcgacacgtgctgatccacaccaacatccgcgcctaccagtgtcacctctgctacaagagcttcgtgcagaagcagaccctcaaggcacacatgatcgtccactctgacgtgaagcctttcaaatgcaagctttgtgggaaggaattcaaccggatgcacaacctgatgggccacatgcgcctggctctgaaacggaaaacccttaaagcgcctatattgcccaagcaaattcaccctgaaggggaacctgacacgccacatgaaagtcaagcatggagtcatg

SEQ ID NO: 123521 - DNA, 1872 bp, Homo sapiens
atgaggatccaacaattatgtggacatctgtggcagcaaaagaaaatcagccttgaattaatgtcttcatttcacaaaattttgaaaaataaaatggggtgtggagttacacctgatagcaaggagctgctaaagtatctctcctattgtaattcctatccccttaccggaagcccacaagaggccccagtgtctgatgttccccttcctgtgtccaagtgttctcattgttcagttcagctcatcatgtgtctgagaccagaacacatccccaactccccaggaataaagggacaaggtataaaacagcatgaagaaaagcatccaactcttcttcatctggatgcctcacaccttatgacctgctttgtggtggaaatgacactgtatgttttaattgcaggcttcaagagcctatgtagcatccactcttaccctcctagaaccctgagacatttatgtgaaaaagtctgggatagccttcttgagaatgagagacgacatgagaagagaggcccagccaacttcttgcatcgattgccagctgaacaccagtggggaatagtgcaatccagcaacattatggccggtctttcagcccgtctgcagctcttcctggaacacaggccttttcctgtgtttgaactcaccgccaatggctgtcctaccaaaggtcttcaaggggaaatacaggcccaagagtctgagttcagcccagtttgcaaccatagccctggagtcattcaggctgaactaaaacaaggccctagtggtgttcctgaaatcttaccccagctaaactcctgccctacaaaaggtacctgtagatactatccagaggggagtcgcctgccaagtgcaggaaccatcaacaaaggacccagactgggattcagccgtaaaggggaccattcgctaacttcaggggctcctttatatgtgggaaaggaatcaaaagtgcattttagagcatatgaagatcctggtgtgaaggagcataagtgtgggatttgtgggcgggagttcaccctgctggccaacatgaagcgacacgtgctgatccacaccaacatccgcgcctaccagtgtcacctctgctacaagagcttcgtgcagaagcagaccctcaaggcacacatgatcgtccactctgacgtgaagcctttcaaatgcaagaagtcttttacagctcagggtaatagtgctccacaggaagatgcaggatcgcagggagagctgtttgtcttcttttccaaactggggccagagaaaagggagagcctggaggcacctcaggcacttgccatgaaccccagtggccatgctgacagccatggagaagtcggctgtggccagagacagggtgatagcagtgggcagccactgggctggggccagaagcagcacaccgcctcgccccagccagcctggttgagtgaacatttctgcgtgctagggacagctgtttccactgagcactgggctggagaagatcagttcatattgagacaggaggaaggatgcatgttaagaaggaattttaatggtgagaatcccccaaaattagactctgttactaaaagcctcttccttgttgcttaccacgtaaacccgcagtggatccggccttgtgacacgaacccccggtgtgtccggcttgtcctacaagttacttatatagagccgccctacggtggacaaccgtgtgacgccggacttagagacacgatacttacgacagagcctcatgaccacaatcatggcatatcatcaggccccaataattcgccaggaagagccacgaatgacatctttgccctcataagaactgacattatcatggaggaaagagaaaataaagaacaaacataa

SEQ ID NO: 123522 - DNA, 4805 bp, Homo sapiens
gaaaaaggcttgaaaacatacaaaaaaccctagaggtggctttctcagaggcagtgtggatgcagccatctgttgtcctgctggatgaccttgacctcattgctggactgcctgctgtcccggaacatgagcacagtcctgatgcggtgcagagccagcggcttgctcatgctttgaatgatatgataaaagagtttatctccatgggaagtttggttgcactgattgccacaagtcagtctcagcaatctctacatcctttacttgtttctgctcaaggagttcacatatttcagtgcgtccaacacattcagcctcctaatcaggaacaaagatgtgaaattctgtgtaatgtaataaaaaataaattggactgtgatataaacaagttcaccgatcttgacctgcagcatgtagctaaagaaactggcgggtttgtggctagagattttacagtacttgtggatcgagccatacattctcgactctctcgtcagagtatatccaccagagaaaaattagttttaacaacattggacttccaaaaggctctccgcggatttcttcctgcgtctttgcgaagtgtcaacctgcataaacctagagacctgggttgggacaagattggtgggttacatgaagttaggcagatactcatggatactatccagttacctgccaagtatccagaattatttgcaaacttgcccatacgacaaagaacaggaatactgttgtatggtccgcctggaacaggaaaaaccttactagctggggtaattgcacgagagagtagaatgaattttataagtgtcaaggggccagagttactcagcaaatacattggagcaagtgaacaagctgttcgggatatttttattagagcacaggctgcaaagccctgcattcttttctttgatgaatttgaatccattgctcctcggcggggtcatgataatacaggagttacagaccgagtagttaaccagttgctgactcagttggatggagtagaaggcttacagggtgtttatgtattggctgctactagtcgccctgacttgattgaccctgccctgcttaggcctggtcgactagataaatgtgtatactgtcctcctcctgatcaggatggaagttccagctctgatagtgacctaagtctgtcttcaatggtctttcttaaccatagcagtggctctgacgattcagctggagatggagaatgtggcttagatcagtcccttgtttctttagagatgtccgagatccttccagatgaatcaaaattcaatatgtaccggctctactttggaagctcttatgaatcagaacttggaaatggaacctcttctgatttggaggacgaatccatgaaccaaccaggaccaatcaaaaccagactggctattagtcagtcacatttaatgactgcacttggtcacacaagaccatccattagtgaagatgactggaagaattttgctgagctatatgaaagctttcaaaatccaaagaggagaaaaaatcaaagtggaacaatgtttcgacctggacagaaattctttgatgaaatcactgagctgacatacctgccctcttttcaccataaagctgctcctcaccaggccgagccaggtcccaattcttcctcagcctctgctcccccaccctataatccttttatcacctcctctcctcacactcagtccggcttacagtttcgttctgtgactagccctcccccatctgcccaacaatttcctcttaaagaggtggctggagctaaaggcatagtcaagacagctttagagactgctcccacactagctctccctgtctcatcccaacccttttcattacacacagccgaagtgcagggctgtgcagtcggaattcttacacaaggaccgggaccatgccctgtagcctttttgtccaaacaacttgaccttactgttttaggctcgccatcatgtctccatgcggtagcttccgctgccctaatacttttagaggccctcaaaatcacaaactatgctcaactcactctctacagctctcacaacttccaaaatctattttctttctcacacctgacgcatatactttctgctccccggctccttcagctgtattcactctttgttgagtctcccacaattaccattcttcctggcccagacttcaatctggcctcccacattattctggataccacacctgaccctgatgattgtatgtctctgatctacctgacattcaccccatttccccatatttccttcttttctgttcctcatgttgatcacatttggtttactgacggcagttccaccaggcctgatcgccactcaccagcaaaggcaggctatgctatagaatcttccacatccatcattgaggctactgctctgcccccctccactacctctcagcaagccgaactgattgccttaactcgggccttcactcttgcaaagggactacacgtcaatatttatactgactctaaatatgccttccatatcttgcaccaccatgctgttatatgggctgaaagaggtttcctcactacgcaagggtcctccatcattaatgcctctttaataaaaactcttctcaaggctgctttacttccaaaggaagctggagtcacacactgcaagggccaccaaaaggcgtcagatcccattactctaggaaatgcttatgctgataaggacaggacgatagatggttcctcccaggtgattgaggaaaaaaaccacaatgggtattcagtaattgatacggggactcttgtggaagcagagttagaaaaattgcctaataactggtctcctcaaacgtgtgagctgtttgcactcagccaagccttaaagtacttacagaatcaaaagactatctcaatcctgattcaaaaggaacccagcccagctctaggactcacccctgagcgcaaaggcaatgttgggcatgctggtaaaggaccactagaatccagcagcccagacccctttctttgtggtcaagaaaggcgggaaaaggggtgcaggactgctacatcggtaagcataactaatccgataaacagaggtccatgggtggttacgcaccctggaaaggaactcacccctgagcacaaaggcaatgttgggcacgctgggagagacattctagcaaaagcaggggccattatacacctgaacataggagaaggaacacccgtttgttgtcccctgcttgaggaaggaattaatcctgaagtctgggcaacagaaggacaatatggacgagcaaagaatgcccgtcctgttcaagttaaactaaaggattccacctcctttccctaccaaaggcagtaccccctcagacccaaggcccaacaaggactccaaaagattgttaaggacctaaaagcccaaggcctagtaaaaccatgcagtaacccctgcagtactccaattttaggagtacagaaacccaacagacagtggagaaaccttgtgccatcaagccacccaagcgctcttcaatttcctcgctacctgtggctacatggtttccaaaccaaaggctcaactctgctcacagcaggttacttagggctaaaattatccaaaggcaccagggccctcagtgaggaacacatccagcctatactggcttatcctcatcccaaaaccctaaagcaactaaggggattccttggcgtaataggtttctgccgaaaatggattcccaggtatggcgaaatagccaggtcattaaatacactaattaaggaaactcagaaagccaatacccatttagtaagatggacaactgaagtagaagtggctttccaggccctaacccaagccccagtgttaagtttgccaacagggcaagacttttcttcatatgtcacagaaaaaacaggaatagctctaggagtccttacacagatccgagggatgagcttgcaacctgtggcatacctgactaaggaaattgatgtagtggcaaaggtggtggcagtagcagtcttagtatctgaagcagttaaaataatacagggaagagatcttactgtgtggacatctcatgatgtgaatggcatactcactgctaaaggagacttgtggctgtcagacaactgtttacttaaatgtcaggctctattacttgaagggccagtgctgcgactgtgcacttgtgcaactcttaacccagccacatttcttccagacaatgaagaaaagataaaacataactgtcaacaagtaatttctcaaacctatgccactcgaggggaccttttagaggttcctttgactgatcccgacctcaacttgtatactgatggaagttcctttgtagaaaaaggacttcgaaaagtggggtatgcagtggtcagtgataatggaatacttgaaagtaatcccctcactccaggaactagtgctcagctagcagaactaatagccctcacttgggcactagaattaggagaagaaaaaagggcaaatatatatacagactctaaatatgcttacctagtcctccatgcccatgcagcaatatggaaagaaagggaattcctaacttctgagagaacacctatcaaacatcaggaagccattaggaaattattattggctgtacagaaacctaaagaggtggcagtcttacactgccggggtcatcagaaaggaaaggaaagggaaatagaagagaactgccaagcagatattgaagccaaaagagctgcaaggcaggaccctccattagaaatgcttataaaacaacccctagtatag

SEQ ID NO: 123523 - DNA, 1846 bp, Homo sapiens
aattggaggaaaatactgggcacctgtctgccagttaaaaatggttagcgtggccaccggacttaagattcaggaaactagcccagatctaggactcacccctgagagcaaaggcaatgttgggcatgctggtaaaggaccgctagaatccagcagccaggaccactttctttgtggtcaagaaaggcagtacccccttagacccaaggcccaacaaggactccaaaaaactgttaaggacctaaaagcccaaggcctagtaaaaccatgcagtagcccctgcaatactccaactgtaggagtacagaaacccaacggacagtggaggttagtgcaaaatctcaggattatcaatgagactgttgttcctctatacccagctgaacctaacccttatactctgctttcccaaataccagaggaagcagagtggtatatagtcctggaccttaaggatgccttcttctgcatccctgtacatcctgattcccaattcctgtttgcctttgaagatccttcaaactcaacgtctcaactcacctggactgttttacgccaagggttcagggatagcccccatctatttggccaggcattagcccaagatttgagccaattctcatacctggacactcttgtcctttggtatgtggatgatttacttttagccacctgttcagaaaccttgtgccatcaagccacccaagtgctcttaaatttcctcaccacctgtggctacaaggtttccaaaccaaaggctcagctctgctcacagcaggttaaatacttagggctaaaattatccaaaggcttgagggccctcagtgaggaacacatccagcctatactggcttatcctcttcccaaaaccctaaagcaactaagagggttccttggcataacaggtttctaccgaatgtggattcccaggtacagcaaaataggcagatcattatatacactaattaaagaaactcagaaagccaatacccatttagtagtggtggcagtagcagtcttagtgtctgaagtggttaaaatgatacagggaagagatcttactgtgtggacatctcatgatgtgaatgccatactcactgctaaaggagacttgtggctgtcagacaaccgtttacttaaatatcaggctctattacttgaagggccagtgctgcaactgcgcacttgtgtaactcttaacccagtcacatttcttccagacaatgaagaaaagatagaacataactgccaacaagtaattgctcaaacctatgccgctcgaggggactttttagaggttcccttgactgatccccacctcaacttgtatactgatggaagttcctttgtagaaaaaggacttcaaaaagtggggtatgcagtggtcagtgataatggaatacttgaaagtaatcccctcactccaggaactagtgctcagctggcagaactaatagccctcactcgggtactagaatcaggagaaggaaaaagggtaaatatatatacagactctaagtgtgcttacctagtcctccatgcccatgcagcaatatggagagaaagggaattcctaacttccgagggaacacctatcaaacatcaggaagccattaggaaattattattggctgtacagaaacctaaagaggtggcagttttacactgccggggtcatcagaaaggaaaggaaagggaaatacaagggagccaccaagttgatattgaagtcaaaagagccacaaggctggaccctccattagaaatgcttataggaggacccctagtatggggtaatcccctccgggaagccaagccccagtactcagcaggagaaatagaatag

SEQ ID NO: 123524 - DNA, 772 bp, Homo sapiens
ctgtacctaacccttatactctgctttcccaaataccagaggaagcagagtggtttacagtcctggaccttaaggatgtctttttctgcatccctgtacatcctgactctcaattcttgtttgcctttgaagatcctttgaacccaatgtctcaactcacctgcactgttttaccccaagggttcagggatagcccccatctatttggccaggcattagcccaagacttgagtcagttatcatacctggacactcttgtccttcagtatgtggatgatttacttttagctgcctgttcagaaaccttgtgccatcaagccacccaagcactcttaaatttcctcgccacctgtggctacaaggtttccaaagagaaggctcagctctgctcacagcaggttaaatacttaggactaaaattatccaaaggcaccaaggccctcagtgaggaatgtattcagcctatactggcttatcctcatctcaaaaccctaaagcaactaagagagttccttggcataacaggcttctgccgaatatggatttccaggctctattacttgaaaggccagtgctgcaactgtgcacttgtgcaactcttaacccagtcacatttcttccagacaatgaagatagaatataactgtcaacaaataatttctcaaacctatgccactcgaggggaccttctagaggttcccttgactgatcctgacctcaacttgtatactgatggaagttcctttgtagaaaaaggacctcaaaaagcggg

SEQ ID NO: 123525 - DNA, 6507 bp, Homo sapiens
atgtggggcagcgatcgcctggcgggtgctgggggaggcggggcggcagtgactgtggccttcaccaacgctcgcgactgcttcctccacctgccgcggcgtctcgtggcccagctgcatctgctgcagaatcaagctatagaagtggtctggagtcaccagcctgcattcttgagctgggtggaaggcaggcattttagtgatcaaggtgaaaatgtggctgaaattaacagacaagttggtcaaaaacttggactctcaaatgggggacaggagctgcatgctgtttcccttgaacaacatcttctagatcaaattcgaatagtttttccaaaagccatttttcctgtttgggttgatcaacaaacgtacatatttatccaaattgttgcactaataccagctgcctcttatggaaggctggaaactgacaccaaactccttattcagccaaagacacgccgagccaaagagaatacattttcaaaagctgatgctgaatataaaaaacttcatagttatggaagagaccagaaaggaatgatgaaagaacttcaaaccaagcaacttcagtcaaatactgtgggaatcactgaatctaatgaaaacgagtcagagattccagttgactcatcatcagtagcaagtttatggactatgataggaagcattttttcctttcaatctgagaagaaacaagagacatcttggggtttaactgaaatcaatgcattcaaaaatatgcagtcaaaggttgttcctctagacaatattttcagagtatgcaaatctcaacctcctagtatatataacgcgtcagcaacctctgtttttcataaacactgtgccattcatgtatttccatgggaccaggaatattttgatgtagagcccagctttactgtgacatatggaaagctagttaagctactttctccaaagcaacagcaaagtaaaacaaaacaaaatgtgttatcacctgaaaaagagaagcagatgtcagagccactagatcaaaaaaaaattaggtcagatcataatgaagaagatgagaaggcctgtgtgctacaagtagtctggaatggacttgaagaattgaacaatgccatcaaatataccaaaaatgtagaagttctccatcttgggaaagtctggcctaaagacataagtgaagaagacataaaaactgtattttattcatggctacagcagtctactaccaccatgcttcctttggtaatatcagaggaagaatttattaagctggaaactaaagatggtccttctagatcctatggtaaaagaagaaaacaaggagtgaattccttaggcgtatcctccttggagcacatcactcacagcctcctgggacgccctttgtctcggcagctgatgtctcttgttgcaggacttaggaatggagctcttttactcacaggaggaaagggaagtggaaaatcaactttagccaaagcaatctgtaaagaagcatttgacaaactggatgcccatgtggagagagttgactgtaaagctttacgaggaaaaaggcttgaaaacatacaaaaaaccctagaggtggctttctcagaggcagtgtggatgcagccatctgttgtcctgctggatgaccttgacctcattgctggactgcctgctgtcccggaacatgagcacagtcctgatgcggtgcagagccagcggcttgctcatgctttgaatgatatgataaaagagtttatctccatgggaagtttggttgcactgattgccacaagtcagtctcagcaatctctacatcctttacttgtttctgctcaaggagttcacatatttcagtgcgtccaacacattcagcctcctaatcaggaacaaagatgtgaaattctgtgtaatgtaataaaaaataaattggactgtgatataaacaagttcaccgatcttgacctgcagcatgtagctaaagaaactggcgggtttgtggctagagattttacagtacttgtggatcgagccatacattctcgactctctcgtcagagtatatccaccagagaaaaattagttttaacaacattggacttccaaaaggctctccgcggatttcttcctgcgtctttgcgaagtgtcaacctgcataaacctagagacctgggttgggacaagattggtgggttacatgaagttaggcagatactcatggatactatccagttacctgccaagtatccagaattatttgcaaacttgcccatacgacaaagaacaggaatactgttgtatggtccgcctggaacaggaaaaaccttactagctggggtaattgcacgagagagtagaatgaattttataagtgtcaaggggccagagttactcagcaaatacattggagcaagtgaacaagctgttcgggatatttttattagagcacaggctgcaaagccctgcattcttttctttgatgaatttgaatccattgctcctcggcggggtcatgataatacaggagttacagaccgagtagttaaccagttgctgactcagttggatggagtagaaggcttacagggtgtttatgtattggctgctactagtcgccctgacttgattgaccctgccctgcttaggcctggtcgactagataaatgtgtatactgtcctcctcctgatcaggatggaagttccagctctgatagtgacctaagtctgtcttcaatggtctttcttaaccatagcagtggctctgacgattcagctggagatggagaatgtggcttagatcagtcccttgtttctttagagatgtccgagatccttccagatgaatcaaaattcaatatgtaccggctctactttggaagctcttatgaatcagaacttggaaatggaacctcttctgatttggaggacgaatccatgaaccaaccaggaccaatcaaaaccagactggctattagtcagtcacatttaatgactgcacttggtcacacaagaccatccattagtgaagatgactggaagaattttgctgagctatatgaaagctttcaaaatccaaagaggagaaaaaatcaaagtggaacaatgtttcgacctggacagaaattctttgatgaaatcactgagctgacatacctgccctcttttcaccataaagctgctcctcaccaggccgagccaggtcccaattcttcctcagcctctgctcccccaccctataatccttttatcacctcctctcctcacactcagtccggcttacagtttcgttctgtgactagccctcccccatctgcccaacaatttcctcttaaagaggtggctggagctaaaggcatagtcaagacagctttagagactgctcccacactagctctccctgtctcatcccaacccttttcattacacacagccgaagtgcagggctgtgcagtcggaattcttacacaaggaccgggaccatgccctgtagcctttttgtccaaacaacttgaccttactgttttaggctcgccatcatgtctccatgcggtagcttccgctgccctaatacttttagaggccctcaaaatcacaaactatgctcaactcactctctacagctctcacaacttccaaaatctattttctttctcacacctgacgcatatactttctgctccccggctccttcagctgtattcactctttgttgagtctcccacaattaccattcttcctggcccagacttcaatctggcctcccacattattctggataccacacctgaccctgatgattgtatgtctctgatctacctgacattcaccccatttccccatatttccttcttttctgttcctcatgttgatcacatttggtttactgacggcagttccaccaggcctgatcgccactcaccagcaaaggcaggctatgctatagaatcttccacatccatcattgaggctactgctctgcccccctccactacctctcagcaagccgaactgattgccttaactcgggccttcactcttgcaaagggactacacgtcaatatttatactgactctaaatatgccttccatatcttgcaccaccatgctgttatatgggctgaaagaggtttcctcactacgcaagggtcctccatcattaatgcctctttaataaaaactcttctcaaggctgctttacttccaaaggaagctggagtcacacactgcaagggccaccaaaaggcgtcagatcccattactctaggaaatgcttatgctgataagggtgtccgctgtgctcctgatccagcgaggcgcccattgccgctcccaattgggctaaaggcttgccattgttcctgcacggctaaaattggaggaaaataccgggcacttgtcggccagttaaaaacgattagtgtggccaccggacttaagactcaggacaggacgatagatggttcctcccaggtgattgaggaaaaaaaccacaatgggtattcagtaattgatacggggactcttgtggaagcagagttagaaaaattgcctaataactggtctcctcaaacgtgtgagctgtttgcactcagccaagccttaaagtacttacagaatcaaaagactatctcaatcctgattcaaaaggaacccagcccagctctaggactcacccctgagcgcaaaggcaatgttgggcatgctggtaaaggaccactagaatccagcagcccagacccctttctttgtggtcaagaaaggcgggaaaaggggtgcaggactgctacatcggtaagcataactaatccgataaacagaggtccatgggtggttacgcaccctggaaaggaactcacccctgagcacaaaggcaatgttgggcacgctgggagagacattctagcaaaagcaggggccattatacacctgaacataggagaaggaacacccgtttgttgtcccctgcttgaggaaggaattaatcctgaagtctgggcaacagaaggacaatatggacgagcaaagaatgcccgtcctgttcaagttaaactaaaggattccacctcctttccctaccaaaggcagtaccccctcagacccaaggcccaacaaggactccaaaagattgttaaggacctaaaagcccaaggcctagtaaaaccatgcagtaacccctgcagtactccaattttaggagtacagaaacccaacagacagtggagaaaccttgtgccatcaagccacccaagcgctcttcaatttcctcgctacctgtggctacatggtttccaaaccaaaggctcaactctgctcacagcaggttacttagggctaaaattatccaaaggcaccagggccctcagtgaggaacacatccagcctatactggcttatcctcatcccaaaaccctaaagcaactaaggggattccttggcgtaataggtttctgccgaaaatggattcccaggtatggcgaaatagccaggtcattaaatacactaattaaggaaactcagaaagccaatacccatttagtaagatggacaactgaagtagaagtggctttccaggccctaacccaagccccagtgttaagtttgccaacagggcaagacttttcttcatatgtcacagaaaaaacaggaatagctctaggagtccttacacagatccgagggatgagcttgcaacctgtggcatacctgactaaggaaattgatgtagtggcaaaggtggtggcagtagcagtcttagtatctgaagcagttaaaataatacagggaagagatcttactgtgtggacatctcatgatgtgaatggcatactcactgctaaaggagacttgtggctgtcagacaactgtttacttaaatgtcaggctctattacttgaagggccagtgctgcgactgtgcacttgtgcaactcttaacccagccacatttcttccagacaatgaagaaaagataaaacataactgtcaacaagtaatttctcaaacctatgccactcgaggggaccttttagaggttcctttgactgatcccgacctcaacttgtatactgatggaagttcctttgtagaaaaaggacttcgaaaagtggggtatgcagtggtcagtgataatggaatacttgaaagtaatcccctcactccaggaactagtgctcagctagcagaactaatagccctcacttgggcactagaattaggagaagaaaaaagggcaaatatatatacagactctaaatatgcttacctagtcctccatgcccatgcagcaatatggaaagaaagggaattcctaacttctgagagaacacctatcaaacatcaggaagccattaggaaattattattggctgtacagaaacctaaagaggtggcagtcttacactgccggggtcatcagaaaggaaaggaaagggaaatagaagagaactgccaagcagatattgaagccaaaagagctgcaaggcaggaccctccattagaaatgcttataaaacaacccctagtatag

SEQ ID NO: 123526 - DNA, 1660 bp, Homo sapiens
gcagtacccccttagacccaaggcccaacaaggactccaaaaaactgttaaggacctaaaagcccaaggcctagtaaaaccatgcagtagcccctgcaatactccaactgtaggagtacagaaacccaacggacagtggaggttagtgcaaaatctcaggattatcaatgagactgttgttcctctatacccagctgaacctaacccttatactctgctttcccaaataccagaggaagcagagtggtatatagtcctggaccttaaggatgccttcttctgcatccctgtacatcctgattcccaattcctgtttgcctttgaagatccttcaaactcaacgtctcaactcacctggactgttttacgccaagggttcagggatagcccccatctatttggccaggcattagcccaagatttgagccaattctcatacctggacactcttgtcctttggtatgtggatgatttacttttagccacctgttcagaaaccttgtgccatcaagccacccaagtgctcttaaatttcctcaccacctgtggctacaaggtttccaaaccaaaggctcagctctgctcacagcaggttaaatacttagggctaaaattatccaaaggcttgagggccctcagtgaggaacacatccagcctatactggcttatcctcttcccaaaaccctaaagcaactaagagggttccttggcataacaggtttctaccgaatgtggattcccaggtacagcaaaataggcagatcattatatacactaattaaagaaactcagaaagccaatacccatttagtagtggtggcagtagcagtcttagtgtctgaagtggttaaaatgatacagggaagagatcttactgtgtggacatctcatgatgtgaatgccatactcactgctaaaggagacttgtggctgtcagacaaccgtttacttaaatatcaggctctattacttgaagggccagtgctgcaactgcgcacttgtgtaactcttaacccagtcacatttcttccagacaatgaagaaaagatagaacataactgccaacaagtaattgctcaaacctatgccgctcgaggggactttttagaggttcccttgactgatccccacctcaacttgtatactgatggaagttcctttgtagaaaaaggacttcaaaaagtggggtatgcagtggtcagtgataatggaatacttgaaagtaatcccctcactccaggaactagtgctcagctggcagaactaatagccctcactcgggtactagaatcaggagaaggaaaaagggtaaatatatatacagactctaagtgtgcttacctagtcctccatgcccatgcagcaatatggagagaaagggaattcctaacttccgagggaacacctatcaaacatcaggaagccattaggaaattattattggctgtacagaaacctaaagaggtggcagttttacactgccggggtcatcagaaaggaaaggaaagggaaatacaagggagccaccaagttgatattgaagtcaaaagagccacaaggctggaccctccattagaaatgcttataggaggacccctagtatggggtaatcccctccgggaagccaagccccagtactcagcaggagaaatagaatag

SEQ ID NO: 123527 - DNA, 834 bp, Homo sapiens
atgtgctcctggaccgctcccgtatcgagcatcctcacccacccaaattggcctgtccttagaatggctggccttacgggttgtgcctctgtagcaatgaagaaaaaaatagaacataactgtcaacaagtaattgctcaaaccttcaccactcgaggggaccttctagagattcccttgactgatcctggcctcaacttgtatactgatggaagttcctttgtagaaaaaggacttcgaaaagcggggtatgcagtggtcagtgataatggaatacttgaaagtaatcccctcactccaggaactagcgctcagctggcagaactaatagccctcacttgggcaccagaattagaagaaggaaaaagggtaaaaaggaaaaaggcaatatggagagaaagggaattcctaacttccgagggaacacctatcaaacatcaggaagccattaggagattattattagctgtacagaaacctaaagaggtggcagtcttacactgtcggggtcatcggaagggaactgccaagtggatattgaagccaaaagagccacaaggagtcaagtggccagaggtcacaaaatttgtgacttccccagttgctcctatagataacatcactattgtagaacctaagattggtcagcacagcttacatgaaaccacgcaagtaaaggaaagaaagtgctttagagggcaggttccatttgacacaagcagcacaggaagccgtacacttttgatgacagtaattcaaaaagtatattcatttgagtttctcaataaacgctttgagagaaaaggctttaatgttgattcagatgagtgttaa

SEQ ID NO: 123528 - DNA, 842 bp, Homo sapiens
  misc_feature (1)...(842): n = a,t,c or g
caccttaaggntttcccnggtacccttgtagggaattaagggaataaataaggttcctttcctccaaccattttccctaaggaccatagccagttacagtttcctgctggagttatcntaaaaaaaggacataccaggataaattttctatcatattgaaataaaacttagcattaaagcttttaccttctgtctttgtgcttttagattggcaactgtggtcaatcagtgctgcactggaatttccaactcagcaggggaaagaatctaattaaaaatgacacacactctgtattttgtcctttagaaaacagaaactgcttgtcgatatcccttaaaaagtgccaatggcccttcttggtccatttctttgtaaaagtctgagatgttgtttctaaacagcacagcttacatgaaaccacgcaagtaaaggaaagganaagtgcttttagaggggcaggttcccatttgacacaagcagcacaggaagccggtaccacttttgatgacagtaattcaaaaagtatattcagtttgagtttctcaataaacgctttgagagaaaaggctttaatgttgattcaggatgagtgttaaaataaagcgtttcgttttcgtgaaattagattattggggtaaaccaagccagattatctctggagatgacagaagccataattattttgggaaatttcaatcactgttttggaattgatacctaaggctttcttctcccctattatttatgggctttttaatgagatatttttctcggggagatgcttaggtaggaaatatcagcttttgaaagataaaggtacaattatcattagaatcaaaag

SEQ ID NO: 123529 - DNA, 438 bp, Homo sapiens
  misc_feature (1)...(438): n = a,t,c or g
tcctgtttccattaatgcctcctactaatgttgtcttctctcatgtacagagcaaggtaggtatataatcccagtatcactctattttgtattcnttagcctatgtgcttcccaagctgtatgtgaagctacatgactgtgtgagttgtgcaattcacagcaaagtagtcaggaatcgatctcgtgaagcccgcaaggaccaacaccccccactccgatttagtcctgcggtgagtattttaaaaggagaatggaagccaggggagtgatggttaatatctcatcctggagggtcagggtgtcctatannnnnnnnnnnnnnnnnnnnnnnnnntgggccaagaagattgctagaaaccagcagttnnnnnnnnnnnnnnnnnnnnnnnnnnngagaaggaagccaagcatgatagtgtgatcctatagtctggctgc

SEQ ID NO: 123530 - DNA, 1401 bp, Homo sapiens
atgacaaagaaaagaaggaacaatggtcgtgccaaaaagggccgcggccacgtgcagcctattcgctgcactaactgtgcccgatgcgtgcccaaggacaacgccattaagaaattcgtcattcgaaacatagtggaggccgcagcagtcagggacatttctgaagcgagcgtcttcgatgcctatgtgcttcccaagctgtatgtgaagctacattactgtgtgagttgtgcaattcacagcaaagtagtcaggaatcgatctcgtgaagcccgcaaggaccgaacacccccacctcgatttagacctgcgggtgctgccccacgtcccccaccaaagcccatgtcaggcgctggtcggggcaggagccacctggatgaggggagagagggtgcaggagatgaggtgggagagttaagtctgcagcaggagattgacaaggaccctctgggtggtgcactgggggcaggatccaggggaacaaagacaacagggatgcaggcaggcattggaggaggagagcaggtgctcgtcttttgggatagctccttgcccgctgttgtagacagctgcttccatccagtgccctctccagacaccagcgctgctctcagctggtgccttttgtcattttcacgtacaccccagcagccgagtcctggcaattttaggcctgagcacttgcctcttctcttcctcagtaccgtcctaccccagtctgtggcccagacccaggcaagtggtaaatatttaccttcacgctggagccaagatcgctgcggggagtcccgtgaagcaccactgccctctaagaccttggaaggggaaacaccagaaggtgtgggtgctgagctccgctgcgtcagactgccaggacctgagtggaactcagtgctgaaacctgggttctcactgcagctggatagcagctctgcccggatggccctagtcttcgtgtacggcaccctgaagcggggtcagcccaaccacagggtcctgcgggacggcgcccacggctccgcagcctttcgggcgcgcggccgcacgctggagccctacccgttggtgatcgcgggggagcacaacatcccgtggctgctgcacctgcccggctcggggcgcctcgtggagggcgaggtctacgcggtagacgagcggatgctgcgctttctggatgacttcgagagttgcccggccctgtaccagcgcacggtgctgcgggtacagctgctggaggaccgggccccgggcgcagaggagccgccagcgcccaccgcggtgcagtgcttcgtgtacagcagggccaccttcccgccggagtgggcccagctcccgcaccatgacagctacgactccgaggggccgcacgggctgcgctacaacccccgggagaacagataa

SEQ ID NO: 123531 - DNA, 1152 bp, Homo sapiens
atgacaaagaaaagaaggaacaatggtcgtgccaaaaagggccgcggccacgtgcagcctattcgctgcactaactgtgcccgatgcgtgcccaaggccaacgccattaagaaattcgtcattcgaaacatagtggaggccgcagcagtcagggacatttctgaagcgagcgtcttcgatgcctatgtgcttcccaagctgtatgtgaagctacattactgtgtgagttgtgcaattcacagcaaagtagtcaggaatcgatctcgtgaagcccgcaaggaccgaacacccccactcgatttggcaaatgaaaaaaaagttgaccagcctccagaagctaaaaagcccaaaataaaggtggtgaatgttgagctgcctattgaagccaacttggtctggcagttagggaaagaccttcttaacatgtatattgagacagagggtaagatgataatgcaagataaattggaaaaagaaaggaatgatgctaaaaatgcagttgaggaatatgtgtatgagttcagagacaagctgtgtggaccatatgaaaaatttatatgtgagcaggatcatcaaaattttttgagactcctcacagaaactgaagactggctgtatgaagaaggagaggaccaagctaaacaagcatatgttgacaagttggaagaattaatgaaaattggcactccagttaaagttcggtttcaggaagctgaagaacggccaaaaatgtttgaagaactaggacagaggctgcagcattatgccaagatagcagctgacttcagaaataaggatgagaaatacaaccatattgatgagtctgaaatgaaaaaagtggagaagtctgttaatgaagtgatggaatggatgaataatgtcatgaatgctcaggctaaaaagagtcttgatcaggatccagttgtacgtgctcaggaaattaaaacaaaaatcaaggaattgaacaacacatgtgaacccgttgtaacacaaccgaaaccaaaaattgaatcacccaaactggaaagaactccaaatggcccaaatattgataaaaaggaagaagatttagaagacaaaaacaattttggtgctgaacctcccacatcaggaatggtgaatgttacccctaatgaggaaaatttctgttaa

SEQ ID NO: 123532 - DNA, 401 bp, Homo sapiens
tccgtgcctccaagatgacaaagattagaaggaacaatggtcgtgccaaaaagggccgcggccacgtgcagcctattcgctgcactaactgtgcccgatgcgtgcccaaggacaaggccattaagaaattcgtcattcgaaacatagtggaggccgcagcagtcagggacatttctgaagcgagcgtcttcgatggtaagtgggtcaccggcgcgaactgtgtgaggatcccagtatcttaaagccttcgcccaacttcgcccttttggaggctctgttcgttggagcctctcaggcaatttccacgtatttaaggttgttactggtagaagagaattctcttgtttgccgttttgattcttttctgggcagagggtgactttgtgatagagtgcacagcg

SEQ ID NO: 123533 - DNA, 806 bp, Homo sapiens
  misc_feature (1)...(806): n = a,t,c or g
acataacctcgattttcttccgccatccggctaaatagtcccatgtgcactttgttccatggataaataaacactaggaacgcatttccaccctagatttcagcagaaatgctgaattgtaaaggaatatttgagtaaagtgagttgccgttcttgaagcccgtctcctaaggattctcccggtgtccgcgtagggatctcatgctatataggagggccctgccaggcaccgtcttcctctcttcggttcgttccttcaagattgccaaggaaaaggaaggaacaattggtcgtgcccaaaaaagggcccgcggcccacgtcagggggnngccncccttaaaatttttnccccngggnccntgccacctaactgtgccccgatgccgtgcgtcaagggacaaggcccattaagaaattcggtcattccgaaacatagtggaggccgcagcagttcagggacctttctgaagcgagcgtcttcgatgcctatbtbbcttcccaagctggtatgtgaagctacatttactgtgtgagttgtgcaattcacaagcaaaagtagtcaggaaatcgatcttcgtgaagcccggcaaagacccgaacacccccaccccgatttaggacctggcgggtgattgccccacggtccccccaccaaaagcccatgatctgggtccagaatactgcagacatcagacatgtgttaactgggtttgctgccggcaagccaccatccttgggaaggagttgtgtgggcaaatcaggaagttgccctctcagcagatgtctccaggatggctgccctcag

SEQ ID NO: 123534 - DNA, 455 bp, Homo sapiens
ttccccatccctgccatcaagacagagccatttgctgctgtccatccatgttatggctcaagggctcagacatggtatagggaagatgggagcagggaaagacatgaactgctgtgctgtgtgacaaggccaggggtgtcactgaggatgcaacaggaagcaggcaggtaggtgagagaagctggggaggcgggagatagagagttattctagcacagcagtgaatgaattcagtttgaatgaagcacagaagtaaatgtttggacagcggaaccaggtttcatgatctttgagttgtcctcataacatgttggaactaggtattgaaaagtctgaggtaatctgaagcttagaaaggcacaatctatcaagttaacttaaaggaaaggaaggtgttaacaaaattagaaagtgctgttttagaaacagccctagatattttccaaaaaaaaaaa

SEQ ID NO: 123535 - DNA, 516 bp, Homo sapiens
aattgacacaaaattatacatatttctggtgtacaatgagatgtttgatatacattgtacaaggatcaaatcagggtaattaacaaatccaccacctcaaacattaatcatttctttgtagtaaaaacattcaaaatcctctcttctagctatcaagttattttgtaatttgtgtaatattctggtaaaacggcctaaactggggtcatatttcctcatcagccgcattctgctaatgccagatgccctgggaagatcttcactgccatcttggaaggatgcagaatgtggtgatgaggaagccattctcccaggtacagcaaaggcagagtctgttgggcaacccacctgaagggcagtagactttctaaatagcgagttgaggtccatgtgggtgaagctaaaacccagaacacttttactggctaaaaatcatgatgattcaaaactcaaaccttcacatggatgcacccaaagtgaatcaacaaaatttaaagtcctttgaatagatcaatc

SEQ ID NO: 123536 - DNA, 726 bp, Homo sapiens
gagacggagtctcgctctgtcgcccaggccggactgcggactgcagtggcacaatctcggctcactgcaagctccgcttcccgggttcacgccattctcctgcctcagcctcccgagtagctgggactacaggcgcccgccaccgcgcccggctaattttttgtattttttagtagagacggggtttcaccttgttagccagatggtctcgatctcctgacctcatgatccacccgcctcagcctcccaaagtgctgggattacaggcgtgagccaccgcgcccggccgcaaaatctattttttaaagtgaggtgcccagaatgaagaaaagatggatggggacccttccctccctcaagcaggtcagattgctgggaatgatggtccaggctcctggcccccatcctttcctgtcaaggctacacctaagtgaggctatcaagttattttgtaatttgtgtaatattctggtaaaacggcctaaactggggtcatatttcctcatcagccgcattctgctaatgccagatgccctgggaagatcttcactgccatcttggaaggatgcagaatgtggtgatgaggaagccattctcccagtgacacccctggccttgtcacacagcacagcagttcatgtctttccctgctcccatcttccctataccatgtctgaacccttgagccataacatggatggacagcagcaaatggctctgtcttga

SEQ ID NO: 123537 - DNA, 694 bp, Homo sapiens
aacatgggaaaatattttattttattttattttatttttatttttttatttttttgagacggagtctcgctctggtcgccccaggccggcctgactgcggactgcagtgtgcgcaatctcggctcactgcaagctccgcttcccgggttcacgccattctcctggcctcagcctcccgagtagctgggactacaggcgcccgcaaccgcgcccggctaatttttttttttttgtattttttttagtaaaaacggggtttcaccttgttagccagggatggtcctcgatctcctgacctcatgatcccaccccgcctcggccttccaaagtgctggggattataggcgtgagccaccggcgcccggccattactttgcaattttaattaatgatgtgatctagtctccatctctctattccatttgggaaaaatcaattagatcaatgttaaaataaattttaaaataacagaattctatacataaaatgaaatgtctttcttatctttaaagaataagaatataaacattccctcatttcatgtttttaattttgacctttcctgtctcttccctaccctgcattttaataactttaataaataaattttataaatgaacttttttgaatgaaaaatctgataactttctccttctccaactctattctctaccttcacccctgcacacttccc

SEQ ID NO: 123538 - DNA, 483 bp, Homo sapiens
atggggaggagttttttggggggtgggagcacgctgatgcttcttggtggaggccagttgcacattcttacaccttcgtttccttcctggacagaaactggcaattacacctgtgaattctgcggcaaacagtacaagtactacactccctaccaggagcatgtggccttacacgcccccatcagaaactcagccaaagatgaccaccgctcagcttcaattctttctgaaaataggggaagccatcaatacatgccagttgtcatcatcattatcattgtcattattaccaccagcatcaccattgccttcatcaccattcttatcatcatcatcattgtcaccaccacagagggatgtggagaaactgggatactgtcctctggatacatcaaactcaacctgtccaagactgaaactgtcatctcctcataccctaaacgtgctccctctccagggtgtccctcccaccttctggcataa

SEQ ID NO: 123539 - DNA, 537 bp, Homo sapiens
atggcagaaggcaaaggagaagcaggcaccttcttcacaggcggcaggacagacagtctgcccctggaagtggtagcaagattccacagaaaagaagtaaaacttgctgctgatgaagatgatgatgatgatgatgaagaagatgattttgatgatgaggaaactgaagaagcgccagtgaagaaatctatacaagacactccagccagaaatgcacaaaagtcagatcagaatggaaaagtctcaaaaccatcatcaacaccaagatcaaaaggacaagaatcctttaaaaaacaggaaaagactcctaaaacacccaaaggacctcgttctgtagaagacattaaaacaaaaatgcaagcaagtatagaaaaagcacatggaacagtcctgggcactactgttggaaacatccctctgagaggagggaatcaagaaaagtttcatggagcagctggtgtttggtttgggaaatttggagttcagaggaaaatccaacagaagcagttgcagaaggatgtcacctccggctcctga

SEQ ID NO: 123540 - DNA, 943 bp, Homo sapiens
aaggtaagagtgtggtccagggccagtgcattatagtggacagcatatagtatctgtggaggaagatgcagagtcagaagatgaagaggaggaggatgtgaaactcttaagtatatttggaaagcggtctgcccctggaggtggtagcaaggttccacagaaaaaagtaaaacttgctgttgatgaagatgatggcgatgatgatgaagaggatgatgatgaagatgatgatgatgatgattttgatgatgaggaagctgaagaaaaagcgccagtgaccgaaatctatacgagatactccagccaaaaatgcagcgaaagtcaaatcagaatggaaaagactccaaaaaccatcatcaacaccaagatcaaaaggacaagaatccttcaaagaaacaggaaaaaactcctaaaacccccaaaaggacctaagttctgtagaagacattaaagcaaaaatgcaagcaagtatagaaaaaggtggttctcttcccaaagtggaagccaaattcatcaattatgtgaaggattgctttccggatgactggaccaagaggctatttcaagatctctgggcagtgggaggaagtctctttaagaaaatagtttaaacaaattgtttaaaaaatttcccgtcttatttcatttctgtaacagttgatatctggctgtcctttttataattgcagagtgagaactttccctaccgtgtttgataaatgtttgtccaggttctatttgccaaggaattgtgttgtcccaaaatgcctgtttaagttttaaagatggaacttcacccctttgcttggttttaagtatgtatggaatgttatgataggacatagtagtagcggtggtcagacatgggaaatggtgtgggagacaaaaatatacatgtgaaataaaactcagtattttaataaagtaaaaaaaaaaaaaaaaa

SEQ ID NO: 123541 - DNA, 2197 bp, Homo sapiens
gagagggctgaacccccctcatcgtgtcaagtcaatctccatgacaactttcactgagcctgaagtagtattcctgcaatcccgtggaaatgaggtgagctgccaccgatggagtggtgagaaggtcacctatctgcaggtttgccggaagatttggttgggtctgtttgatgctcggacatctttagtaccagattccagggatcctcagaaagtgaaggagtttctccaggaaaaatatgagaagaagagatggtatgtccccccagaccaagtcaaggggcccacttataccaaaggcagtgcctccacccctgtgcagggctccatcccagaagggaagccccttcggacacttctgggtgatcctgcaccgtctctctcagttgctgcctccacctcgagccagcccgtcagtcagtctcacgctcggacatcccatgcccggagcactcagccacctccccactcctctgtcaaaaaagccagtactgacctgctggctgacatcggtggagacccctttgctgcaccccagatggcaccagcttttgctgcattccctgcctttgggggccagacaccttcccaaggaggctttgccaactttgatgcctttagcagtggccccagctcttctgtgtttggaagcctccctccagctggtcaagcctcgttccaggcccagccaactcctgcagccagtcggatgctaactgaaagttacagctttgggagcagccaggggactccatttggtgccactcccctggcacccgccagtcagccaaacagcctcgcagacgtgggcagcttcctgggacccggggtgcccgctgcaggtgttcctagcagcctcttcgggatggctggccaggtccccccgctccagtctgtcacgatgggcggcggcggcggcagcagcacagggctggcctttggagccttcactaaccctttcacagctcccgccgcccagtccccgctgccttccaccaacccgttccagcccaatggcttggcgccagggcccggctttgggatgagcagtgctgggcctggcttcccccaggcagtgccacccactggggcctttgccagctccttcccagcaccgctgttccccccgcagaccccgcttgttcagcagcagaatggctcttccttcggggacttaggatcagccaagttggggcagaggccactgagccagccagctgggatctccaccaaccccttcatgagctctggtgaccacttgcctgtgggcatttctatgggccttggggatggtggaggtgctaatgctttgcttggggcctacagctcttccctgggcctagctcgccagcgctgtgctcctcatggacgggagcgcagtggggaagcccacaaggactccagcctgctggctggtgagagctggatgagcagtaagaagttaacgccagggaccatgctctgcagacagcagtcctctagcatggccccagcattcagccagtcggtcacctgtgggccatccccatgtgtgaggaagcaggagtcagccaccaagtgtctccacatcggagcttgcggcacccaaggttcagtgacacagggtggtttggagctggtcactgtcatagcagctgtgatttcacaaggaagggtgctgcagggggacctggttgatggggagtgggaaggggaaggaataaagagatcttcctcaggcaccttacttgccttgggtgatatctcagggtcctctaaggtcccaccaggtgtcacctgctggtttgtctggtgcaccttcacccccatccccttggaggggacacgagacccagccgtctctgcctcttctgcagccactttattgccttcgcccctgaatgaagcccgcaggcggcggccccggggagagccgggaatggccgccgtgcccctcagccagccgctgccctgggcctgccctgccgacgtgcggttctgcggccacctgcgcgcagacccgccgcgtcccgagtgttccgagagcgagcagaagtttcgcgcgtgccgagcgcggctccagcgcagcctgagcctggcgggtgcgtgcaccaccagcaagtgcgcagatgcgcgccagcaccacctgatcgtcctctacacccgcgacagcagcctgcgcgtggcggcggcaggcgaggcggagcagcaggcgtga

SEQ ID NO: 123542 - DNA, 2458 bp, Homo sapiens
  misc_feature (1)...(2458): n = a,t,c or g
agcgccattaccaatcgcgaacccgcctttttttttttttttttattaggaaaatgggcgatggtgatggcggcaaanaagggcccgggcccgggcggcggggtcagcgggggcaaggcggaggcggaggcggcctcggaggtgtggtgccgtcgggtgcgggagctgggtggctgcagccaggccgggaaccgccactgcttcgagtgcgcccagcgcggggtcacctacgtggatatcaccgtgggcagcttcgtgtgcaccacctgctccggcctcctgagagggctgaacccccctcatcgtgtcaagtcaatctccatgacaactttcactgagcctgaagtagtattcctgcaatcccgtggaaatgaggtttgccggaagatttggttgggtctgtttgatgctcggacatctttagtaccagattccagggatcctcagaaagtgaaggagtttctccaggaaaaatatgagaagaagagatggtatgtccccccagactaagtcaagggggcccacttttaccaaaggcagtgcctccacccctgtgcagggctccatcccagaagggaagccccttcggacacttctgggtgatcctgcaccgtctctctcagttgctgcctccacctcgagccagcccgtcagtcagtctcacgctcggacatcccaggcccggagcactcagccacctccccactcctctgtcaaaaaagccagtactgacctgctggctgacatcggtggagacccctttgctgcaccccagatggcaccagcttttgctgcattccctgcctttgggggccagacaccttcccaaggaggctttgccaactttgatgcctttagcagtggccccagctcttctgtgtttggaagcctccctccagctggtcaagcctcgttccaggcccagccaactcctgcagggagcagccaggggactccatttggtgccactcccctggcacccgccagtcagccaaacagcctcgcagacgtgggcagcttcctgggacccggggtgcccgctgcaggtgttcctagcagcctcttcgggatggctggccaggtccccccgctccagtctgtcacgatgggcggcggcggcggcagcagcacagggctggcctttggagccttcactaaccctttcacagctcccgccgcccagtccccgctgccttccaccaacccgttccagcccaatggcttggcgccagggcccggctttgggatgagcagtgctgggcctggcttcccccaggcagtgccacccactggggcctttgccagctccttcccagcaccgctgttccccccgcagaccccgcttgttcagcagcagaatggctcttccttcggggacttaggatcagccaagttggggcagaggccactgagccagccagctgggatctccaccaaccccttcatgactggaccctcatcaagcccattcgcctccaaacctccaaccaccaaccccttcttgtagcactgtgtttttggggggcctcttccctgccttctggggcccctctgctccctagagctctggtgaccacttgcctgtgggcattttctatgggccttggggatggtggaggtgctaatgctttgcttggggcctacaggtgaaaggtggctgccctcagattccacaaagcctctctcccctccctggtcccacccccacccaggcaggaagcccaggaggagtgcgggcagggcctgacctggaggagtgatggttaagggggagggatttttttcaaatgatcagggcccctgtggaacagcttttccctgggcctagctcgccagcgatgtgctcctcatggacgggagcgcagtggggaaggtaggggaaagatgaggcccagtgttgatggggcagtgacccagaccagtcctgagacccagaaggcccaggtggcccaagtgctcttggtggcccagcttggccagcacacacttttcctcctgcagcaccccctgctgaaggggtcccccattgttttgcttccccagcgcccaggatgagcggtttaccatcgagcttacccgggcccggctcctgtcaagcactttagttagctgttggtgtcatgtttggataccagtgttttatatttatacatagagaggattttctaatatagcctattatatataaatagatctatctatatgcacatacatacatatatacacacacccagccgatctcccgctcccagactgctctcgtatgtggggaatgggatgaatccccatctgtgcctcgaccatcaaagccggagctccagggctggagggggggcagccatgtgtcctgacccccaccatccccagagcctgggttttccagggaaaggctttgtgcaattgcctggtcttttttttttttttttttctccatgtgcctccctgtccccaaatctct

SEQ ID NO: 123543 - DNA, 553 bp, Homo sapiens
cctggattgttgaactcaatgcttgggtcacctccagattcattttcacagtctttcatgttttggtcatactacattgtattttgctgccatatgactgatctttttttgttaaatgtgagatacttgttaaaaaatatttaacaatgaattgaggcctagtagcatgttatcttgctgcagaagagatgggagtctacttctgggggatggtcaggggtcctccgtacaggctgcaattgaggtcgtctctgcaggctcagtccctacaaaggccagggtatttcctgtccacctctattctgatgcatgactcttctgggtctcaaccagagccagtggacttcagtatgggtcgctttcattggcagaccctcaatccacttgttttccatctaatcccacgcatgtgtgcaaaagctgctgtgcttctttgcatctcagtagttccttctggaattcagcaatgaaactcagggaaatgggttccaaatgcgaggctgactttcgtcctgggtttccttcttctccatcttcacctcatgtctgttta

SEQ ID NO: 123544 - DNA, 1548 bp, Homo sapiens
atgagagaaaattcaaataaacacaatcagaatgataaagggatattaccactggaccccacagaaatacaaataaccatcagagaatattatgaacacctctatgcacataaactagaaaatctggaagaaattgataaattcctggacatatacaccctcccaagactgaatcaggaagaacttgaatccctgaacagaaaaccaaatactgcatgttctaatttaagagatgggagtctacttctgggggatggtcacgggtcctccatacaggctgcaattgaggtcgtcggtgcaggctcagtggctacaaagggcagggggagacaggacgacacagatcccagcaatcggtatcatcgccccccgtacagccaagaggaaaaagagcaatgtatcactctgctgctgagctggtgtctaggggattcccaaggcccccagtgcaggccccagctgagcctgcaggagctgcggagggagttcacagtcagcctgcatctcgccaggaagctgctctccgaggttcggggccaggcccaccgctttgtaagtccccctaatgcagctggcgctggagatgggcagacccccaatcccttctggcccccactaacagaccttgccccccaggcggaatctcacctgccaggagtgaacctgtacctcctgcccctgggagagcagctccctgatgtttccctgaccttccaggcctggcgccgcctctctgtgaagtgcaccgcagtacgggcgtaccaaactacacgtgtcgtagagacctcttcctgccggctccacgtgaagggagcaagcaacgcgagcacacacagatcaccgaaagaagtaacacaagggacaaacaagagcgaacgacgaacaagagagacacaaagagcaatccgggagcgtaacatggcaggttgctgcacatgtgccacggacgtgttggttacacttcagagcttgatggaaggcctggcattgcagccccaaaggacaagagcgctactccttggcagtgcgtcaatcaaagcgtcctgtgcggtgacaattattttaatgagcgaaaacttgggcaaaggctgttctaaaaagagtgaaggaatggtccggagatatgcaaaacataagaagcaagaaattaaaccatattaccagagaaaatcaccttcactagagagaggacaggaagaaaagaaagtgggaagagaagaccgagaaggatctgaaaaccaatatctatatggaccgtcgaacatttccgaggctcgaaatcgactgccagagtgtggacgcatggggctgggatatgtagcccggttattcttgggagacaggcgttcctctacaccgtcttttgcctcctacgatccttcaagcctcgtaacctacgggcatagacggtcttgccgcgtttcagatattcgggtgcctcgcctgggcccgaacgtcgggggtccatgcaaaggaacgggtatagacctccaatgtgagagagagaaaaagaacgaagaatattcagctcggaccttacagctgtag

SEQ ID NO: 123545 - DNA, 2518 bp, Homo sapiens
gaattccttcaaagaatatagatggttttgaaaagttcatgctgtcccttcattgaattttagaatgattgaagatagtgggaaaagaggaaataccatggcagaaagaagacagctgtttgcagagatgagggctcaagatctggatcgcatccgactctccacctacagaacagcatgcaagcttaggtttgttcagaagaaatgcaatttgcacctggtggacatatggaatgtcatagaagcattgcgggaaaatgctctgaacaacctggacccaaacactgaactcaacgtgtcccgcttagaggctgtgctctccactattttttaccagctcaacaaacggatgccaaccactcaccaaatccatgtggagcagtccatcagcctcctccttaacttcctgcttgcagcgtttgatccggaaggccatggtaaaatttcagtatttgctgtcaaaatggctttagccacattgtgtggagggaagatcatggacaaattaagatatattttctcaatgatttctgactccagtggggtgatggtttatggacgatatgaccaattccttcgggaagttctcaaactacccacggcagtttttgaaggtccttcatttggttacacagaacagtcagccagatcctgtttctcccaacagaaaaaagtcacgttaaatggtttcttggacacgcttatgtcagatcctcccccgcagtgtctggtctggttgcctcttctgcatcgactagcaaatgtggaaaatgtcttccatccggttgagtgttcctactgccacagtgagagtatgatgggatttcgctaccgatgccaacagtgtcacaattaccagctctgtcaggactgcttctggaggggacatgccggtggttctcatagcaaccagcaccaaatgaaagagtacacgtcatggaaatcacctgctaagaagctgactaatgcattaagcaagtccctgagctgtgcttccagccgtgaacctttgcaccccatgttcccagatcagcctgagaagccactcaacttggctcacatcgttgatacttggcctcccagacctgtaaccagcatgaacgacaccctgttctcccactctgttccctcctcaggaagtccttttattaccaggagcatgcttgagagttcaaaccggcttgatgaagaacacaggctaattgccaggtatgcggcaaggctggcagcagagtcctcttcgtctcagccacctcagcagagaagtgctcctgacatctctttcaccatcgatgcgaataagcagcaaaggcagctgattgctgagctagaaaacaagaacagagaaatcttacaggagatccagagacttcggctagagcatgaacaagcttctcagcccacgccagagaaggcacagcaaaaccccaccctgctggcagaactccggctcctcagacagcgcaaagatgagctggaacagagaatgtctgctctccaggagagccggagagagctaatggtccagttggagggtctcatgaagctactaaagactcaggggtcaggcactcaccgctcctcccgcagccactccatcagcaggccaattcccatgcccatccggtcagcgtcagcctgctccaccccgacgcacacgccgcaggactccctcacaggagtagggggagatgtacaagaggcatttgcacaaagttcaagaagaaacttaaggaatgacttgctagtggctgcagattccatcactaacactatgtcctctcttgtgaaagagctgaattctgaggttgggagtgaaacagagagtaatgtggattctgaatttgcacggactcagtttgaggatcttgttccctcaccaacctctgaaaaggcttttctagcgcaaatccatgcccgaaaacctgggtacattcacagtggagctaccacaagttccatgcgtggcgacatggttacggaggatgcagatccctatgtgcagcctgaagatgaaaactatgaaaatgactctgtccggcagctggagaatgagctccagatggaggaatacctgaaacagaagctgcaagatgaagcttatcaggtcagcttgcaaggttgaatgcaatatccttttatcacactcctctcaagcaagctatgtcagacagatgatgaaagtaacatgaaaactggtgatgatggagagccctgtggccacacagaggaggaagacagcagcctggcagcagcctcaccgaagagaggaaccaccacacccagcagctcctgacagacccccacccctaaagatgtgtcctgatgactatagtgcagctaactttttggttctcagatttgtaggtgcataggtgtgtgtttcaaggaaggaaaaaaaaagacttctgttcaaagttaacttatcagctacatcctctgtaacgtggttcatccctggttaaaaagcaaacaaacacaggctgaaaacccatgctgctgttatacacaatggcag

SEQ ID NO: 123546 - DNA, 913 bp, Homo sapiens
atgagcactttaaaaggcctgattataaaaattatcatcagtgtgatgatagccagtgaatttatattggaagaaaggataaaaacagggctgaatgctgctaagcactgctttgctgcaccttcccaagctgctagccacaccatcagcaggccaattcccatgcccatccggtcagcgtcagcctgctccaccccgacgcacacgccgcaggactccctcacaggagtagggggagatgtacaagaggcatttgcacaaagttcaagaagaaacttaaggaatgacttgctagtggctgcagattccatcactaacactatgtcctctcttgtgaaagagctgaattctgaggttgggagtgaaacagagagtaatgtggattctgaatttgcacggactcagtttgaggatcttgttccctcaccaacctctgaaaaggcttttctagcgcaaatccatgcccgaaaacctgggtacattcacagtggagctaccacaagtaccatgcgtggcgacatggttaccggggaatgcaaatccctatgtgcagcctgaagatgaaaactatgaaaatgactctgtccggcagctggagaatgagctccagatggaggaatacctgaaacagaagctgcaagatgaagcttatcagatgcctctggtacccactaagaaagagatccacatggaggacttcctgtcctctcttccagaaggtgcaatagcacagtgtcctaggactttcattcctgattgtcgtaggaaaggagcaagctatagtcagacagatgatgaaagtaacatgaaaactggtgatgatggagagccctgtggccacacagaggaggaagacagcagcctggcagcagcctcaccgaagagaggaaccaccacacccagcagctcctga

SEQ ID NO: 123547 - DNA, 2520 bp, Homo sapiens
  misc_feature (1)...(2520): n = a,t,c or g
aatgattgaagatagtgggaaaagaggaaataccatggcagaaagaagacagctgtttgcagagatgagggctcaagatctggatcgcatccgactctccacctacagaacagcatgcaagcttaggtttgttcacaagaaatgcaatttgcacctggtggacatatggaatgtcatagaagcattgcgggaaaatgctctgaacaacctggacccaaacactgaactcaacgtgtcccgcttagaggctgtgctctccactattttttaccagctcaacaaacggatgccaaccactcaccaaatccatgtggagcagtccatcagcctcctccttaacttcctgcttgcagcgtttgatccggaaggccatggtaaaatttcagtatttgctgtcaaaatggctttagccacattgtgtggagggaagatcatggacaaattaagatatattttctcaatgatttctgactccagtggggtgatggtttatggacgatatgaccaattccttcgggaagttctcaaactacccacggaagttttggagggtccttcatttggttacacagaacagtcagccagatcctgtttctcccaacagaaaaaagtcacgttaaatggtttcttggacacgcttatgtcagatcctcccccgcagtgtctggtctggttgcctcttctgcatcgactagcaaatgtggaaaatgtcttccatccggttgagtgttcctactgccacagtgagagtatgatgggatttcgctaccgatgccaacagtgtcacaattaccagctctgtcaggactgcttctggaggggacatgccggtggttctcatagcaaccagcaccaaatgaaagagtacacgtcatggaaatcacctgctaagaagctgactaatgcattaagcaagtccctgagctgtgcttccagccgtgaacctttgcaccccatgttcccagatcagcctgagaagccactcaacttggctcacatcgttgatacttggcctcccagacctgtaaccagcatgaacgacaccctgttctcccactctgttccctcctcaggaagtccttttattaccaggagctctcctcccaaggacagtgaagtagagcagaacaaactgctggctagggctgctccagcttttctgaagggcaaagggatacagtacagcctgaatgtggcagacaggctagctgatgaacatgttctcatcgggttgtatgtcaacatgctccggaacaacccctcatgcatgcttgagagttcaaaccggcttgatgaagaacacaggctaattgccaggtatgcggcaaggctggcagcagagtcctcttcgtctcagccacctcagcagagaagtgctcctgacatctctttcaccatcgatgcgaataagcagcaaaggcagctgattgctgagctagaaaacaagaacagagaaatcttacaggagatccagagacttcggctagagcatgaacaagcttctcagcccacgccagagaaggcacagcaaaaccccaccctgctggcagaactccggctcctcagacagcgcaaagatgagctggaacagagaatgtctgctctccaggagagccggagagagctaatggtccagttggagggtctcatgaagctactaaagactcagggggcaggctctccccgctcctcccccagccacaccatcagcaggccaattcccatgcccatccggtcagcgtcagcctgctccaccccgacgcacacgccgcaggactccctcacaggagtagggggagatgtacaagaggcatttgcacaaagttcaagaagaaacttaaggaatgacttgctagtggctgcagattccatcactaacactatgtcctctcttgtgaaagagctgaattctgaggttgggagtgaaacagagagtaatgtggattctgaatttgcacggactcagtttgaggatcttgttccctcaccaacctctgaaaaggcttttctagcgcaaatccatgcccgaaaacctgggtacattcacagtggagctaccacaagtaccatgcgtggcgacatggttacggaggatgcagatccctatgtgcagcctgaagatgaaaactatgaaaatgactctgtccggcagctggagaatgagctccagatggaggaatacctgaaacagaagctgcaagatgaagcttatcaggtcagcttgcaaggttgaatgcaatatccttttatcacactcctctcaagcaagctatagtcagacagatgatgaaagtaacatgaaaactggtgatgatggagagccctgtggccacacagaggaggaagacagcagcctggcagcagcctcaccgaagagaggaaccaccacacccagcagctcctgacagacccccacccctaaagatgtgtcctgatgactatagtgcagctaactttttgttctcagatttgtantncatagntgtgtttttcaagaaggaaaaaaaaaaaaggaattca

SEQ ID NO: 123548 - DNA, 926 bp, Homo sapiens
tagagcaaggaaatctcttcctggccttgtcaccagattcatatgagatcctttctagtcttttattctttagtcagatcaggtggtgttttgtttgatggcaaatctatgtcagtattaacgctcttggtttcacaatcacacaattttaagagtactcattcattgagcaaacataaaaatttaaaccttcttatgttggattagttatataagtgtccatttccaacatcctcaaatgtctttaacccaactgcatatttatggaataatggattatggtcctgggaccaaatattgtttaaatttgatttgttgagaacactaaataaagggaatcctcaccaagacacaaagcacttcatctcctcaggaggagatcccacaccatccctcctaagcaagggcatggtcgaactgccctttctccaggccttcaagtccatcagcccaggtagaggttggcatgcttcgatatggatccaaaaagaatccggaagcaccggacaatgagaatgcccaagaaaataaacaacagaatcccaaaaacaaatgtcattttctgctccagggacatgctagaatctgctgatacgttcccaagggggactagggatgaggggatgggctgtcctccatccatggtccagggaagccagagcacaggatatcctggttttcttttcttccatcatcaatctgcggaggtcatggtggctgcactctggagaggctgagttatagccatattttaatcctgataggctttcctcatcacgcagtacatctgtgtcttccctttgtcaggtccatttgtgggtgctcaggaaatagagtctaattttaatagaagcccagcaggcgtagtcattgcagccagggtcattcacactcttagtcacttgctttagttttagtaattttca

SEQ ID NO: 123549 - DNA, 748 bp, Homo sapiens
cggccaagccactcactttatggctaaagaagtgtgacagtgggctcatgctcatggaattcactggtcttaccgtgttccccatcatcctgaagcagctggattgatagagtggtgggattgccttttgaagtcacgattacaatgccaactaggtgacaatactttgcaggcctggggcaaagttctccagaaggctgtgtatgctctgaatcagtgtccaatatatggtactgtttctcccatagacaggattcacgggtccaggaatcaaagggtggaagtggaagtggaagtggcaccactcaccatcacccctagtgatccactagcaaaatttttgcttcctggtctcacgacattatgttctgctggcctacaggtcttagttccagagggaggaatgctgccaccaggagacacaacaactattccgttaaacaggaagttaagattgccacctggacactttgggctcttcctacctttaagtaaacaggctaagatgagagttacagctttggctgtggtgattgacttggactatcaagatgaaatcagtctaccactccacaacggagataaggaagaatatgcaaggagtacaggagatccattagaacgtctcttagtattaccatgccctgtgattgaggtcaatgggaaactacaacagcacaatctaggcaggactacaaatggcccagaccctttaggaatgaaggtttgggtcagtccaccaggataa

SEQ ID NO: 123550 - DNA, 1503 bp, Homo sapiens
ctagtgcatcctgtttcggattacatcttgtctcctttctagctcagcacaatacagctgtctatttagcatgttgctcttcttatgccactccagaactctagatctttctctggatatgggtttgcctatcctgcacgcaacactttttccaagactaccatccatggactcaaagaatgccttatccaccatcatggtattccatccagcattgcctctgatcaaggcactcgctttttgcctaaagaagtgcaaaatgggctcatgctcatggaattcactggtcttaccatgttccccattatcctgaagcagcatcacccctagtgatccactagcaaaatttttgcttcctgttcccacgacattatgttctgctggcctagcagtcttagttccagagggaggaatgctgccaccaggagatgcaacaatgattccattaaacctgtcaagtcgctcgcaccttgggatgcccaccacctccctcaaggtcgttcgcatgtgctctaaagataagtacgtctgaacagtacaatctgttctgaaaacctgaacaatcttgtatttcaactgcaactgctgctccatcttccctgttgcttgtccaaagacaccagctactttctcccagccagttgctgtatctctccctggatgcatttgtagacccaggtgaacctgtatccgcttcactttctgctctgtctcttcactatgaggcgaaggctggcaagagagaaaggacccttcgctgtccttggctgcaaattttccagctaacactgtgcacaatccatctggccctttctttgagctttcatattttatctgactcccatgcacacgtgcacacattaataaattttgtatgccttttctcctattagtcaattgattttcagagaactttcggaaggtgaagcggaggtattctctttgcccctccgcagattgatgatggaagaaaagaaaaccaggatatcctgtgctctggcttccctggaccatggatggaggacagcccatcccctcatccctagtgccccttgggaacgaatcagcagattctagcatgtccctggagcagaaaatgacatttgtttttgtgattctgttgtttattttcttgggcattctcattgtccggtgcttccggattcttttggatccatatcgaagcatgccaacctctacctgggctgatggacttgaaggcctcaagatgctggccgggtcatttcctagtaaagcctgtaaaaagagaatccatttcctgcctttcccagcttctgatggctgcctgcattcgttactccatggctcatgttcccttccaccatcttcagcaccagtagtgtaacatcttctgtcctctctgaccccggctttgacctttacatcttctctttctgacttcaactcttgcaaccctccatcgcagactggcacaagtgatgaccccccatattcaagtttgtttcggaagcctggggtcat

SEQ ID NO: 123551 - DNA, 408 bp, Homo sapiens
  misc_feature (1)...(408): n = a,t,c or g
acttcgcntgcgcctccccaagctccgccctcgtggtctgcagcagcgcntgcgtccccgagcccaggactccatctctggggtttcagacgctcccgccgcacacgccccgggcgcccaggcgcccggttctgcacacaccgtttgtcctcagcaggtcctggcagccgagcagcgccgcgcgctccgtggaggccttggacaataggatactcagaatcacagcccacagtactggcgaccaggacagccatggccaggaagaggggtctcgggctccagtgcacccagcgtccccagtgccctccggggacctcctcgtagctcccgccccagttgctgtacctggtggtgtctatggcggtgcaggcaccgagacctgggcagagatataaatttcaccctcgt

SEQ ID NO: 123552 - DNA, 618 bp, Homo sapiens
tcagcagttgtgccttttctcacagatccagccgtccttctcgctgtcacacggtgcgtcgttccacagccccgtgtgcagcatcatgacacagttctcgcgcccccaagcgtcattgggctctccctggttccagtggctgaagctgagagagactccgtccacccactggtagccctgaaccttgcccagatggcgcacagccctcaggcccagccagtaaccacggccacgcgtgttccgagtgaggaagccctgctcatccaggcccccaacgatcaccaggtgcgcgctggcatctgcgcagtgatcctgcgccgccgcccacgtcgtctttggcacagagaaaaagtagcaggagccctcgaaggacagccacgacgtggggcacggctcgcaggagtcgcgctcacgcagttcccgcagggcgctctcctgctccatcagcttcgcctgcgcctccccaagctccgcgcgcgtggtctgcagctgcgcctgcgtccccgagccgtttgtcctcagcaggtcgtggccgtcaagcagcgccgcgcgctccgtggaggctccggggacctcctcggagctgccgccccacttgctgtacctggtggtgtccat

SEQ ID NO: 123553 - DNA, 412 bp, Homo sapiens
aaggctctggaagtgaatcttcctgaagctgagtgggactcagtccacccacgagtagccctgaaccttgcgcaggtgttgcacggccctgcggccgatccagtattcacgggcactagtgtcacgactcaggaagtcctgctcccccaggccccctacatcgccagatgtgcgctggcatcggcgcagtggccctgcgcctctgcccacgtggtcttcggcacagagaaatagtagcaggagcccccgaagggcagccacgacgtagggcacggctcacaggaaccctcactgttctgcagcctcacggcctccagcgcccggtacagctcggtgctgacgtcctcgcggtccctgccggcttcagccaagccatgggtcacgcgctcacgcagttcccgcagggctctct

SEQ ID NO: 123554 - DNA, 1170 bp, Homo sapiens
atgggcgcggcgaaccgcgtctcaggcttccatgcccgcaattcacaaggcttaggcgcgggtggccattccggagcttcccctgagggtctcggtgcctgcaccgccatagacaccaccaggtacagcaactggggcgggagctacgaggaggtccccggagggcactggggacgctgggtgcactggagcccgagacccctcttcctggccatggctgtcctggtcgccagtactgtgggctgtgattctgagtatcctattgtccaaggtcacgcgtgtgcacatggcgtgcacgtatgtgtgcgagtccccacgcgtttgtctcccatcggcgtgtgtgcacatagtgtgcgctatatgcctgcctgcccgcccgctctgtggtcccgagtcgggggaccccgcaccccccgggcaagggaaggatttccgagtccctggccttgcctgcaggagcctctctccgcagcctccacggagcgcgcggcgctgctcggctgccaggacctgctgaggacaaacggctcggggacgcaggcgctgctgcagaccacgagcgcggagcttggggaggcgcaggcgaagctgatggagcaggagagagccctgcgggaactgcgtgagcgcgtgacccatggcttggctgaagccggcagggaccgcgaggacgtcagcaccgagctgtaccgggcgctggaggccatctcggccagtgtcagtgaaaacccagagccctgcaaggagaaggcagttatacaagcccggcttcagcagaagtctgagaaaaatttgatacgacctctagctcggtacccagaggaggataagaattcgtgggacagtttgaatcttcctagaaacttggagggctcagaagacaggaagatgtggaaaagtttggaaattcccagagacttgttgaatggctttgaccaaaatgctgatagtgatatggacaatgaagtccaggctgacatggtctcagatgaatatggggaactttttgggaactggggtaatggtgactcttgctatgcaaagagactggcagcattttgctgctgccctagagatctgtggaactttgaacttgagaaagataatttatggtatctggtggaagaaacttctaagtggcaaagcatacaagaggaagcagagcattaa

SEQ ID NO: 123555 - DNA, 481 bp, Homo sapiens
  misc_feature (1)...(481): n = a,t,c or g
ctactgaaacctancgatgaggctatggaaaacccgggncgacccacgcgtccgggctggcggtgcctggacgtacaataccacttccgctgtcacggtaaagtccgccatcaaaagactgaaggagttgaaagaccagtagacgctcctctactctttgagacatcactggcctataataaatgggttaatttatgtaccnnnnnnnnnnnnnnnnnnnnnnnnnnnnnnnnnnnnnnnnnnnnnnnnnnnnnnnnnnnnnnnnnnnnnnnnnnnnnnnnnnnnnnnnnnnnctttaaaaaaaaatttggggggggccccaaatatccggggggggaaaaaannnnnnnnnnnnnnnnnggggggggaaaaaaaaacccccggggggtttttggagaaaaacttcttttttnnnnnnnnnnnttttgggccccccaccccccccacaaaattattctcctcgggggagaatataaatttt

SEQ ID NO: 123556 - DNA, 482 bp, Homo sapiens
agcgccgttttttatgacggctatgagaatccggcacgagcggcgacatggccaaacgtaccaagaaagtcgggatcgtcggtaaatacgggacccgctatggggcctccctccggaaaatggtgaagaaaattgaaatcagccagcacgccaagtacacttgctctttctgtggcaaaaccaagatgaagagacgagctgtggggatctggcactgtggttcctgcatgaagacagtggctggcggtgcctggacgtacaagtaacctaagcaaacccaaatggaccaaatgcaacgctgatggaatctaagtgctcagaccaaggaacggggactgaaataacagtggacaccacatggcatgatccaatcagattgagccctggaaagatcatcccatggcaagatccagttagattacacttcctggcatcacctcattgcaagatccaagatcatgcctcattaccttctggctgta

SEQ ID NO: 123557 - DNA, 520 bp, Homo sapiens
cggacgcgtgggcggacgcgtgggctcggacctaggtcgcggcgacatggccaaacgtaccaagaaagtcgggatcgtcggtaaatacgggacccgctatggggcgctcgcgtccggaaaatggtgaagaaaattgaaatcagccagcacgccaagtacacttgctcttttctgtggcaaaaccaagatgaagagacgagctgtggggatctggtgctgtggttcctgcatgaagacagtggctggcggtgcctggacgtacaataccacttccgctgtcacggtaaagtccgccatcagaagactgaaggagttgaaagaccagtagacgctcctctactctttggagacatcactggcctattattaaaggggtaaattaatgtaccaaaatggcctggcctggtaaactttattagacattctgatgtttgcattgtgtaaatactgcttgtattggaaaagcatgccaatatggattattgtcaatcagtgtcttttttagtagtcaaatggtaca

SEQ ID NO: 123558 - DNA, 2686 bp, Homo sapiens
acgcgtcggccgcccacccttgccacccagacctacacacccacgaagaaaacctttaccaccaaataatgtcactggaaagccaggaagtgcaggaatcatttcatcaggcccaataactacaccacccctgaggtcaacacccaggcctactggaactcccttggagagaatagagacagatataaagcaaccaacagttcctgcctctggagaagaactggaaaatataactgactttagctcaagcccaacaagagaaactgatcctcttgggaagccaagattcaaaggacctcatgtgcgatacatccaaaagcctgacaacagtccctgctccattactgactctgtcaaacggttccccaaagaggaggccacagaggggaatgccaccagcccaccacagaacccacccaccaacctcactgtggtcaccgtggaagggtgcccctcatttgtcatcttggactgggaaaagccactaaatgacactgtcactgaatatgaagttatatccagagaaaatgggtcattcagtgggaagaacaagtccattcaaatgacaaatcagacattttccacagtagaaaatctgaaaccaaacacgagttatgaattccaggtgaaacccaaaaacccgcttggtgaaggcccggtcagcaacacagtggcattcagtactgaatcagcggacccaagagtgagtgagccagtttctgcaggaagagatgccatctggactgaaagaccctttaattcagactcttactcagagtgtaagggcaaacaatatgtcaaaaggacatggtataaaaaatttgtaggagtgcagctgtgcaactctctcagatacaagatttacttgagcgacttcctcacaggaaaattttataacataggtgatcagagggggccatggagaagatcactgccagtttgtggattcatttttagatggacgcactgggcagcaactcacttctgaccagttaccaatcaaagaaggttatttcagagcagttcgccaggaacctgtccaatttggagaaataggtggtcacacccaaatcaattatgttcagtggtatgaatgtgggactacaattcctggaaaatggtagatgctgcacaaagttaccttctgtttcatcattgcaaacaaaaatcattgaaaatactatgccgcattcatttaaaagctattttgtttactaatgtataaaagtctacaatctaaattaatagcaatacctagatgtttattattaagaaaagattgctgagagtatttatccaggttttacaaagtccattttaaagaaagccaagatactgatgttaaccagaataaccatttttggggaagctggctccctattcatggtattttaagagatcatttgtatattatttatcacactgttgtaatgatgttttgagatacttttataacaaaattaacatcaaaaaggtatatactttttaaaaaaaatttacttttattgatgtgtactcttcctattgatgagttaattccataaatctctacttagtttaacttattggatcaaattatcttcagcatgtatatctggggaaaaaaggtccgaattttcacatttatatttaaacttcaattttttatatttaaacttcaattttttagcaacagctgaatagctttgcggaggagtttaatagttacacattcatgctaatatacatttcctttaaacatccacaaattcttaaaaagattgaatcagtaaatttcatttcagctaaaaatggagtctaatatattgtttcaaaagatacatttttacccaccataaatgttacaatatctgaatatgctttgtcaaactatcccctttatgcaatcgtcttcatattgtttttatgattctaatcaagctgtatgtagagactgaatgtgaagtccaagtctgagcacaaaaagataatgcacgatgagattgcctaccgattttataggatatttactatgtatttatttatacgttaagacctctatgaatgaatgtatcagagaatgtctttgtaactaactgtttaattcaatctgtaataaaaatctaactaactaactcatttatttctatttaaaaaggtattgtccttttggcggggsaatgggaatccttgctgcactyttscaatcattctgaaaggbacctttccctgtacttacctttcaacatgcttcaatcttatcaacgctacattttgtgagtgggtcaaacaagtataaaattcctgcaataaagagatgtagtttttttttaagattgagtttttgtttgttatttctgaatggttcatcaagtatgttaactataccttttatctagaaggaaaatcaaatcaactataccttttatctgagaaggaaaatcactcactaagttttattcaggctctaccaacccccattatatctactgtttgtttgtttatgtcctaaattaacctttcatcctatgaagtaataaagttcattttaaaccaacgattaccaaatgcatttttttcaaaggaagggcaaaaaccaaatggcactgttttctctgaatggaaatctgtaagttagttaaaatgtttatacttcattttaagaccaaacaccaataaggacttctgaaaaattgttccttttttc

SEQ ID NO: 123559 - DNA, 1161 bp, Homo sapiens
tcgtgaagctggttccggtggaaatgacaacttcgctcggagaagaaacttcagtggttcgtggtggcctttggtggcaagccgtggtggtgtttggatatgggtggcagtgggggatggctataatggatttgggtaatgatggaagcaattttggaaggtggtggaagctaccaatgatttttgggaaaataccaacaaatcaggtcttcaaaattttggaccccatgaagggggggaaatttttggaggccagaagcttctggccccctatggcgggtggaggcccaatacttttgcaaaacccacgaaaccacaaggtgggctatggcgggttccagcagcagccagtagctatggcaagtggccagaagattttaattaggaaaccaaagcttaagcaggagaggagagccagagaagtgacaagggaagctacaggttacaacagattttgtgaaactcgccccagacacagtgggtgccagggcctagcctgctaccaaagaagaacatgtatttagaccaaatactcatggtgtatgggcaaaaaaactccgaggactgtaatttgtgacgtaattgtataacagggttattttagtttcctgttcctgtggaaagtgttaagccattcccaccaaagggttttaatgtagattttttttttttttgcacccccatgctgtttgattgcctaaatgtaaccagtctgaatcgtgacgcctgaaataaatgtctttttttttaatgtgctgtggtaaaagttagtctacctcttaagccatccttggtaaattttcccccaacaagtgtgaagttagaattccttccagggttgatgccagggttctatttggaatttatatacaacctgcctggggtggagaaacccttgtcttcggaaacctctggtgtagtggaacttgataagttactgttgtgacctgaagttcacccattaaaagggattaccccaagcaaaatccatggaatgggttaataaaagtgaattgttgggcacatccctatgccatatatctaaaatttgaataatggtaccagattaaaattatagatggggaatgaagcttgtggtatccattatcaatgtgtaatccaataaccgatttaattctcttgaatgaaaaaaaaaaaaaa

SEQ ID NO: 123560 - DNA, 2316 bp, Homo sapiens
atggtgtaccgccaaaatcagcttccaagttcctgtgcaccagaaatgggaagggaagatgggctcagagccctccacccagcacagcctccacctccccgtgcacagcagagccctccacctcccctctccgcacagaagagcctccacctccccgtgcacagcaaagccctccaccgcccctgctcaccccccaccgtcgccatcctcaatccttcccagccccatcggcccccagtgcactctccaggcagcggcctgggctttactcagctgtcaccttctctggaagcctctctgggccacggacttcaacatgcacgcccagcccggcatcctctccctctgcacatgggctgggccacattcacactgacgctggtgtctgctccctggaagctcaggaggaggccaaggctccaggtggccggggtccctcatgttcagcgcatggagccttgggccccacatgcaccagcggagttgctggagactcaggcccagttgtggggtcacaggagagggcactggatcccagacggcagggcctgcaacactgagttcacacacccaggactcgagattggggccagggagagcggcagcgcctgcaaggggccgcctcctggctcactggttcccttccccgcatctcccctgggaagcaagataaatgggggaagttgctaccaaatactcacgggctcatcaggaaaaatatgcagaatcaatggctgcagctgccaaaacaaatggagtatgcccacctctgccacggcatcgctgcagacctgccctgcccgggccgtgcccgacctgggcatcgctcggaggagctggtcaccacatagaaggcccagctggacacacgaaaagagttcctgccccagtcagaaggcccctcagggaagggcagtacccctccagcctgggaaaggaggtgaacccgtgtccttttggagtccagggcaggctcccagcaaagcgagggggaggcgagctggcagcgcggctatgcgaggccgagctgccaagctgctatctcgttcccggagcacaggagggctctgcgtgctctgtgggcaggggactgtagggttgcagatgcagggccgggcagctcctccagcaccccccccagcccaccctctcttcccaagaccagtgtctcccttggatttctctgcttcaaaaagagccttgcagcatcctgcgcttctgggagggaaagacagctggaggcctgagtgtgggcatctcaacctctctcacctacccagtggagtgaaggacagctgggggtccgagtgtgggcatctcaacctctctcacctacccagtggagtgaaggacagctgggggtccgagtgtgggcatctcaacctctctcacctacccagtggagggaaggacagctgggggcccgagtgttatgtgttctgtatgttacatcgcctccccgagcagcacgactgcacattcgaccacatgggccgtggccgggaggaagccatcatgaaaatggtgaagctggaccggaaagtggggcgctcctgccagcgcatcggggaggggggccaagaggatgatgtcgtggcctccattctcgtttctatgcagccccatagtccaaggacacccagtccacatctaccatatagcaagtttaaggatttcagcagctgcaactgcgcacgccagggctggaaagagatgggggcctgtgtgcagagaccgtctgcagtacttggaggcactcgtccagttagtgtccaggctaaacagccgcttccttgctttctgttgggagcctctgccctgggaagctgcgggactggccttggggtaaaggacagagatattgaccgcatagttgtcatgagcgtgatgaaaatcctcagaggaaatcagaggcccagtggcgatgaacaagcacgggggcaaagggcaagagagggccttggtggcctgggtgtgaggcgggcctgcagggagcagtgggctgtgctctgcccactggtccacaggaactgggtctgcgtcagctccttcctgattgcttcacagagcaacagtccacagcaacaacataactgttgttatgccaacaacagtccacagcaagaagaggggatggtgggaagacaagcagaaaccttcctgctgggtggcgtgagaaacaggaaaccatgggtgggagtgggccgtggtcttcaagggagccatcagcagcacattcagggagctgtgagcagcccctctagccccaagaagggggtctccaagagagagggccccagatgggcacaacagtaa

SEQ ID NO: 123561 - DNA, 772 bp, Homo sapiens
agcggccgccccgagccccccgacgccgccgccaccgcctcctcagagcggggcccgggcccagccgccgccaccgctgccgccgccgagctccgccgccgccgagcaccatgggagacgctgggagcgagcgcagcaaagcgcccagcctgccgcctcgctgtccctgcggcttctgggggtccagcaagactatgaatctctgttccaaatgctttgctgattttcaaaagaaacagccagacgatgattccgctccaagtacaagtaacagccaatcagatttgttttccgaagagaccaccagtgacaacaacaatacctcgataaccacgccaactcttagtcccagccagcagccgcttccgacagaactgaatgtaacttcaccgagtaaagaggagtgtgggccatgcacagacacagctcatgtctcattaatcacaccaacaaaaagatcctgtggtacagattcacagtctgagaatgaggcttcaccagtaaaacggccacgactacttgagaatacggaacggtccgaggaaaccagtcgatctaaacagaagagtcgacgtcggtgcttccagtgccaaaccaaactggagctggtgcagcaggaattggggatcgtgtcgctgcggagtgaagctgcagaccttcgcggtgagtgttacaggttataaaggcagtgcagacccaaagagtgagcagcagcaagatttattgcaaagagcgaaagaacaaagcttccacagtgtggaaggggacgcga

SEQ ID NO: 123562 - DNA, 915 bp, Homo sapiens
  misc_feature (1)...(915): n = a,t,c or g
attgcccgcgctgaagaattcggctcgagggcctctgggggtccagcaagactatgaatctctgttccaaatgctttgctgattttcaaaagaaacagccagacgatgattccgctccaagtacaagtaacagccaatcagatttgttttccgaagagaccaccagtgacaacaacaatacctcgataaccacgccaactcttagtcccagccagcagccgcttccgacagaactgaatgtaacttcaccgagtaaagaggagtattcacagtctgagaatgaggcttcaccagtaaaacggccacgactacttgagaatacggaacggtccgaggaaaccagtcgatctaaacagaagagtcgacgtcggtgcttccagtgccaaaccaaactggagctggtgcagcaggaattgggcatcgtgtcgctgcggttatgtgttctgtatgttacatcgcctccccgagcagcacgactgcacattcgacccacatggggccgtggccgggaggnaaggccatcatggaaaatgggtgaagctgggaccgggaaagtggggcgctcctgccagcgcatcggggaggggtgctcctgaaggccaggcatggccaccacgtgacgctgttcttagttcactaatgttagccttatttaggacaaagtcagccagacaccttgtactgggcacgcgtcagactgcagccagtccgtttcctttctttagccagccatcctggtactgtagtttaggggttgatggtggttgaaattgatttctggctggttattaaggtgcctgctagccattgtataaaatttaaacaaaaagaataaaaaaaaaaaaaaaaaaaaaaagaatgcggccgcacgctcttctttatatgtctagtaattccaaaaaaaaaaaaaaaaaa

SEQ ID NO: 123563 - DNA, 1458 bp, Homo sapiens
atggggatctttacagctgcggaaacagtagcaaggagtcctgtccatggtcacacagctgttcgcgaaagcttagggcgcacgtcgagagactggccacagaacgaatgttcgtgtgttatttatgaagaaccgattagcaacaccgctgagtacactaccgtacggaggttagaggatcgacacgacgatagccacatgcctgggccactttctcgtccccgcgaaggtaagggatgccaatccgtgcctgatgccctagcacccaggctgccgcccgtgcttatgccggtattaaacaacgagggagggatgctcctggggcctgttcctgcagatcgcgaaacacctttgcagggggatctggatgctggagagcctctcccagcaaattccctgaggcggagcaaggcagctccaggaaactgcagaggaagtgaagcagcccctgccactcttcagatcagccttccacttcctttccaagcattttcttgtaaagcgtgttttgaactttcaggcagcacaaaaaaagctccagcaggcacacccacccttggtgattccggtgcccttacacatcctgtggctctgaaaagtgtccctgccttcctggtactctgttgtccagcactacccagtaagaaccactggagaccaggaagagctccatcagtccccgcggagcatctgaccaggtcgggagaaagaatttaccgcaacaatcctcatgtgaagggtgtcctcagcaacttcagtctgactcacaagtcccttacagattgccgcaacatcctcgaactcgatgctcacctaatcagattacattaccagagacggggcgagttttacaaaagcgctattaacttggaaaaacccggtgccaaattttttctggaaaaaagacaccttcaaactttggggcgaggtaataaggtccaccatgtggaagacagtcaatcaccttctgctgcttggatgggtggatttggtgctcagcctccccaaggacaagctcctccccctgtaatacctcctcctaaccaagccggatatggtatggcaagttaccaaacacagatcttgccttcgccccatattctggctgtattcatgttaccagaaaggggtcccaatccagaccccaagagagggttcttggaccttgcaagaaagaatctgggaaattgggtcagtactataacattcctgtccaggtttcctggagttcaggttcttcaggaatttgtggtccctggcaccatgcctctcctcaggcctttggagctgccaatgcattttaacccccatttctccacagctttagcatctctcattgctgacgaactctatctgctccctcagctctctgtgagccaaatgggagaaagctttccctcttttgacatgatggcaatctgtgcccaggcgtctacaaataggctatggatgccctga

SEQ ID NO: 123564 - DNA, 1435 bp, Homo sapiens
atgatggaagacgacgggcagccccggactctatacgtaggtaacctttccagagatgtgacagaagtccttatacttcagttgttcagtcagattggaccctgtaaaagctgtaaaatgataacagagcatacaagcaatgacccatattgctttgtggaattttatgaacacagagatgcagctgctgcattagctgctatgaatgggagaaaaattttgggaaaggaggtcaaagtaaactgggcaaccacaccaagtagccagaaaaaagatacttccaatcacttccatgtgtttgttggggatttgagtccagaaattacaacagaagatatcaaatcagcatttgccccctttggtaaaatatcggatgcccgggtagttaaagacatggcaactggaaaatccaaaggctatggttttgtatctttttataacaaactggatgcagaaaatgcgattgtgcatatgggcggtcagtggttgggtggtcgtcaaatccgaaccaattgggccactcgtaaaccacctgcacctaaaagtacacaagaaaacaacactaagcagttgagatttgaagatgtagtaaaccagtcaagtccaaaaaattgtactgtgtactgtggaggaattgcgtctgggttaacagatcagcttatgagacagacattctcaccatttggacaaattatggaaataagagttttcccagaaaagggctattcatttgtcagattttcaacccatgaaagtgcagcccatgccattgtttcggtgaacggtactacgattgaaggacatgtggttaaatgctattggggtaaagaatctcctgatatgactaaaaacttccaacaggttgactatagtcaatggggccaatggagccaagtgttaggaaacccaaaaccgtctgatccgctatatggcaaatgggtggcaagtaccgccttatgagctatacgggcaaccatggaatcaacaggcatttggagtagagtcaatcaccttctgctgcttggatgagtggatttggtgcatcagcctcccccaaggacaagctccacccccttgtaatacctcctcctaaccaagccggatatggtatgggcaagttaccaaacacagtgaggccgggattctaaaaaaaaaattgttaatttcttgattagggtttcgattttccctgtgacacttctgaagaacatgaaagtagaacattcgggaaaatgaaaatatttagattacaaatttgacaatgtttggaaacattagcccagatttgccttgggtgaaggacacgtgtcttctagttctgcctttttaagtttttgttcatgatggatatgaacatgatttttctttatgtacaaaaactaaaataaagtcaataaagacaattctgactacaaattttgatataataggaaaa

SEQ ID NO: 123565 - DNA, 1212 bp, Homo sapiens
atgtccgagtatggcagattgcattttcccaaaaatggccacaacagtatcactggtcccacctgctttcccccttgctgtgggcttgcttttctgaacgccgtcattccccttgctatggcatccatttcctctcactcaacctgggcaagcctttgtgacttcctcgaaactagaatatggtggaaatgtcacggcgtgacttgcaagactggatttaaaaagcgccgaacactgtctttctgtgaagaacctgaccgccatgttgtgaggaagcccaggcatctgaacaaaggccacatgcaggtattctggctaatagctccaactagggccccaagccagcccctggcatcgatcatcagacatattgataatgatgtgggttcaagaaactctcactttcctcttaatacgaaagaaaacaacagtgcaaatgtgatgatgtatgataacggacaactagggagttatggggtgggcatggaaacgtgctgcaggtaccaagcaatccaaagagagcatgggtctttcagaggctgtggtgagttggaacagccaaagctggtcgtcaatggaagcctagaagaacgcaatccacaaaggaaaagaggctttggtagtggcatccggcaccagggttgtggctgtggacagggccagggccaaggccgtggagttcgtggaggcaaggccgagtataaggagtggatgaccgtcaccaagctgggccacctggacgaggttttgaaaattatgctggtgcagaagcagacccataccagccagtgtaccaggttcaaggcatttgttgccactggggactacaatggccacatcagtctgggtattaagtgctccaaggaggtggccactgccatctgtggggctatcatcctggccaagctctccattgtccctgcgtgcagaggctactgggggaacaaaatcagcaagccccacaccatcccttgcaaggtggcaggctgctgtggctctgtgctggtgtgcctcatttctgtgcccaggggcactggcattgtcttggcccctgtgcccaagaagctactcatgatgactggtatcaatgactgctacacctcagccaggggctgcactgccaccctgggcaactttgccaaggccacctttgatgccatctctaagacctacagctacctgacccccgaccctggaaggagactgtattaa

SEQ ID NO: 123566 - DNA, 1035 bp, Homo sapiens
atggccactgacatagcccagagatacaggataagcaaatacccaaccctcaaattgtttcgtaatgggatgatgatgaagagagaatacaggggtcagcgatcagtgaaagcattggcagattacatcaggcaacaaaaaagtgaccccattcaagaaattcgggacttagcagaaatcaccactcttgatgattttgactttcaagttccagccactattatctccaaactctgcctcagtttcttcagcctgaaggttcaccccaacaacaagatagaaaagcaaagaccttccaggacatcagagatggtttgccttacaggaggagaggaaaaaggacatcgttatttgtggaaagaaaggatggacatgaagatcaagtccctggaggaaatctgtctcttctccctgcccattaatgaatctgagatcattgactttttcctgggggcctctctcaaggacgagattttgaaggttacgccggtgcagaagcagacccgtgctggccagagcaccaggttcaaagcgtttgttgctatcggggactacaacggccacgtcggtctgggtgttaagtgctccaaggaagtggccaccaccatccgtaaggccatcatcctggccaagctctccattgtccccgtgcacagaggctactgggggaacaagatcggcaagccccacaccgtcccttgcaaggtgacaggccgctgcggctctgtgctggtgtgcctcatccctgcacccaggggcactggcattgtctcggcgcctgtgcccaagaagctgctcatgatggctggtatcgatgactgctacacctcagcccggggctgcaatgccaccctgggcaacttcgccaaggccacctttgatgccatctctaagacctacagctacctgacccccgacctctggaagattgtatttaccaagtctccctgtcaggaattcactgaccaactcgtcaagacccacaccagagtctccgtgcagcggactcaggctccagctgtggctacaacatag

SEQ ID NO: 123567 - DNA, 1030 bp, Homo sapiens
ttgagggatactctagagcggccgccctgtgtttttttttttacacgcttaattcactttatttttcttgtataaaaaccctatgttgtatgccacagctggagcctgggtctgctgcacagagactctggtgtgggtcttgacgaggtggtcagtgaattcctgatagggagacttggtaaatacagtctccttccagaggtcgggggtcaggtagctgtaggtcttagaaatggcatcaaagggtggccttggcgaagttgcccaagggtggcagtgcagcccctggctgagagtgtagcagtcatcgataccagccatcatgagcagctttttaagccacaggtgcggagacgatgccagagcccctggggtgccagggatgagggcgtaccagcacagagccgcagcggcctgtccaccttggcaagggacagtgttggggctttgccaatactttgttccccccagtagccctctgcgcacggtgaagagtgtaagagcttggccaggatgatgggcccaacgggatgggcggtgggccaccttcttgggagcactttaacaccccagaccccaccgtgggccattggtagttcccggatagcaacaaaatgccttgaaccctggtggcgctggccgggcacgggttctggttcctgcacttggcataatctttcaaaaacctcatcctttgagaggaggccccccagaaagaaaatcaatgatcctctgattcctttaatgggccggaataagaatagatagatctcctccaagggaactttgatctttaatggtccttgaccaagcggccccaacttggtggacgggcatcccaatccctttatcctcgggcctttgcctccgcgagctccgcggctctcggccccggccccgtccaccgggcgggaaccccggcccccggatgacaatgccgaaaacctcgccggaaagcaacggggttttcccatccccgggccaccagggccccgggcctgcccgttggcaccggggttattcgccattt

SEQ ID NO: 123568 - DNA, 1616 bp, Homo sapiens
accgcggagcagacgcggaggctggtggccctgggcgagatgccgtacgccaaccagcctaccgtgcggatcacggagctcactgacgagaatgtcaagttcatcatcgagaacaccgacctggcggtggccaattcgattcggagggtcttcatcgctgaggttcccataatagccattgactgggttcagattgatgccaattcctcagtccttcatgatgaattcattgctcacaggcttggattaattcccctcattagtgatgacattgtggacaagctgcagtactctcgggactgcacatgtgaggagttctgccccgagtgctcggtggagttcaccctcgatgtgcggtgcaatgaagaccagacgcgacatgtcacgtctcgagacctcatctccaacagcccccgggtcattccggtgacatcccggaaccgagataatgaccccaatgactacgtggagcaggatgacatcctcatcgtcaagttgagaaagggccaggagctgagacttcgagcctatgccaaaaagggctttggcaaggagcatgccaagtggaaccctactgcaggggtggcttttgaatacgatccagacaatgccctgaggaccacagtgtaccccaagcccgaggaatggccaaagagtgagtactcggagctggatgaggatgagtcgcaggctccctatgaccccaacggcaagccagaaaggttttactacaatgtggagtcctgtggctctctgcgtcctgaaaccattgtcctgtcagccctctcaggattgaagaagaaactgagtgatttacaaactcaattaagccacgagatccagagtgatgtgctaaccataaattaactgcagcttgcctgcttcagcaaaaacggagattcaggccagcagctggatatgggggtctctcttcagactcttctcgtttctgagaatctagtctactgttggttgagcttcttggcaggacatcagtaccaactagaagtgggtcatagatagattaccagggatgcagtggtgtttaggcaggataggtctttactggccctgactgctgttaataattggcagcagtgctccccagatcccagaaggtccctgctggagtgtttccagtgcacctgtaggaacaactagacttctctcctggttagtccagctctttactctaaaccctttctgtccaaaatgagtcattttcagttgtaccttagatgtctggtgttgaggatcaagtgccatagcctttattcagggggcctataaacccttccagttcttgccccagggctggcctgctagcgcttcaaattcccaggtgtccctaatttgagaagtaaccttttggaatagcaggagcaagggcccctcccacatacacaggaggagtatttcatttctccttaatgaaggctctggccctaacccctcagcactgtctccagataggaacatgcacaaagcagttaattaggcagcctggagaaaaccagagatccagtacagaaaggaaaggatatttattgattaacagaagttgtctttttaaaagtgtttatttttgcaataaagagcacaacataaaaaaaaaa

SEQ ID NO: 123569 - DNA, 2692 bp, Homo sapiens
  misc_feature (1)...(2692): n = a,t,c or g
atggcggcggcggcggtatctggtgcgcttggccgggcgggctggaggctcctgcagctgcgatgcctgcccgtggcccgttgccgacaagccctggtgccacgtgccttccatgcttcagctgtggggctaaggtcttcagatgagcagaagcagcagcctcccaactcattttctcagcagcattctgagacacagggggcagaaaaacctgatccagagtcttctcattcaccccccaggtatacagaccagggcggcgaggaggaggaggactatgaaagtgaggagcagttgcagcaccgcatcctgacggcagcccttgagtttgtgcccgcccacgggtggacagcagaggcgattgcagaaggagcccagtctctgggtctctccagtgcagcagccagcatgttcgggaaggatggcagtgagctaatactgcattttgtgacccagtgcaatacccggctcacacgtgtgctagaagaggagcagaagctggtacagttgggccaggcggagaagaggaagacagaccagttcctgagggatgcagtggaaaccagactgagaatgctgatcccatacattgagcactggccccgggccctcagcatcctcatgctccctcacaacatcccgtccagcctgagcctgctcaccagcatggtggatgacatgtggcattacgctggggaccagtccactgattttaactggtacacccgccgagccatgctggctgccatctacaacacaacagagctggtgatgatgcaggactcctctccagactttgaggacacttggcgcttcctggaaaaccgggttaatgatgcaatgaacatgggccacactgccaagcaggtaaagtccacaggagaggcactggtgcaaggactcatgggtgcagcagtgacgtcaccgcggagcagacgcggaggctggtggcccctgggcgagatgccgtacgccaaccagcctaccgtgcggatcacggagctcactgacgagaatgtcaagttcatcatcgagaacaccgacctggcggtggccaattcgattcggagggtcttcatcgctgaggttcccataatagccattgactgggttcagattgatgccaattcctcagtccttcatgatgaattcattgctcacaggcttggattaattcccctcattagtgatgacattgtggacaagctgcagtactctcgggactgcacatgtgaggagttctgccccgagtgctcggtggagttcaccctcgatgtgcggtgcaatgaagaccagacgcgacatgtcacgtctcgagacctcatctccaacagcccccgggtcattccggtgacatcccggaaccgagataatgaccccaatgactacgtggagcaggatgacatcctcatcgtcaagttgagaaagggccaggagctgagacttcgagcctatgccaaaaagggctttggcaaggagcatgccaagtggaaccctacttgcaggggtggctttttgaatacgatccagacaatgccctgaggcacacagtgtnaccccaagcccgaggaattggccaaagagtgagtactcggagctggatgaggatgagtcgcaggctccctatgaccccaacggcaagccagaaaggttttactacaatgtggagtcctgtggctctctgcgtcctgaaaccattgtcctgtcagccctctcaggattgaagaagaaactgagtgatttacaaactcaattaagccacgagatccagagtgatgtgctaaccataaattaactgcagcttgcctgcttcagcaaaaacggagattcaggccagcagctggatatgggggtctctcttcagactcttctcgtttctgagaatctagtctactgttggttgagcttcttggcaggacatcagtaccaactagaagtgggtcatagatagattaccagggatgcagtggtgtttaggcaggataggtctttactggccctgactgctgttaataattggcagcagtgctccccagatcccagaaggtccctgctggagtgtttccagtgcacctgtaggaacaactagacttctctcctggttagtccagctctttactctaaaccctttctgtccaaaatgagtcattttcagttgtaccttagatgtctggtgttgaggatcaagtgccatagcctttattcagggggcctataaacccttccagttcttgccccagggctggcctgctagcgcttcaaattcccaggtgtccctaatttgagaagtaaccttttggaatagcattagaccctggctgtcccctccccaccaaataaacatgatatttcattctctgtccagcagtcatgaaccccttcacctccaatgacctgatcatttagtttggtgggggtgggggtgggggtgggggtgggggtggaagcagccgcaggagcaagggcccctcccacatacacaggaggagtatttcatttctccttaatgaaggctctggccctaacccctcagcactgtctccagataggaacatgcacaaagcagttaattaggcagcctggagaaaaccagagatccagtacagaaaggaaaggatatttattgattaacagaagttgtctttttaaaagtgtttatttttgcaataaagagcacaacataaaaaaaaaa

SEQ ID NO: 123570 - DNA, 393 bp, Homo sapiens
tttttttttttttttttgcagaaactaactccaaataaattacctaccaaaatattcatataatggtggaaatattccaaaattccatattttgggatttatacacaaaagataaacaaattagaggccaagaggctgccagaagggaaaaacggggcctgggaagaccattgtgaggaatgagctgggcctaaagaggccactggcaggcaggagctggacctgccgaagcggccgaaaggcaggagctttggactggggaggccgcagtgaggtgagagctagctgggcgtggagagtccgctgtgaggccgaggccgaggccgggcctgcaaaggtccactggagggcaagttctgggcctgaagaggccgccaaaagtcaaaagcgggg

SEQ ID NO: 123571 - DNA, 3465 bp, Homo sapiens
atgcaacaggacatcacccaatgtgaggacagaactatctctgcaaggaaccaagggtactgtgatggctgccagtggggatcagggatgagcttagaaaatgaagacaagcgagctcgcacccgatccaaggccctgcgaggacccccagagaccacagctgcagacctcagctgccccaccccaggatgcacaggctcagggcacgtccggggcaagtactccaggcaccgaagtttacagagctgccccctggccaagaagaggaagctggagggcgctgaggctgagcacctggtgtccaagaggaagtcacaccccctgaagctggctctggacgagggctatggtgtggacagcgacggcagtgaggacactgaggtgaaggacgcctctgtttcggatgaatcggaaggaactctggagggggccgaggctgagacgtcaggacaggacgagattcatcgccccgagacagctgaagcgcccaaggtgagcccagcctatgacaggtccccgtccatagctgttcaaagaatgggggcaacctcagggtgcccggcagacgttaaagagaggcctcaagaggtggttgctcaccggatggtggttgtccacatcctcggggcttcaggactgcaggacaaattcgagcatcttaaaatgattcaacaggaggagataaggaagctcgaggaagagaaaaaacaactggaaggagaaatcatagatttttataaaatgaaagctgcctctgaagcactgcagactcagctgagcactgatacaaagaaagacaaacatcctgtgccgggggaaagctgggcagtttccctcctccgagcccctgtacataccatgaattgtgggaccttcagagcttttcacttttcggaaaatagctcctgctggggctacaagatggagtgtgaagagggccttgggccacagggaggcgcctgtggactagggggagttcatgcaccccttctttccccagaggggctggactcaggaaccagagttccaggccccaagcaggaaaggcaagaacaagaaaggacaggggagctggaccgaggctacaggagcctctgtactgggcttccactggtcaatcagggacaatctgagcatccaaagaaggctttcagcccatggggtaaaacaggaaacaacgagtctatagagatatccatcaaagttaacacaaggtcacgaaaggcgaggagtgctaaaaacgacttcagacgaacgagacaccaggaccacgcacagcacgtggttctgaacccacccctgaatgggtctgaggaccagatggccgagaaggaagacacctctcacacctctgcccagaaggcccgtgagctccggggcccagaatcacccagtcccaagcctgagtactctgttattgtggaggtccgctcggatgatgacaaggacgaggacacccactcccggaagtcaacagtcactgacgagtcggagatgcaggacatgatgacccggggaaacctgggcctcctggagcaggccatcgccctgaaggctgaacaggtgcgcacagtctgcgagccgggctgcccgcctgccgagcagagccagctgggcctgggagagccagggaaggcagcaaagcccctggacactgtgcggaagagttactacagtaaaggtaatccaattctcaactctgtgacagggatgtggggtatagggaggaaaagcatattggaagattccgaaatgtcttggcagcaaacggctatcactactagaagcccagtaaggctctgctcaatcagcatctctagcagcacattaagtccccatgcacccaaacaacatgccagggccacgtgccacaggaaaactctccacggaaacgtggatgccggggccacaggctacaggaaaagtctccacggaaacgtggatgccggggccacgtgccacaggaaaactctccacagaaacgtggatgccggggccacgtgccacaggaaaactctccacggaaacgtggatgccggggccacaggctacaggaaaactctccacggaaacgtggatgccggagccacgtgctacaggaaaactctccacggaaacatggatgccggggccacaggctacaggaaaagtctccatggaaacgtggatgccggggccacgggctacaggaaaagtctccacggaaacgtggatgccggggccatgggctacaggaaaactctccacggaaacgtggatgccggggccacgtgccacaggaaaactctccacggaaacatggatgccggggccacgggctacaggaaaagtctccacggaaacgtggatgccggggccacgggctacaggaaatctctccacggaaacgtggatgccggggccacaggctacaggaaaactctccacggaaacgtggatgccggagccacgtgctacaggaaaactctccacggaaacatggatgccggggccacgggctacaggaaaagtctccacggaaacgtggatgccggagccacgtgctacaggaaactctccacggaaacgtggatgccggggccacaggctacaggaaaagtctccacggaaacgtggatgccggggccacgggctacaggaaatctctccacggaaacgtggaggtgttccataaagacgcccttccagaagtcatgctgctccatggacactctgtggtgggaacaagggtccccaaagctcacacagggcactgccaccaactcagacctgagcagcagttggcctccacccacatccctctactggaacaacaggcggcttcatgttcacagggcacgcagcagagccttcgctgacgccaagaggcagggaggcgcaggcagggcgcaggcggcggcgggcggcatggagagcctgctggagaatccggtgcgcgccgtgctctgcctcaaggagctcacggccatcgtgcagaagcagcagagcctcatccacacccagcgagagcgtatcgacgagctggagcggcggctggacgagctgagcactgagaaccgcagcctgtgggagcaccagcagctgctgcaagcccagcctccgcccgggctcgtccccccgtcatcggccccgctgccggccgctccggccaccgctcctgccgccgccgccagggcccaggaacctctccaggaccagggacagcgctcagcagccgcgccgcatcccgcgcccgatcggccgccgcgtcagcaccacggacagctcctggagcagccccagcggggccctggcagcagggctcacacaccccagtcgccccagaagcatctggggacacaaggggccgtgactgacaaggagaaggagcgtcccccgagttgctgcgctgctgccggagccctccttcagcacaaatccccctccgccctcggcaagggcgtcctgagcaggagacctgagtga

SEQ ID NO: 123572 - DNA, 2261 bp, Homo sapiens
ttttttttttttgagaccgagtcttgctctgtcgcccaggctggagtgcagtggtgcgatcttggctcactgcaaactcttcccaccgggtttcacgccattctcctgcctcagccttccgggtagctaggattacaggtgcacgctaccacgtccggctaatttttgtatttttagtacagacggggcttcatcatcttggccaggctgatttcgatctcctgacatcgtgatctgcctgcctccccctcccaaagtgctgggattacagggcgtgacaacgcacgcctgggccaaggcctggctcctcttatctataccccctacccctggcaggctgtgccgggggaaaagctggggcagtttcccctcctccgaggcccctgtacatacccatgaattgtgggggaccttccagagcttttcacttttcggaaaatagctcctgctggggctacaaagatggagtttgaagagggccttgggccacagggagccgcctgtggactaaggggagttcatgcaccccttctttccccagaggggctggactcaggtgagtatgggggtgggggctcctgcacttcgacacaggcagcggaagggttttctccccattccctctgcactcccaacttgagctatactttttaagaaagttgattcaccctgcctttgcccccttccccagaacagaacacgttgatcatgggcgatatttttcattgtgccaaaaagttgccatgaccgtcattaaccctgtttaactccaaataataaggaaaataaaacaaaaagttcgggcatggtgcagaaactcgctccaaataaattacctaccaaaatatttacataatggtggaaatattccaaaattccatatttttgggatttatacacaaaagataaacaaattagaggccaagaggctgaccgggaaggtaaaaacggggcctgggaatggccgacgtgaggaatgagctgggcctaaagaggccactggcaggacaggagctgggacctgccgaagtggccgaaaaggccaggacctttggacgggggaggcccgcagtgaggcgaagagctagctgggcgtggagagtccactgtgaggccgaggccgaggccgaggccgggcccgtgcaggcctttgagaggacaggagggccgggcctgcaaaggccgatgggagatttcaagttctgcgcctgaagaggctgcccaaaagtcaaaagcgggggcctgggaaggctgccgagagccatgagctgggctggggctgaaagaggccactgggaggcaggaggagctgggcctggagaggctcactcgaggaagttttgcacctggagaggccgccgagaggacggagctgggccccggggaggcccgaacttgctgctcttcccaggcccaattcccaggccgacttgaggacgacttgggcctgcagaagactgccgggaggctggagctaagcctggagagactgacttcgggacgatttgggcctgcagaggccgccgggaggcccaagctgggcctagaggagcccaccgaccggaggccatttggggcctgcaagatgtcatcggagggcccaggagctgaccctggagaggccaccgcgaggcctgagctgggcctggggagcttggcttagggaagtttgtgggcctaccagggcctctgggagctgggcaggagctgagtccaaagacgttgttgggaggccaaagtcgggccagagtccggcctggagatgcagccgggaggaagagctgggcccggagggggcgccgggaggctgcaagtgggtctggagaggccgacttaaggaggttctgggtccgcagaggccgccggaagggaaaaactgggcctggaaaggccgttgtgaggaatgagccccatgggcctgaagaggccactggcaggcgggagctgggcctgccgaagcggccgagaggcaggagctttggactcgggaggccgcaatgaggcgagagctagctgggcgtggagagtctgctgtgaggcagaggctgggcctgtgcaggccttcgggaggcaggaggccgggcctgcaaaggccgactggaggtcaagttctgggcctgaagaggccaccaaaagtcaaaagcggggcctgggaagcccgcccagaggcatgagctgggctggaccgaaagaggccactgggaggcaggaggagctgggcctggagaggctgactcggcccgggtattccggagcagcaa

SEQ ID NO: 123573 - DNA, 3468 bp, Homo sapiens
gggaccctggtgaccaaagtggctccggtcagcgcccctcctaaagtcagcagcggccctaggctgcctgctcctcagatagtcgccgtgaaagcccccaacaccacgacaatccagtttcctgctaatttgcagcttcctccaggaaccgttttgattaaaagtaacagtggtccgttgatgttggtatctcctcagcaaactgtaacaagagccgagaccacaagtaacataacctcaaggccagcagtaccagcgaatcctcaaacagtcaaaatctgtacagtgccgaactctagctcacaattaatcaagaaagtggcagtgacacctgttaaaaaattggcacaaataggaactactgtggtaaccactgttccgaagccttcctcagtacaatctgtggctgtgccaaccagtgtcgtcacagttactcctggaaagccattgaatactgtaactaccctgaagccttcaagtttgggagcatcatccactccttcaaatgagcccaatcttaaagcagagaactcagcagctgttcagattaatctttctccgacaatgctagaaaatgtgaagaaatgcaagaacttccttgcaatgttaataaaactagcatgtagtggatcacagtcccctgaaatggggcaaaatgtgaagaagctggtggaacaacttttggatgcaaaaatcgaagcagaagaatttactaggaaactgtatgttgaactcaagtcttcacctcagcctcacctggttccttttcttaagaaaagcgtggttgccttacgacaacttctgcctaactcccagagcttcatccagcaatgtgttcagcagacttctagtgacatggtcattgctacctgtactacaacagtaacaacttctcctgtggtgacaactacagtgtcctcaagccagtctgaaaagtcaattattgtttctggagcaacagcacccagaactgtgtcagtgcaaactttgaacccacttgctggtccagtgggagcaaaagctggagttgtgacacttcattctgtgggcccaactgctgcaacaggaggaacaacagctggaactggtttgcttcagacttcaaaaccacttgtgacatctgtggcaaacacagtgaccacggtctcactgcaacctgaaaagccagttgtctctggaacagcagtaacactgtcccttccagcagtaacttttggagaaacttcaggtgcagctatttgtcttccatctgtgaaacctgttgtttccttctgctgggaccacatctgacaagcctgttattgggactccagttcaaatcaaacttgcccagccgggccctgtcctttcacaaccagctgggattccaacaggcagttcaagtcaagcaactattctcattgtttcacgtagttcagcagccttcaggaggcaatgaaaaacaagtgaccacaatttcacattcctcaacattgaccattcagaaatgtggacagaagacgatgccagtgaacaccataatacctactagtcagtttcctccagcttccattctaaagcaaattactctgcctggaaataaaattctgtcacttcaagcatctcctactcagaaaaatagaataaaagagaatgtaacatcatgcttccgagatgaggatgacatcaatgatgtgacttctatggcaggggtcaaccttaatgaagaaaatgcctgcatcttagcaacaaactctgaattggttggcacactcattcagtcatgtaaagatgaaccatttctttttattggagctctacaaaagagaatcttagacattggtaaaaagcatgacattacagaacttaactctgatgctgtgaacttgatctcccaagcaacacaggaacgactacgaggccttctagaaaaactgactgcaattgctcagcatcgaatgactacttacaaggcaagtgaaaattacatcctgtgtagtgataccaggtcacagctcaaatttcttgaaaagctggatcaattggagaagcagagaaaggatttggaagaaagagaaatgttacttaaggcagccaagagtcgttctaataaagaagatccagaacagctgagattaaagcagaaagccaaagagttacagcaattggaacttgcacagatacagcatagagacgctaatctcacagctcttgcagctattggaccaaggaagaagagaccactagaatctggaattgagggcttaaaagacaaccttcttgcttctgggacatccagcctgacagccaccaaacagttgcatcgtccaagaatcacgagaatctgcctcagggacttgatattttgtatggaacaggaacgggagatgaagtattctcgagctctatacctggcccttctgaagtgaccactccactcttccatccacatccttgctatttactgccaaagaagacacaaagcattgttgcactgtcctgaaatttcaatttctggaaaataatcaccaacatgaatgagcattgtttacagctagaaactttattaactcttacctatccatctcatgagactcttacagactcagattcatctttgtcttctgaaaatcagttatgaaatacactttgcacagaactaggcatctgcctatctgtgcattaaattaaagcaagctaaggccctatttgttactacctgcctcatttgccaaattgtaacaggtgaggtgtccttccctaatacagcatgcattgaaatgcatgagaaaggaagaggcatatcataatacaagaatgactatttcattctatattgaacctgtcccaaagtggtaggttttctgggctggaatcagaagttgcttagctaactatgacagtcaccctctgtacgtgacaggccactgtggtgactttggtcggctgagttccagtgttgtcaaaacaagacaaatggggatagattgtgcctggggttgctaattctctgcttcatatcaccatatgccgtttctggtaccaagtgaggggacatgcttgtcagggaaaccttaaaattgaatctactgatatatcttgttgaaaaaatggaaaaggtgcaaagtattagaaggaacgttagggccgttgctttcaaactgatgaggagaatgtgaaaatggtatcataaaacaggaaatgtgcttcatatgcccaagaggggaagaggtggaatcggaactccaaaacaactggtacatgttttgttgatgggcaaaaaaaaatcacagcacaaccagaaaggagaatgtaccagatgttttcaaattagagtatttcaaaaggaaaatgttattttttgttttgtattgttttaaatcccaaggatagtttttatagttccttctgtcataatatattttagttatcctaatttttaagcatgttggcacatttaaaaaatcctaattgatgatgagaattttt

SEQ ID NO: 123574 - DNA, 1658 bp, Homo sapiens
atgctttccaatgtcaaaagaggcagaaagctccctaatggtacctgggcccacgacctggtgactccacctaccgcctctttgctactgctgctcacagagcctgccatgccatctgtggctttctgtcattccattctcattgtcaccaagggaggggttaagagaaccagagtgcctcctcccaacaacagcagtggggccaggaccggtaatcctttgaaggttaagcatatctccttcaaaacaggtgacgagctcatcttcttggaccctcatacaacccagacctttgttgacactgaagagaatggaacgggtaatgaccaaactttccattgcctgcagtccccacagcgaattgaacatcctaaacctggatccttcagttgcattgggatttttctgcaaagaagaaaaagactttgataactggtgtagccttgttcagaaggaaattctaaaggagaatttaaggatgtttgaattagttcagaaacatccatcacactggcctccctttgtacctccagccaagccacgaagtgacaaccactggggcagaattcatttgactctactgagcaactgggaggagtttgatctgggaggaagattttgagattctgagtgtgtaggatcctgggggaacttcaactttgaagggtcttgtctttccattctgggcaccattaaaaacatgaacttattgcataaaacttttctagtcagcaagtgcctgatatgccaatagcatacaaactcaatagcaatcatgactgagccaatcactgtttctcagaaaaacaaaacaaaacaaaacaaatgacagtaacccttccccggaaagaaatagaacaatcatggagcctaggagcagagagatgaggaggagttcattgcttcccagcttgtgttatatggctacagcaagtcttcagctgctgcaatgaggaaatgggcatctggaagacaaacagcaactctcagcttgcttcaagaaccagcagataaaagatgggttaagctgttcttcaccctttcagatgtgacctcttttggacttaagcagcaatctgttctcttgctcaaataataaagtgactggaatcaggggagggaaaaggttctttgtttaattattttgattgtgtagttggaagtaattataatttaatatccaaaaaccgttttgttccaaaagaaaaccgatgtccaaaatataccaccttccttgaacctccccttcctgtttgccggggatccttacctatttgaatgggtccactgtccccccattccttactgatacttttgtccagatatcaccctgtcccttaaatccatgatcacttaaatccaggggtcagcaaactttttctgtaaagggcccagacgggaaatattttgggctttgcaggccatgcggcctctgtcacatctactcaactctgctgttgacatgcaaaagcagcaatagacaatatgcgtgtaaatgagtgtggctgtaatccaagaaaactttatttacaaaagcaggtggagggctgggtttggcctgcaggctgtagcttgccaatcagtgacttaaattgttgatttttgtttgataaattaaaaataaattgtgtttgaagtataccctaaaaaaaaaaaaa

SEQ ID NO: 123575 - DNA, 315 bp, Homo sapiens
ggcacgaggccacctttgatgccatctctaagacctacaactacctgaccggggacctctggaaggagactgtattcaccaagtctccctatcgggaattcactgaccacctcgtcaagacccacactagagtctccgtacagaggacccgggctccagctgtggctacaacatagggtttttacacaagaaaaataaagtgaattaagcctggaaaaaaaacaacaacaaataaaaacctggtcatttatgctatatttaaagcatttaaatcactttcagaattaccactggggatgttgtattaaaaattaa

SEQ ID NO: 123576 - DNA, 898 bp, Homo sapiens
  misc_feature (1)...(898): n = a,t,c or g
atgaagcagtgcctggctccagccttcctctcactgatctttgctagcattgtgcaaagaatcctgctggaaggctttggtagtggcatccggcaccagggttgtggctgtggacagggccagggccaaggccgtggagttcgtggaggcaaggccgagtataaggagtggatgaccgtcaccaagctgggccacctggacgaggttttgaaaattatgctggtgcagaagcagacccataccagccagtgtaccaggttcaaggcgtttgttgccactggggactacaatggccacatcagtctgggtattaagtgctccaaggaggtggccactgccatctgtggagctatcatcctggccaagctctccattgtccctgcgtgcagaggctactgggggaacaaaatcagcaagccccacaccatcccttgcaaggtggcaggctgctgtggctctgtgctggtgtgcctcatttctgtgcccaggggcactggcattgtcttggcccctgtgcccaagaagctactcatgatgactggtatcaatgactgctacacctcagccaggggctgcactgccaccctgggcaactttgccaaggccacctttgatgccatctctaagacctacagctacctgacccccgacctctggaaggagactgtattcaccaagtctccctatcaggagttcactgaccacctcgtcaagacccacaccagagtctccgggcagggactcaggcttcagcttgggctacaacataggggttttaatacagaaaaataaagtggattaagcgggnnnnnnnnnnnnnnnnnggggcgcccgttttaaaggaaccaagtttacggccccgggcgggcaagggaatattttttttaagggggcccca

SEQ ID NO: 123577 - DNA, 656 bp, Homo sapiens
caatggccacgtcggtctgggtgttaagtgctccaaggaggtggccaccgccatccgtggggccatcatcctggccaagctctccatcgtccccgtgcgcagaggctactgggggaacaagatcggcaagccccacactgtcccttgcaaggtgacaggccgctgcggctctgtgctggtacgcctcatccctgcacccaggggcactggcatcgtctccgcacctgtgcctaagaagctgctcatgatggctggtatcgatgactgctacacctcagcccggggctgcactgccaccctgggcaacttcgccaaggccacctttgatgccatttctaagacctacagctaccctgacccccgaccttttgaaggaagactgtattcaccaagtctccctcaacaggaactcactgaccacctcgtcaagacccacaccagagtctccgtgcagcggactcaggctccagctgtggctacaacataggggttttataccagaaaaaaataaggtgaattaagcgtgaaaaaaaaagacaactaaaaaggggccgccgtttttaagggatccctgaggggccccaagttacgcggtgtttgcagtgacaaagcctttccctttcagggagccgatttttaacctccctggagacttt

SEQ ID NO: 123578 - DNA, 2991 bp, Homo sapiens
atggcgcagtttaaaacccccggtgtgtgggaaaaggaagccaagggtgcagcactcaaggacttcaccggcaccaggttacaaagggagtggaggccgagacctcgctggggcagggacctcagctccccaggtgcgcacgtgctggtccagtggggcttcctatggggtgggtcagtttgtacagaacttgtggcctacgatgtcttatcagtgcactggtcacggatgctcatatggctgtgtggaccactctcaccgtcctggtcacggatgctcacagggctgtgcagaccattctcaccgtcctggtcacggatgctcatatggctgtgtggaccactcactgtcctggtcacggatgctcacagggccgtgcggaccactctcaccatcctgctgggcagcgtctgtctgtcgcagaacgtcaccacagcagcagacgccagccggagccagggtgctgggggcgtgccccgccagagcccttcacggccagtgaggaatagcacaaagaagcgggactggctgctgtccttcaaggagaatgttccacaatatcagctgatgtggtaccaggagaacttgtgtgaccttggaggaaagactgatgaccagatcatcaactggctgctagaattccgttcttctatcatgtacttgacaaaagactttgagcaacttatcagtattatattgagattgccttggttgaatagaagtcaaacagtagtggaagagtatttggcttttcttggtaatcttgtatcagcacagactgttttcctcagaccgtgtctcagcatgattgcttcccattttgtgcctccccgagtgatcattaaggaaggcgatgtagatgtttcagattctgatgatgaagatgataccacagagactgtggccatcattctggcagcagtgggagacacaggaagctctcgggtggggagcaccgactggggtccagggctgcgaattcaggccgatggaatcccagcccccaggggtgtgggccacttggccagcaccgctaggccctcctcgtccctcttcgtggaaaaccatgcagagggaggcagtaagtacttcgatagtacggctcatggtcaccccaagtccccgagaaggaaagagagtgacgccatggagatgggagtgaggacttggcgcccagcaccttccagtgcaagaagtcagggagttcaagatgagatcaaggctgatccaggccttgcgcggctcctgctcacaggatcctggggaccgtttcaagaagagcctcaggacacggagaatgctcagtctcctggctgtccccgccaggcaagagggcccgggggtggagggaatccaggggacacagtcctcaccccactgtcagcgccagcagaccccaacactcatcccccagccccaggcacacaacccgccctgccgcccctcgccaggccctgccgggtgtccaccctctgcggcagcagggcactgaggacgtggggcccgtccccggctgctgcagtgcagtgccacctgcaggccgtgtggcctgagcaggctgtgtcatctccaggcctgcagtctctcgtctgtaggaagaggatgatcagtagcccagccttgaagaatcctggctgtggcctcatgaaacaggtgccgttaaaatcagctgcattggaaacagccgagtcaggcaatgaaggcacagagaggccatgcactggctctgtgtctcctgcatcttcacttgtctgcctggctggcggccagcggcaccagaccaaggacccgccgctatttccctgtgttcactgccttcctcttcgcaaggacaccgagagcccctggctctgggcctcccatctgcccttcctcccgcccatcgtcagcgtttacgagggtctgccacgtgccaggcgcaggggaaacggcgcagggtcggaagcagaacccgcctactggggagacaggagtggggagtggcctcacaccccacaggaggggatggaggagcccaggaaagaggccctgggaggtacccccatcctggtccccggagcctgctatgaaacgctcagcctgggaaagaggtcctgggaggcacccccgtcctggtccccggagcctgctatgtgcctctcccacggcagtagggcctgtgcagatgggactgagcaaggggcctccaggtgggtgcagcttatccacgggggcacctggaatggcaatgagaggactttaggacccacaggcgggcaggacagccagagcctcactctaagcacccccggtcctgagcccgagccagagcagcctcctgcagctttgggcaagctcctgggctgtgttcagccacttctgtacgtggaaaatgcaaggttggtgtctgcctcacagtgcagccaccacatgactggtgtggggaacaagctgagctgtcttccccggaggccgggctgcaacccgagaaggcgccgcgccatcggccctcaccatgctccgcataagctgctgcttttcctctgcaaatgccctgggctggacgtcaaaccacagtcagttattggcggggggacttttccaggaatggccagtcaaggaatggtggatcaaccgctaaaggcatggggaattgaaaaattgttgcgctgcaagaggcatgaaagacactatgtacacatcagcagcatgttcgcattcattaagcataagcgctctcaagctttgacagcagacaagatgacagatcgtaccaagcctcccgatcgaatttttggcaaactttgcatcacaagcagaaatccaacaggcgcacagggcatccatttattactcatccgtaaccgattttgccaggtcacgcggctgcaggcatgcaagctttggcgcagcatatgtgtctaccggttatcaggggtgtattgcgcgatggcgttcaacaaagtttgcatgcttcaaccggcgtaccgtgccaaattcggttacgtttga

SEQ ID NO: 123579 - DNA, 730 bp, Homo sapiens
tcaaacatgagaattggtcgacggcgcgccaaagcttgcatgcctgcagccgcgtaacctggcaaaatcggttacggttgagtaataaatggatgccttcccatgtcctgtgccttcttccttcacaatgactttgcagccagccaatctctcctcattactgattacaccaccagaatttggccctaaaatagcttcaccaatctgcacatcatgctcagttaattttcctagaacattgattagtccgttttcacactgctgattaaggcatacatgagagtttcccttggctggggaagcctccaatcctgggattaattgcgttgcgctcactgcccgctttccagtcgggaaacctgtcgtgccagctgcattaatgaatcggccaacgcgcggggagaggcggtttgcgtattgggcgccagggtggtttttcttttcaccagtgagacgggcaacagctgattgcccttcaccgcctggccctgagagagttgcagcaagcggtccacgctggtttgccccagcaggcgaaaatcctgtttgatggtggttccgaaatcggcaaaatccctggcgaggaaggaagggaagacagccaaagagcagcttaaggctgccagcagtcttctctagaggatcccccacgcctatgcctacagcatccagggtgacggtgccgaggatgacgatgagcgcattgttagatttcatacacggtgcctga

SEQ ID NO: 123580 - DNA, 2463 bp, Homo sapiens
ctatactgagagcagtttgcacagcgtttgcagtagcagcgtggatttccccgcaccagggttaccgccaatcagaatggcacttcctggcaccacgccgccgcctagtacgcggtcgaactctttaaatccggtggaaaaacgcggcagctcttcaaggctgatatcggagagtttctggacttttgccaccccggcgctaccggcatagccgctgagacgctcgttacgcgccaccattggcgacgcagcaagacgcacctcggtgatggtgttccaggcatgacaggcactgcactgcccctcgttaatgctgtgccgcccactcgatggcgggcgagcaattacttctgattcaggctgcccgtcatggattttgccgttggcattaataatcgtgtcaactgcgcgggaaccagtgacgactgttaatgagccagcgttttccagcactacatttttagcttctgaattccataactgttggttccttcgataagtgttccggaggtcgtggaagcaattaatgccgccgccggattgttgctcaacatgcttagcctcaccaccgtcctgaacctccagaacgccgccattattaagtctggtgctatctgttttagcctccttctggacaatcagcttaccgccagtatcaatggtagtatttttcgccgagggtttagccactaccgtcagttcgccggtattttccagcacaacataattagcctcccctccggtaatagtgaagtgagagagcttgttgtatccttcgatatcagtccctgcacccgtgttggcaactaaagcactgcccgtctcctggttaaccccatgtgcaataccgccggtatagacaatcagcgagcctccggcgctaatattgctgccaattgccgtaccatctttctcaacaacctgccggctcccggaggatataattgttgtgtcagctttcccgccgcttttgatattttgcgttccgctgttgatattggtgcctgtggctatgccataattattaatattctgtgtgccaccattaattatggtatttgtcgcgtttcctgcaacatccataaccccgccattatctattcgggtcgcatcagctttagcattggttaaaactgacattgttcctttatctttaataatcgtcttgtttgccgaaccatatgcgtttatgtctaaatgaccaccgttttccagcaacacattgtcagtgcggccccaaagcttgcatgcctgcagccgcgtaaccctggcaaatcggttacggttgagtaataaatggatgccccagttcggcgcatcgtacggcttacgcggtagcagcggtttcacttcattcactaccacgctttcaccacggaacagaatgttaccctgagcgatacctttcgctgcctgcaacaggtctttgtcgtcacgaccaaacaccaccagcagtttgacgtaaggattctgcggatggttaatcatctcaatcaccggggcttttaccgccggatgatcgcgcaggaagtccggccgtttgtcgttggttgcaaagacaatggcattgcgatccggcagttggttatagagtaccgggaagttctgcccacgccagccagaacgcgaaccaaaccacgaggcgacaatggcagaggccgcaaagaccatcggcaaggtgttggtgcggttatcgctcgggtcaaagaatgggcaccggaagtgtgacaggtcattcttcacattcaaggtctgataggtcagatccagtccactgctccgccaaacatccagcaaaagcgtggtgctggccggtttttcgcacacgtcctgataatgggccgacaaactccagccgtacacggttgaagtcgccaactgttctttggtcactggcagcacgcccatcagttcatcattgagataaacctttaactgcgactggacaggcagtaacgatggcgatggggtgtattcgaggttgagcatcgccttcgtcaccacttcatcgctgcgcataccaaactcaatgctgccgttcgggttaatgccacgtagcaccatgctgcccggcggcggtgcaatttgcgcaaaggtcagcttcacatcacgcgaaggaccgttctgcgccacgactggcgcatcagcgccctgcacgcccggcatcacttgccccacctgcggattttgttccgtctgggcggctacagctggctcagcattgatcagtggttgcgttgctggcgtcgccagagaagtcagcacacggaatatgcccttcaccgaagaaggcgcaaactccgccagatggcggtagccacggaagccgagcttcagaatatccagcagacctttcagcggcttatccttccggtagctgtcctgccagacgcccatgtatccgcacgggcaaacgtacactggacaaaatcgatatggtgcatttttgaagactttcttcat

SEQ ID NO: 123581 - DNA, 924 bp, Homo sapiens
atggtatcagatcccagggtccaggtccagcccatgctgaagtccagaggggagtgggttgatgagcagaaagaacactccgggggccgtgagcaggtcgactctagaggatcccctatggaggagttttctgatgatgaagctgcattccagagggcagagcagaaagatgtgaagggggctcagaaatggacggaggatctggctctgaaggggctacgtgttttgctcgtggaaggtaacgacccccagggaacagcctcaatgtatcacggatgggtaccagatcttcatattcatgcagaagacactctcctgcctttctatcttggggaaaaggacgatgtcacttatgcaataaagcccacttgctggccggggcttgacattattccttcctgtctggctctgcaccgtattgaaactgagttaatgggcaaatttgatgaaggtaaactgcccaccgatccacacctgatgctccgactggccattgaaactgttgctcatgactatgatgtcatagttattgacagcgcgcctaacctgggtatcggcacgattaatgtcggcatccatttattactcaaccgtaaccgattttgccaggttacgcggctgcaggcatgcaagctttggcgcgccgtcgaccaattctcatgtttgacagcttatcatcgaatttctgccattcatccgcttaagcttgcatacctgcaggtcgactctagaggatcccctgtgcctttattcattctacccatagaacatcaattcccagggacaattaacacttaccttatcacagcaggcagagttgggtaccgagctcgaattcccacaacgactatagaggatcccttaagactcaccacacctataactgatgctccactcctgactaaagcctacattatttcctaa

SEQ ID NO: 123582 - DNA, 840 bp, Homo sapiens
atggaaaaactgtttggaaaagaggagcatgctaacaatgcacaggattttggagagttaggattgaagacaagaaaactagagagacatgatgcaaaatatcattcaccaaaggcagaggagaagcaaatgaagcacaaagcaggaagccagatagttaaaaaggaagaagccaaactggctcttgctttggagggattttgccgatttcggaaccaccatcaaacaggattttcgcctgctggggcaacccagcgtggaccgcttgttgcaattctctcagggccaggcggtgaagggcaatcagctgttgcccgtctcactggtgaaaagaaaaaccaccctggcgcccaatacgcaaaccgcctctccccgcgcgttggccgattcattaatgcagctggcacgacaggtttcccgactggaaagcgggcatggcccccattccggttatttttacctcataagggatttgcggattggggacccaccatcaaccaggattttcgcttgctggggcaacccagcgtggcccgcttcctcaacttctctcagggcccagccggtgaaggccaatcagctgttgcccgtctccctgggcatccatttattactcaaccgtacccgattttgccaggttacgcggctgcaggcatgcaagctttggcgcgccgtcgaccaattctcatgtttgacagcttatcatcgaatttctgccattcatccgcttattatcacttattcaggcgtagcaaccaggcgtttaagggcaccaataactgccttaaaaaaattacgccccgccctgccactcatcgcagtactgttgtaattcattaa

SEQ ID NO: 123583 - DNA, 1398 bp, Homo sapiens
atgcccctgccccttcccctgtgggctcaggttcttgttgcttatcccacatgtttttccatcctccttcaagggccaaccgcgcctttgtggacctatgcccccatggatgaaatccagaatgctgagatcaactcccaggtgcggaggtacctggaggggacactggacgagatcgacgtaaggaacccctctgtgaccactatgctcagccagcctgggcctcccagtcctgggcacaccccaacgcatgctctgctggcctcagagcctcatgtgaatgggtgcaaaactgtgtctacagttcatgaagattattctggctcttctgaaagttcaaatgatgaaagtgattcagaagatacagattcggatgatagcagtattccaagaaaccgtctccagtctgttgtggctgtgccaaagaattctactttgcccatggaagaaacaagtccttgttcttctcggagcagtcaaagttatagacactattctgaccattgggaagatgagagattggagtcaaggagacatttgtatgaggaaaaatttgaaagtatagcaagtaaagcctgtcctcaaactgataagtttttccttcataaaggaacagagaagaatccggaaatttcttttacacagtccagtagaaaacaaatagataaccgcctgcctgaactttctcatcctcagagtgatggggttgatagtacaagtcatacagatgtgaaatctgaccctctgggtcacccaaattcagaggaaaccgtgaaagccaaaataccttctaggcagcaagaagagctgccaatttattcttctgattttgaagatgtcccaaataagtcttggcaacagaccactttccaaaacaggccagatagtagactgggaaaaacagaattgagtttttcttcctcttgtgagataccacatgtggatggcttgcactcatcagaagagctcagaaacttaggttgggacttctctcaagaaaagccttctaccacgtatcagcaacctgacagtagctatggagcttgtggtggacacaagtatcagcaaaatgcagaacagtatggtgggacacgtgattactggcaagccaatgggttactgggatccaagatcaggtagacctcctggaactggggttgtgtatgatcgaactcaaggacaagtaccagattccctaacagatgatcgtgaagaagaggagaattgggatcaacaggatggatcccatttttcagaccagtccgataaatttcttctatcccttcagaaagacaagggggcatccagtttattactcaaccgtaaccgattttgccaggttacgcggctgcaggcatgcaagtctttggcgcgcgatcgaccaattctcatgtttga

SEQ ID NO: 123584 - DNA, 1860 bp, Homo sapiens
atgaggagtgtggctgcggaaccccagcgcgtggcctgtgacccagcttccccacttgcccgccgggaatatgaagacaaggctggaagacctagcaagccaccctctccaaagcagaatgtgaggaagaatcttgactttgaaccactttccaccaccgcactcatcctcgaggacagaccagcaaatctcccagcaaaaccagctgaagaagctcagaagcacagacagcagtatgaagaaatggtggttcaggccaaaaagcgagagctgaaagaagcccagcgaaggaagaagcagctggaagaaagatgcagagtcgaggaaagcattggaaacgctgtgctcacctggaataatgagatcttacctaactgggaaacaatgtggtgctctagaaaagttcgagatttatggtggcagggaatccctccaagtgtgagaggcaaagtctggagcttagccattggcaacgagttaaatatcacccacgagctctttgacatctgtcttgcccgagccaaggagaggtggcggtcccttagcacaggaggctctgaagtggagaacgaagatgctggtttttcagcagcagacagagaagccagtctggagcttattaaactggacatttctagaacatttcctaatctctgcattttccagcaagttctcatctttgtggatttccgtgtgggtcttcagaaatcttttcagaagaggaaagagagggaatctacaaagctccagcagctttggtcctggtgtctgggtggtccatatcatgacatgttgcacagtattttgggcgcttatacttgttaccggccagatgtgggttatgtccagggcatgtccttcatagcagcagtgttgatcttgaacttagatactgcagatgcctttattgccttttctaaccttctgaataaaccctgtcaaatggcgttttttagagtggaccatggccttatgttgacttattttgctgcatttgaagtattctttgaagaaaatttgccgaaattatttgcgcatttcaagaagaacaacctaactccagatatctacctaattgattgtgattcaggctccttgttgggtgctgacagttcggtgaaagctcagatcagaaacaggttgggcagtagggaggaagcaaaggggaagaacagactttacataagacctgtcctagaagctgccatttcagaagcactcgtcactgtggtcttcagtgttcaggagcaggtgtacctatttctgggcacagaagaagtcactgaggcccatggtcccggggccctgattagtagacagggcagaggccagttctgttccgtggatgccgtcttcctccttcacgacagccctgaactgccctcgtccttaccccatggtgcttccttgcctctagcaagctcagacaagcaggcggaacagacctggctaggagctgtgggctctgtgcaatgcacgtccataactgcatgtcctcgggacctggaggacaggccgcatctaacggagcaccccccggccggaatccactgtgggcagaacccatgcccctgtcacttgatctttaccttatatagtaaatctctgcccctcgacctggcctgtcgtatctgggacgtgttctgtcgcgatggggaagagttcctgttccgcacggccctgggcatcctgaagctgttcgaggacatcctgaccaagatggacttcattcacatggcccagttcctgacccggctgcccgaggacctgcccgccgaggagctgtttgcctccatcgccacgatccagatgcagagccgaaacaagaagtgggctcagcgtagccggcaagtggcgtga

SEQ ID NO: 123585 - DNA, 991 bp, Homo sapiens
atggaggactggaaagttagaggccatcaggaaaagactctggcctttgaagtccagtcgttttcatgctctgaaagggagaccacactggtgctgctgctccggagtccagcagtccctcagctgctgcttcatgggctgtgtggcccggatttgtccacaaaggctgctcagtgtcattttaaagccatatggcagagcctgggaaacacgctgggggccgtcagcgatcaggccacacccggccatgtgaagagcctacctcccggggccctgattagtagacagggcagaggccagttctgttccgtggatgccgtcttcctccttcacgacagccctgaactgccctcgtccttaccccatggtgcttccttgcctctagcaagctcagacaagcaggcggaacagacctggctaggagctgtgggctctgtgcaatgcacgtccataactgcatgtcctcgggacctggaggacaggccgcatctaacggagcaccccccggccggagtccactgtgggcagaacccatgcccctgtcacttgatctttaccttatatagtaaatctctgcccctcgacctggcctgtcgtatctgggacgtgttctgtcgcgatggggaagagttcctgttccgcacggccctgggcatcctgaagctgttcgaggacatcctgaccaagatggacttcattcacatggcccagttcctgaccccggctgcccgaggacctgcccgccgaggagctgtttggcccctccatcgccacgatccagatgcagagccgaaacaagaagtgggctcaggaacctggccacgaactagagtggccagataggtctttcaggcccagagtgctggcctgccccatgggctcccgcgagcatcgcctgcagccagcctgctctggcagcaccggccagggccacaccaaggcactgtttcccgagacttgctgccaaagccccattttccaggatgcctga

SEQ ID NO: 123586 - DNA, 2679 bp, Homo sapiens
ctactgacaccagattcttgtgttctcagctctcctatagccacaatgtgggcattcattagctatgccaatcagttgctcagactcggactttgaaccggggctaacattacaaagaagtggaagccatgaagaatctattctgtgggaggcattgttgttggtcacagcaaagtactgcaaattactcagatactggatttcttctggaatgaaggtcaagtggttatagcttagatccaaataatgtagtttagtgcataggaaaagctgcaagggcagattctcaatattattatggtccaaagagagctgctctaggttagataatgccccaatctgtgcaggaatataagcaatgttattgtgccacaactttaagcaggaaagattctgaagatgctgaaagctaatgatctcttccacagttttaaggttattttcccttaggtctaactcatgcaaattattcaggctgaaaatggaatgtgggatgcgttccaggtcacagctgatcagttctaggcttttcagattgaccatctttttcaagttgttcaacacaaccagtttgcttccctcattatcaagggacagtttctgcaatgaaggcaggaggtctgtaacaacttgtgggatccgggagaggctgctcttcaagtacagggtccttagattttttaagtcctgaaagccctccaactgcatagtactcaactgttcagggagaacacagcccgaaagataaagttccttgagattcttgaggtgaaatacccagcgtgggatttttcccatttcagtaaatttcaggcggaggatttttaaattctcctctagaaaggccagtgcaggatggtctacgaccagagatgaatggtacacacgaagctccttgaggttgaccagctgtgagactgcagagggcagcttcacctctgggataagctccaggcttagcacttccatttcagttaactcaaagacattgtctggaagaccgttgagcataaaaagatgcagttctatcttgtcctgggcatttttcacaagcttacttttcagtttctcaactgtccattcattattgaggttgatctgtttcagtttgttctcactgacctctgataggaatatggagaagcgtttggaataaagaggatcatactgatcagccagatgaaggatgaaggcaaagtcattcttgacatcagggatgtcactgtagttgcttttttctcttaacgcctcaaaggaatattgcttcagggaactcctcagcatccaccacaggctgtaggaagaggtcagaccataaagtataaccaaaatgacataaaatgaagccaggaccttaaagatttctgccaaggaatagacacactggtagcgcttatatcctgtaaaagcctgcacatcaactgaacagtcgatttcaagagtgatgtgggttaaaaaatatggaacataagttatgatgagcacaaacaaaatgactttgactattatctgtttcagatatactctataaatgatgtccttctgctccacatgcatgcggaatcttttcactttttcaaagatggctttggcctgttcaccctccttcttgtccaggacactggaagttgggctttctatgccagctgactccaaacctggctgtgggtagggcaatgactgtttgccggaatctatgtcagctgaacaccctgaggacgaaagcaaaatcttggacttggagagtttcagaggcctcactgactgctcagccactgtttctgaaagggcgcgggtggtccatggagaatcgaagcacttgtgaaggatggccacaaaatgctcgagcctggaactggtactggggtagtgaagccaaaagttgctgcaggctgcaaagatgagcgtgtgcaagagcaccagataggggaaaaactttgcaaaccaatggagctgtttctcgtaacagacggcatcaatatacgagtactgctgtcggaggaggtcattagggtcccagaagcaagggcagtgaggacctggcccacgtccctggcacgggctgtctgattctccttcgctgtggcgggaagatggccggatttgaaggtaatacccaagaccccgattccctattttgggggtacagacaacaggacactggacatcttggtccctacccttggcttctaggccagtggaacaagtcactgacttggaaaccagggcctgccttctttcggcttggggacccaaggtgcagctggtagtagcagttctgtggaacgctggcacaatcacctgccaaaaccacccacagtggtggatgggggacagggctgaggttgacactctggagcatggatgagcaaagggaaggatgtggccttggatgtggctctcagggatgccccagacctgggatgtgggcttcagggtagctggccaaggagctgccccttcggctgggtcagcaggcggaaaggcacaagcatgaggatggtcttggtcccttctccggaggccacagcccccaggatgcagggagcctggttttgccacagccagcaacaacttgacctggggctcctgtctccacctccatggattccagccaatcacaattgcaagcccagggcagggcaggcacgtgctggaggagcccctaggccccatcat

SEQ ID NO: 123587 - DNA, 1078 bp, Homo sapiens
agctgcagagggctggacccacaagtgggttcctggcgcaggagatgtgggttggtcagggggcacctgccatgggctcaggcctgcctgcactgtgccccttccaggatgacaccatctccatcaaccacaactgggtcaatggcttcaacctggccaacatgtggcgcttcttgcagcaggagctatgcgccgtgcaggaggaggtcagcgagtggagggactccatgcccgactggcaccaccactgccaggtggggtggctacgcatggaggctaccctcctgggggaggcttttaggctgcatggctcagactcccttggtcaccgcgcagcttctcagtgcctctgtcttaatggtcccttcttcgtccttggggactgggcacatgtcgggtcctttgcaggttggactgtgtccatggtgttagctcactggcctcttccctctgcccaggtcatcatgaggtcctgctcgggcatcaactttgaagagttttaccacttcctcaaggtcatcgctgagaagaggctcctggtcctgagggagtcagccgctgagcacggtgctgggttgggtttcgaacaggcagcctttgatgttgggcgcatcacagaggtgctggcctccttggttgcgcactccgacttccagagagtggacaccagcgcgttctcaccacagcccaaagagctgctgcagcagctgagagaggctgttgatgctgctgcggccccatagcacctgggcctgagggactgtgcctgctgtgcactcacagctgggtcttcccaaggatgctgttctcaggagtggtgggtccccagcccctcttcacactgggtatgatggaggtgtgggcgggctcgtccaggccgatcaaggcacagcagtgagcagcggaggccttcaaatccggccatcttcccgccacagcgaaggagaatcagacagcccgtgccagggacgtgggccaggtcctcactgcccttgcttctgggaccctgtgagggcaggaaccggagccttgccctcatgactttagcggccgctcgcgatctagacccacgcgtccg

SEQ ID NO: 123588 - DNA, 2415 bp, Homo sapiens
gagagagatctcctcagcctccctagtacctgggattacaggaaggcgtctccactcccggcttttttttttttttttttttttttaaagagactaggtttcaccatgttgcccaggctggtcttgaactcctgagctcaggtgatgcatccacctcagcatctcaaagcactgggattataggcatgatcagtactttctaataagcagaaccattgtagtcagactgccccgccccctcccccgccagcagcgtctggctctagaggatgggtctgggggctcttttgggggcttgcagccatcctggaaggctccactggagccgattggtctcagttgccccactcgtgctgccctagtctcctcgtgcctcacgtgctgtcggtggtgcccttgcgccctcctcacagggactttccggtggaggacgttttcaccctgcctgtgtacttctcgtccgactggctgaatgagttctgggatgcactggatgtggatgactaccgctttgtctacgcggggcctgcgggcagctggtccccgttccatgctgacatcttccgctccttcagctggtctgtcaatgtctgtgggaggaagaagtggctcctcttccccccagggcaggaagaggccctgcgggaccgccacggcaacctgccctacgacgtgacctccccagcactctgcgacacacacctgcacccacggaaccagcttgctggcccacccttggagatcacgcaggaagcgggcgagatggtgtttgtgcccagtggctggcaccaccaggtgcacaacctggatgacaccatcttccatcaaccacaactgggtcaatggcttcaacctggccaacatgtggcgcttcttgcagcaggagctatgcgccgtgcaggaggaggtcagcgagtggagggactccatgcccgactggcaccaccactgccaggtcatcatgaggtcctgctcgggcatcaaactttgaagagttttaccacttcctcaaggtcatcgctgagaagagggctcctggtcctgagggaggcagccgctgaggacggtgctgggttggggtttccaacaggcagccttttattgttgggcgcatcacagaggtgctggcctccttggttgcgcaccccgacttccagagagtggacaccagcgcgttctcaccacagcccataaggtaggctgcagcagctgagagaggctgttgatgctgctgcggccccatagcacctgtcgtgaggatagaaggacgggtggacgagaggcagcctcctgctccggggcccttccagaaataaagaccgccctccctgtgacctggggcccacccctgtcgaggcttgtggcctggctgttcatggccactgcctgggtgcctgttttcagggtgaaggcccaatggaggtcagggacccaagatggggatggtggcccttctgacctgcaagcagggcctgctgggagctcggagatggtgccaggacctggctcttttgggggccctgcctccttaggccaggacgcctgagctgacaggagtctgtgtctggtgtgccttctctggtggcatcctcttaataggccagccctgtcccctcgtctcaggccattggaccacccctggctctgccctgtgggttcagggaggggttgaagcagtgctgggcaagctcaccagggcctccaggcagggctggggttggcctccatcacctccaggtgatgggctgtggaaccagcggcctgcgccttcctctgggtacccagagtggagggctgggttgggctggcctttgcccacctcccctgcctttgcagggccctgtggacagctggagaggccacagatggggtggaatcccatctgctgctgaatcctcacctgggcctgagggactgtgcctgctgtgcactcacagctgggtcttcccaaggatgctgttctcaggagtggtgggtccccagcccctcttcacactgggtatgatggaggtgtgggcgggctcgtccaggccgatcaaggcacagcagtgagcagcggaggcctgtggtggggaatggactctcgtgggatcctcttgcagaggatgccccaggcctgaaccctctagtggatccacagtttgtggagactggcactctcccagccctgtccttgaccgagagtccagcattttttcagttggcccctggttggctgcctcaccccagcaggggaggaggcatccgaatccacagggacggcacgtgccatggctatgcacattgcctgcccgtggcatcaactggggcccgctggcacttgtctaggatggaagcccccaagaagggcaggggtttctgtctgctctgttcagtgaatcatgtgaagtgcttgcaaaggcagctttacacagt

SEQ ID NO: 123589 - DNA, 888 bp, Homo sapiens
atgaaacggagggctgtcatgggcccaccccaggtgcaagcctggaaggccctggacctctgggagtcctctcaagtcatggaagggaaggccgtggtgccaatgggcaggaaccccatgatgcgcaaggccacccaaggacaactggaaaacagcccagctctggagaaactgttgcctcctctgcaggggaatgtgggctttgcgttcaccaaggaggacctcactgaggtcagggatctgctgctggccaataaggtgccagctgccacccgtgctggtgccattggcccatgtgaagtcactgtaccagcccagaacactggtctgggacccgagaagatttcttttttccaggctttaggcattaccactaaaatctccaggggcaccactgaaatcctgagtgatgtgcagctgatcaagactggagacagagtgggagccagcgaagccacactgctgaacacgccgaacatctctcccttctcctttgggctggtcatccagcaggtgttcaacaatggtagtatctacaaccctgaagtgcttgacatcacagaagaaactctgtattctggcttcctggagggtgtccgcaatgttgccagtgtgtctgcaaactggctacccacctgttgcatcagtacccccttctatcatcatgggtacaaaggatgcctggctctatctgtggagactgattacaccttcccgcctgctgaaaagatcaagaccttcttggctgatccatctgcctttgtggctgctgcccctgtggccactaccgccacggctgctcctgctgctgcggcagccccaactaagtttgaaaacgaggagtcggaggagttggatgaggatatgggatttggtctctttgactaa

SEQ ID NO: 123590 - DNA, 988 bp, Homo sapiens
tagtccagtgcggtggaattcgtggaagtgacatcgtctttaaaccctgcgtggcaatccctgacgcaccgccgtgatgcccagggaagacagggcgacctggaagtccaactacttccttaagatcatccaactattggatgattatccgaaatgtttcattgtgggagcagacaatgtgggctccaagcagatgcagcagatccgcatgtcccttcgcgggaaggctgtggtgctgatgggcaagaacaccatgatgcgcaaggccatccgagggcacctggaaaacaacccagctctggagaaactgctgcctcatatccgggggaatgtgggctttgtgttcaccaaggaggacctcactgagatcagggacatgttgctggccaataaggtgccagctgctgcccgtgctggtgccattgccccatgtgaagtcactgtgccagcccagaacactggtctcgggcccgagaagacctcctttttccaggctttaggtatcaccactaaaatctccaggggcaccattgaaatcctgagtgatgtgcagctgatcaagactggagacaaagtgggagccagcgaagccacgctgctgaacatgctcaacatctcccccttctcctttgggctggtcatccagcaggtgttcgacaatggcagcatctacaaccctgaagtggcttgattatcacagaggaaactctgcattctcgcttcctggagggtgtccgcaatgttgccagtgtctgtctgcagattggctacccaaactgttgcatcagtaccccattctatcatcaacgggtacaaacgagtcctggccttgtctgtggagacggattacaccttcccacttgctgaaaaggtcaaggccttcttggctgatccatctgcctttgtggctgctgcccctgtggctgctgccaccacagctgctcctgctgctgctgcagccccagctaaggttgaagccaaggaagag

SEQ ID NO: 123591 - DNA, 1196 bp, Homo sapiens
atgagggagattgcgctcacgcagacccggcagtgcgggaagaagatcggtgccaaggttggcatccggggctctgaggtcccagctccggcctactgggtggccagggaagatgttggcagtggcagtggcttgggcggtggctggtacgtgccctgcgctgtgctcgtggacctggagccggtcaccatggactctctgcgctcggggcccttcgggctcatcttcaggccgacaacctcatctttgaaactcatagaaaatgcagataagaccttttgcatagataatgaagctctatatgacatctattccagaaccctaaaactgcccacacctacctatggtgacatgaaccacctgttatctgctaccatgagtggggtcaccatgtgcctgggcttcccaggtcagctgaatgctgacctacagaagctgtctgtgaacatggtcccatttcccaggctgcatttcttcatgcctggctttgccccactgaccagccggggcagccagcattaccaggccctgactgtggctgagcttactcagcagatgttttatgctaagaatatgatggctgcccgtgacccccgtcacggccgctacctaacggcggctgccattttccagggtcgcatgcccatgagggaggtggatgaacagatgttcaacattcaagataagaacagcagctactttgctgactggttccccgacaacgtaaaaacagccgtctgtgacatcccaccccggggggctaaaaatgtcaggcagcttcattgggaataatgcggccatccaggaactctttcacgtgtgtctcagagcagtttacagcaatgttcaggcgcaaggcccttcctccactggtacacgggcgagggccatggatgaagatggaattcacccgaggccgagagcaacatgaatgaccctggtgtctgaatatcagcaatatcaggatgccacggcccaaggaggaggaggatgaggagtatgctgaggaggaggtggcctagaactctccttttctaggtaaagcgggggaggcagtgtgtattcttcactgtgttgtgacagctatgtgtcactacgcacttgttcatttgtgtcttcacatctcctgctgctgcattttaaagcacttttatagtgtgcagttttgactaataaagtattctcacagcaaaaaa

SEQ ID NO: 123592 - DNA, 926 bp, Homo sapiens
ccgaggcaggcgcgcggcgggcaggcctgggagggggcgggtccgcgcgagcttcggaggagcccgccctgccagaggagagggaggtcacggcgtaaaggtgcagctgccgccaccgccgcttctgcaaggtctcagggacgggctgcagccatgtcctattgccggcaggaaggctttgcccaggatggttccttctggaatgactattcccctccttccctccctgaagctctttgtcagggacaaaggtaggatccctccccttccgtcttctccactggatgcctgtgtcgtattcatctgtgaccaccaggtactaccacagagctggagctgaggaagggaaggatcgaatcatatttgtaaccaaaaaagatcatgaaactccaagcagtgcagaattggtggctgatgaccccaacgatccatacgaggagcatggattgatactgccaaatggaaacattaactggaactgcccatgccttgggggaatggccagcggtccctgtggagaacagtttaagtcagccttttcctgcttccactatagcacggaggagatcaaggggtcagactgtgtagaccagttccgggccatgcaggaatgcatgcacaaatacccagacctctatccccaagaggatgaggatgaggaagaggaaagagagaagaagccagcacaacaagcagaagaaacagctcccattgaggccactgcaaccaaagaagaggagggatcaagttaatgaaggccacaaggcactgagcaccagtccttttggagtggaccttttgcaaaaggccttgtcatcaccttccaagaaagtttccttctgttgtcctgtgcattataatatacaaaataacttattttgatgatcagaggtcttgaggtcttgacctcttgacatatacactgg

SEQ ID NO: 123593 - DNA, 807 bp, Homo sapiens
atggggaagttgcgcacgatgtgggtgtacaccgaacaaccggggaaattggtgcgtaatgcgggaatgcgaagaaattggggcgatatcgggacgcaatgggtgacatattgggggcaacgcgcggcaatatcgggagagttcatggagagcctgcaggacccagacctgaacgtgcgccgtgcgactctggctttcttcaactcagctgtgcacaacaagccctcgctagtccgggacctgctggatgacatcctgcccctcctctaccaggagacaaagatccggcgggacctcatccgagaggtggagatggggccctttaaacatacagtggacgatgggctggacgtgcggaaggcggcctttgaatgcatgtattcactgcttgagagctgcctgggccagctggatatctgtgagttcctgaaccatgtggaggacgggctgaaggaccactacgacatccggatgctgaccttcatcatggttgcccggctggccaccctgtgtcctgcacctgtcctgcagagggtggaccgactcattgagccactaagggccacctgcactgccaaggtcaaagctggttctgtgaagcaggagtttgaaaagcaagatgaactgaagcgctctgcaatgagggcagtggctgccctgctgaccatccccgaggtggggaaaagccccatcatggccgacttctcttcccaaatcagatccaaccctgaacttgctgccctctttgaaagcatccagaaggattccgcttcagcccccagcacagactcaatggagctcagctag

SEQ ID NO: 123594 - DNA, 4159 bp, Homo sapiens
ctccagcctcctggagaagatgacgtccagcgacaaggacttcaggttcatggccaccagcgacctgatgtcggagttgcagaaggactccatccagctggacgaggacagcgagcgcaaggtggtgaagatgctgctccggctcctggaggacaagaacggtgaggtgcagaacctggctgtcaagtggctgggtgtcccgctgggcgccttccacgccagcctcctgcactgtctgctgccacagctgagcagcccgcgcctggcggtgcgcaagcgggcggtcggagcgcttggccacctggcgaccgcctgcagcaccgacctcttcgtcgagctcgctgaccacctactggaccggctgcccggcccgcgggtgcccaccagcccgactgccatccgcaccctgatccaatgtttgggcagcgtcggccgccaggccggccaccgcctcggggctcacctggaccgcctggtgcccctggtggaggatttctgcaacctggatgatgatgagctccgggagtcctgcctccaggcttttgaggccttcttgaggaagtgccccaaggaaatgggtcctcacgtgcccaacgtgaccagcctctgcctccaatacataaaacacgaccccaactacaactacgacagtgatgaggatgaggagcagatggagacagaggatagtgaattcagtgagcaagagagtgaagacgagtacagcgatgacgatgacatgagctggaaggtgcgccgggcagctgccaagtgcatcgcagccttgatcagctcgcggcctgacctgctgcccgatttccactgcaccctggcacctgtgctcatccgccgcttcaaagaacgcgaggagaacgtcaaggctgacgtcttcactgcttacatcgtgctgctgcggcaaacacggcccccgaagggatggctggaggccatggaggaacccacccagaccggcagcaacctccatatgctacgtggacaggtgccccttgtggtcaaggccctgcagcggcagcttaaagatcggagcgtcagagcccgccagggatgcttcagcctcctcaccgagctggcgggtgtcctcccaggcagcctggccgagcatatgcctgtgctggtatcaggcatcatcttctcgctggcccgaccgctccagttcctccaccatccggatggatgccctggccttcttgcaggggctgctgggcaccgaaccagctgaggccttccacccacacttgcctatcctcctgccacctgtgatggcctgtgtggctgactctttctacaagattgcagccgaggccctggtggtgctgcaggagctggtgcgggccctgtggccgctgcacaggcctcggatgctggatcctgagccatatgttggagagatgtctgctgtcaccctggcgcgacttcgtgccactgacctggaccaggaggtgaaggagcgggccatttcctgcatgggccaccttgtaggccacctgggtgaccggcttggggatgacctggagcccacgttactgctcctcctggaccgcctgcggaatgagatcacccggctgcccgccatcaaggcgcttacgctggtggccgtatccccactacagcttgacctacagcccatcctggccgaggcactgcacattctggcctcattcctgcggaagaaccagcgggctttgcgactggccacactggcagccctggacgccctggcccagagccagggcctcagcctcccaccgtctgccgtgcaggccgtgctggctgagctgcctgccctggtcaacgagagcgacatgcatgtggcccagctggctgtggacttccttgccacagtgacccaggcccagccagcctctttggtggaggtcagtggccctgtgctctcagagctgctgcggctgctgcgttcgcccctgttgccagccggagttctggcagctgctgaaggcttcctgcaggccctggtagggacccgtcccccgtgtgtggactatgccaaactcatcagcctgctcactgcgcctgtttatgagcaggctgtggatggtgggcctggcctgcacaagcaggtgttccactcattggcccggtgtgtggcagccctctcagctgcctgtccccaaagaggcggaaagcacagccagtcgcctggtctgcgatgccaggtcgccccactccagcacgggggtcaaggtcctggcattcttgtcgctggctgaggtgggtcaggtggctgggccaggcccccagcgggagctgaaggcggtgctcctggaagctttggggtcacccagtgaggatgtgagggctgcagcctcgtatgcactgggccgtgtgggtgctggcagcctgcccgacttcctgcccttcctgctggagcagatcgaggctgagccccgacgacagtacctgctgctgcactcactcagggaggccctgggggccgcccagcctgacagcctgaagccctacgccgaggacatctgggccttgctgttccagcgctgcgagggtgctgaggagggcacccggggggtggtggccgagtgcattgggaagctggtccttgtgaacccttcgttccttctgccccgcttgcggaagcagcttgctgcaggtcggccacacacccggagcaccgtcatcacagcggtcaagttccttatctcggaccagccccatcccattgaccccctcctgaagagcttcatcgctgtgcacaacaagccctcgctagtccgggacctgctggatgacatcctgcccctcctctaccaggagacaaagatccggcgggacctcatccgagaggtggagatggggccctttaaacatacagtggacgatgggctggacgtgcggaaggcggcctttgaatgcatgtattcactgcttgagagctgcctgggccagctggatatctgtgagttcctgaaccatgtggaggacgggctgaaggaccactacgacatccggatgctgaccttcatcatggttgcccggctggccaccctgtgtcctgcacctgtcctgcagagggtggaccgactcattgagccactaagggccacctgcactgccaaggtcaaagctggttctgtgaagcaggagtttgaaaagcaagatgaactgaagcgctctgcaatgagggcagtggctgccctgctgaccatccccgaggtggggaaaagccccatcatggccgacttctcttcccaaatcagatccaaccctgaacttgctgccctctttgaaagcatccagaaggattccgcttcagcccccagcacagactcaatggagctcagctagtcccctcagcaccaaggtgggccctcgcttaagagaaaggagcccacccaagtccgaggcctccccatcccaccatcgcaggtctctacttttgcccttccaccatctcactgggggccctgtcgctcctggtcagggcttacagtgccttctccagggacccaactcaaaggcccccagcccaagctgtgaggctgccaacagttgggccccttccttaactcaggacagtcatccaaagaaatagggtgaggaagttttccagtgacttcacactgtacccctccatagtctgtctggttccttcagagggtgtctctgcctcacaaactagtagtatttagaaataggctgtgctgtcagctgtaaaagatcaggaggcagcagacaccactctggtttcttcactgcattcagcaatgcctgaagttagtgctcaggccgggcatctcaaaagaaaagatacttgagttattcacattttaaaattcaaaacggttcatttttaagtggcagtgatgaatcagaaatttggaagatgatacgggtttcttttttccagggaggaggaatgggttgggtagggaactggacaggcttggacctcatgtttcatttctaatttcaaaatacttattagcaaattgggcaacaatgggcatcttccatgccaccacccaggcataaccagttggtttgtttccttctgaggaaggtttcaaatgtgtctagtgttcagtattgaggacaaagaaatacaagtggcaggcccaagtattttctgtgatatcccaggttaataaagattagattctaagtt

SEQ ID NO: 123595 - DNA, 3178 bp, Homo sapiens
atgggggttaagttacttgtccatggtcacacggccagggctcacctggaccgcctggtgcccctggtggaggatttctgcaacctggatgatgatgagctccgggagtcctgcctccaggcttttgaggccttcttgaggaagtatgtatggtgccccaaggaaatgggtcctcacgtgcccaacgtgaccagcctctgcctccaatacataaaacacgaccccaactacaactacgacagtgatgaggatgaggagcagatggagacagaggatagtgaattcagtgagcaagagagtgaagacgagtacagcgatgacgatgacatgagctggaaggtgcgccgggcagctgccaagtgcatcgcagccttgatcagctcgcggcctgacctgctgcccgatttccactgcaccctggcacctgtgctcatccgccgcttcaaagaacgcgaggagaacgtcaaggctgacgtcttcactgcttacatcgtgctgctgcggcaaacacagcccccgaagggatggctggaggccatggaggaacccacccagaccggcagcaacctccatatgctacgtggacaggtgccccttgtggtcaaggccctgcagcggcagcttaaagatcggagcgtcagagcccgccagggatgcttcagcctcctcaccgagctggcgggtgtcctcccaggcagcctggccgagcatatgcctgtgctggtatcaggtaggctggactgcaaccaggtatctgctgttctgggccacttccagaacccagaccccacccctgagttgagcccccagttcctgagacagtctgagacccaatcccaggctcagtccctggtcaagagtctccagtggcctcccactaccagcagtgagaacaaggctggctccagcatcatcttctcgctggccgaccgctccagctcctccaccatccggatggatgccctggccttcttgcaggggctgctgggcaccgaaccagctgaggccttccacccacacttgcctatcctcctgccacctgtgatggcctgtgtggctgactctttctacaagattgcagccgaggccctggtggtgctgcaggagctggtgcgggccctgtggccgctgcacaggcctcggatgctggatcctgagccatatgttggagagatgtctgctgtcaccctggcgcgacttcgtgccactgacctggaccaggaggtgaaggagcgggccatttcctgcatgggccaccttgtaggccacctgggtgaccggcttggggatgacctggagcccacgttactgctcctcctggaccgcctgcggaatgagatcacccggctgcccgccatcaaggcgcttacgctggtggccgtatccccactacagcttgacctacagcccatcctggccgaggcactgcacattctggcctcattcctgcggaagaaccagcgggctttgcgactggccacactggcagccctggacgccctggcccagagccagggcctcagcctcccaccgtctgccgtgcaggccgtgctggctgagctgcctgccctggtcaacgagagcgacatgcatgtggcccagctggctgtggacttccttgccacagtgacccaggcccagccagcctctttggtggaggtcagtggccctgtgctctcagagctgctgcggctgctgcgttcgcccctgttgccagccggggttctggcagctgctgaaggcttcctgcaggccctggtagggacccgtcccccgtgtgtggactatgccaaactcatcagcctgctcactgcgcctgtttatgagcaggctgtggatggtgggcctggcctgcacaagcaggtgttccactcattggcccggtgtgtggcagccctctcagctgcctgtccccaagaggcggcaagcacagccagtcgcctggtctgcgatgccaggtcgccccactccagcacgggggtcaaggtcctggcattcttgtcgctggctgaggtgggtcaggtggctgggccaggccaccagcgggagctgaaggcggtgctcctggaagctttggggtcacccagtgaggatgtgagggctgcagcctcgtatgcactgggccgtgtgggtgctggcagcctgcccgacttcctgcccttcctgctggagcagatcgaggctgagccccgacgacagtacctgctgctgcactcactcagggaggccctgggggccgcccagcctgacagcctgaagccctacgccgagggacatctatgtcttgctgttccagcgctgcgagggtgctgaggagggcacccggggggtggtggccgagtgcattgggaagctggtccttgtgaacccttcgttccttctgccccgcttgcggaagcagcttgctgcaggtcggccacacacccggagcaccgtcatcacagcggtcaagttccttatctcggaccagccccatcccattgaccccctcctgaagagcttcatcggagagttcatggagagcctgcaggacccagacctgaacgtgcgccgtgcgactctggctttcttcaactcagctgtgcacaacaagccctcgctagtccgggacctgctggatgacatcctgcccctcctctaccaggagacaaagatccggcgggacctcatccgagaggtggagatggggccctttaaacatacagtggacgatgggctggacgtgcggaaggcggcctttgaatgcatgtattcactgcttgagagctgcctgggccagctggatatctgtgagttcctgaaccatgtggaggacgggctgaaggaccactacgacatccggatgctgaccttcatcatggttgcccggctggccaccctgtgtcctgcacctgtcctgcagagggtggaccgactcattgagccactaagggccacctgcactgccaaggtcaaagctggttctgtgaagcaggagtttgaaaagcaagatgaactgaagcgctctgcaatgagggcagtggctgccctgctgaccatccccgaggtggggaaaagccccatcatggccgacttctcttcccaaatcagatccaaccctgaacttgctgccctctttgaaagcatccagaaggattccgcttcagcccccagcacagactcaatggagctcagctag

SEQ ID NO: 123596 - DNA, 318 bp, Homo sapiens
ccggggcgttcctgagtttatttggtccatacatgagtgttgacgcacagtctcttctcctcgcactcacagtagaagcaggagatgggtgggtgatgggacacttgctgtccccctttgcccagtcggcggggaggaggccgtatttctgctggccagagacgtcgcgtccctggctgggcattcagtcacccccaggaaaggaggtgtgcctagattgatcggtataaggctcactctcccgccccccaaagtggttgatcgttggaacgagaaaaggggcatgttcggagtgtatgacaacatcgggatcctggg

SEQ ID NO: 123597 - DNA, 318 bp, Homo sapiens; identical to SEQ ID NO: 120030

SEQ ID NO: 123598 - DNA, 1455 bp, Homo sapiens
atgaaactcatggaaacacttaaccagtgcataaacgctggtcatgaaatgacgaaggctatcgccattgcacagtttaatgatgacagcccgaaagcgaggaaaataacccggcgctggagaataggtgaagcagcggatttagttggggtttcttctcaggctatcagagatgccgagaaagcagggcgactaccgcacccggatatggaaattcgaggacgggttgagcaacgtgttggttatacaattgaacaaattaatcatatgcgtgatgtgtttggtacgcgattgcgacgtgctgaagacgtatttccaccggtgatcggggttgctgcccataaaggtggcgtttacaaaacctcagtttctgttcatcttgctcaggatctggctctgaaggggctacgtgttttgctcgtggaaggtaacgacccccagggaacagcctcaatgtatcacggatgggtaccagatcttcatattcatgcagaagacactctcctgcctttctatcttggggaaaaggacgatgtcacttatgcaataaagcccacttgctggccggggcttgacattattccttcctgtctggctctgcaccgtattgaaactgagttaatgggcaaatttgatgaaggtaaactgcccaccgatccacacctgatgctccgactggccattgaaactgttgctcatgactatgatgtcatagttattgacagcgcgcctaacctgggtatcggcacgattaatgtcgtattaagtagcagaaatgcccaactactacttattagatttgattcccagaatctccgggccctgagaaaggcatgctgcctggtacaagcggagagtagaaccaacacagaggtggagctgggtagccctgggttcaaatctaggctctcggggtctttgaggaacctctggcgggaggtgacccgatacctgcggctgggggacattgacgcagccaccgagcagaagcggcacctggaggagaagcaacgggtggaggaacggaagcgcgagaacctccgcacaccatggaagcccaaatattttatccaggagtttgccacatcttgtcctaggtttggggaaacaacagtgaacagaagagacaaagtggcaccgagagcctgctgtttacaaatgacacttctctggcaccccttctctcgagtttctctccaatgtgctgcttctggtgctgatgaaggttttcagtgtcatccagttttttcccacatgccccactcctgttcagtttctgcttgtgatgagtttcctgctgctgtgccaagtgaaaaatgtctcccaagatggggctacacatttcacagggaagtgtggattgatgaactgctgccaacaggacagaaagggagaaagaatggagatcgaggaactgtgtcgcctcatgaaacagatttacacagacaagcttag
